United States Patent Application Publication US 2015/0354009 A1 - sequence listing, part 10

SEQ ID NO: 224 - DNA, 137127 bp, Homo sapiens
atatgataaatagtacctggagcgcctacttcacaagaaagcctgagagagtccagttgtactcaaggagagggagaagtagccaggagacagatccggtaggactgtgaaagccatggtaagaagctgggaacgtatcccaagtacgttggaaagctgctggaaacttttaagcagggaagttatacaatctgatttacattttgaaaatggctcgctgtttgagtaacaaattctaagtgggcagatgcagaggcaggaagaccagttaggaagtgactgaaatggtccatgtgagagaagttagttggtggcttagtttagggtagtggccaaggcagtggtgaggagtgggtgggttccatgtataacatgaagatagaattgatagagattgctgatgtgggatgtgggaaagggaaaggtcaagattgcaaatgaatttcatttaacaaatattgaggctatttctgagataagaaagactgggaggaaaacagggtgggttttttttttttttttttttggcagggggaggagagagggtcacaagtttggaaatcatatcatccaagaagatatgattatagattataataaaagattagtgtactgctgtgaacatctgtgtcattttcagagctaccaccgtggattcctgagcaacttaatgcatgctgtaaataaagaggctgacccacatcttgtggctaaagaacaaatcaaacatcctttgtgacatttgtctgaaaagagggtaccatgtgattttcattttgtcaacttcactcccaaagggtatttaagagaaaatgcacgtttagcattttctgaacattatattagtggagggactcacataacattttgtaagtagaccattctaagtaacatctttttaattcagttttttggtatcttgtttttaaatagcagagtataccattaaagttaaatctgatgaacaccaccaacacattttagagctaataaaggcatatcacactttatatgtctttggtaaggatacaagaatattaatttctagccgggcacagtggctcatatctgtaatcccagcactttgggaggccaaggcaggcagattgcttgagcccaggagttacagaggagcctgggaaatatggcaacaccccatctctacaaaaaacacaaaaattatccaggtgtggtggcatgtacctgtagccccagctactagggaggctgaggtgggaggatcacttgagcccgggaggtcaaggctgcagtgagccgtgatggtgccactgcactccagcctgggcaacagagtgagatctgtctccagaaaaaaaaaaaaaaggaaaggaaagaaaaataatttctttttagatagacaggaggagaacatagaaagttaatttgttcttggctcctttaggtttatagcatgttgttctaaaatagaattggctcagctccaaaaacttaaatagaaggtaattctaaagtatatttttaagccaataataatgtatattttgacccagcatttgcttgctttgaaatgtattctttacaaatttaagtggcttatcagtcaatgtagataataaaatgaggtcattgtgaggatcaagtcagaaaacgcagatgaaacactttgtaaacactgaagtactttgtaacataatttttaaattattattatactattgtgtatctttagtaagatgcagagatgtctcagtttgatttaggactaatcataagaaaggtaaatttcccacacttactacattgaaataggtgaagtgcataaagttcctaagacccctgactagatagatattagtgatttcatttttcaacaaccttacttttgctttctgtatccattttacttttttacttcttcctccttttcttctcccattgtctctccctctccctgtccctctccttcactccctgtgtctccctcttccctgccctctcctgttctcccagccctcattctttccatatagattctcagctaaactctattattcatttgaccacaggtttccctctgaaagaggtaatctattaagtcactcatgacagagcagatctagcctcaagacataggctgagccaccaatagaacttggctgagcagctacccctccatacctcttgggccctcatctacctagtatgttggattctgccccctcccaggttatggattcaggatgcatgttgctgtagtaaaccatgcaaccaagtggagagcaaaccatgctgcctttttccttgatttggaataagactccagatatgagttacttttcaacaaaaggggcaatacaaatattgtggttggggtgtaggagaatcctgatttaacttcaaggactttgatgaatctacactgaggtgcacaatagcaataatcatgtaaaactaagccattgttattggtgaatattctttgatcatacacttaataaatgtgctgtttcacttacttctaaatgattttgtggcaaatgatgttgatgtgactgaccactcgctcacccacaggcatctgctttaagctgtcatttcttcagtgaggtgaatttgttgtatccacagaattttgaaattaaggatgcagttctgggaacgagtaagaggtttgtttttctctctgtgtacataaatcattgattaacctcaatgatctcgttagcaccatggtcagtccatccagaatcaaagaagctaccaaaatgttggtcaagggaagagacaatataatacatatgcataactactacatgtgtttacatacacttattatgttgtaggctagcagcggagtgaacggcttttattaaataagataccatttcaccctgacatcatatgttatataaaacaaaaaggcttcctattttggactcttcagattaaaaaaggtattaagaaatgttatgaattgaaaagtaacataagagataaggcatggttatggttgataatgaaatattctggtacttttttgtacacctggatggtgtttaatattcctgagcaagtttatctacattataaagttgttgtgcattgtgttggtcagcttccagcagctgaagggaaaaccagtcattctttgaggtgtttactgatggaagttggctacttgattttcatttcagtaatttggtttccaaaggtaagaacatagtagaaattctacttttctcttctgaatattacatttgtagtgtggtagacttaaaattatattatgaacaaagtaataatgtagacagaaataggaattacactgaataattacacaggtagaatgagaaaattggtaaatgatgtatattacatgcaagcaacttggtaaatgtggttgatgagtgaaaaggaaactgtagttattgcatcacacttaggaagggatcctgtaggatagtgtgggagtgtaagagcttgctgagtaaggagaccattcacaacagtgggagaagtctgagtgctgtagctagaggaaagttggtagtgaattttctaattcagtcattcatttgcaaacatatactgagcacctatgactgtgattctcactgtgctgggctttgggcgtaaacactagttaagaaaggctggtttctgtctaagcagaagacacaggactctgaatcctgggagctataaacatgggaggagagaggtgataagtgaaactatgagggtggatgaggtcaccctccgtatgtgaagagggagcaatacaatgggccaagtgtggagccctgaggaaatccaggagggtcataaagttcctgctagcaaattatgcagacaccaaagtcaagggaagagaaggtttcaaggaaggaagaagcatttaatactgcatttagtattaaatgcagcagagtgctccagtaaaattagaatttaaaagcattcaataggtggccctttaggaaatcacttggtaacaccgcatagtggatcaaagcactcaggcttgtggggtcagactgcccaggttcaaaacaggcatctgttgcttcctacctctgtgactatagcagttatttatgttgtcataaggaacgatctgggttccagtgaaacggattctgagatggagtttaccatgcaggatgtttactagggagtgctcatgagatcagcaccagtggaaaggaagggaaggaagcaggattgggcagagggagaagttgagctgcaaggcagtctcaagaaaggcctcagttgaacccattgggtgctctgaagctgggttgacccttgagagttgctctgatgatgggtgaggacattcggcctttatactgctgcatgtaatgtacatatactgtaaaatgaacaattgctggatgtgtgctaactgggaaggcagtgtagtgtggtcttggactctccgcagctaaggccatcctccaaagaggtggacagctgaggccctctgatgacagcacatccatttgctgaagtaacagctcttaattcctgaaggaagacctggacaatcactttctaatgtgcacatgtggatttagtaagatactatacatagagtgcttagtgtaatacctcacacacagtaaataatcaatgaatataaagttttattaaatggctggaacccacagagtagacgttgaataaagagtgaatgagacttgagaaagctgagatgtttggctcccgaggaaagtggactcaagtgaggatttcacttttttataaaggataggagagattcatgtaatgagaaagttcaaggagagaaagaggacctgaaagtataggagagaggaagacttcctggtggagaagaagatcatagaaacagagtcttggggatagagctggcctgggggtgaagaaagccagcttaggaggtaaggatggtgtagatacaagtgtgggttcgactgaggcctttcctgagactgcatggcagctgaacttctccctctgcacaatcctgcttccttcccttcctttccactgggcttgacctcatgggcactccctagtaaacctcctgcatggaaacctccatttctgaatctgtttccctggagcccacctggttcttcatgaagatgtaaataattgctgtagtcacagaagtagcaagcaacagatgcaagttttgaaggtggacagcttgatctccaagcctgagtgctctgatacactatgccgtgttacccagtgatttcctttggagggggcgtggtggttgcagaaatttgaaataatagcttgagagataaaatgaggttatgaaagaagcaggagtaaatataaaaagtaagattgcctagggctctctaatcaaattctttgaggaagaagatcatggctttgttctgatccactgaaagatgacatgacagaatcctagatagtgcagtcaaggtgaatagtggagaatgtgattttggcagcaagattagaaatgagattaaccagtgagggagaggagtaatctcaagaggaagatgttaccatggtccaggcaagaaataaccagaggctgcaccaagatattacctgtgaagataaagcaaaagcaataattattaaagatgggactataacaagagcaagatttgtcaggtgttcaatacagttgtcactagccgattgttgctactaagcacttgaaatatggctagtctctctgtgatgtgctatgatgtaaattacacaatggattttcaagacagtatatcattaatatattttatattcattacaagtagaaatgataataattggaatatgttgaatgaacatttattatcaaaattaattttatctgttcctttttactttttttaacatggctactatttaacataaaatttaaaattacatatgtggttcatattgtatttttgttgggcagtgctgctgggaggttgctgatactggggtggtgactggaatacagagaaattggcacaggttagagttgtagaaaaacaatgccgggtgcggtggcacatgcctgcggtcacagcagtagctgatgcaagaggattgcatgagaccagcagttcaaggctagcaatttaaggccagcctgtgcaaaatagaggcaccccctcgctcaacagtaaaaataaaaaataattctaaaaagcagcaataagccctttggaccacatttgaattggtaattaaatattcaggtggtcacaacttgtagatggagtactgttccaccgattcaagtggcatgttcagaatgtcacttacattacctgtttggtctggtacatatctaccttcttgactgatgtaactggaacatatagtgggttgattaatggaaaaaaaatcagttaaagaagataattgttttaaaaaaatgaagcatacaagaacaattttgataatttattttaacttaaaacataagcaatactgattcatctgttgattgttggatataggatcaaggccttttctatgcatatgggaccattgacttgaagtttctttcatttttcttgaaaatatcacattcataattcattttctgtcatttctagttttagtttcttaaaagtggagtgataagtttttgaacaaatctaagggcagaatgtttagagatttttgttttctttagtctactacagttttctcatccatagctgattccattttcaaacttgaagtgtttccaaagcattcaaccttcttctactctcatatttaccaatttacctaatttttaattaattatacaagctcgagtaaaagtggcataaatatttggtgacatacctgcctgactctccttatgcacagaatccagcggtgacagaatcatgatctccgctggagcactggccagaaatggtcaggggacctagacaaccaccaatatgcttcagaatgtgggtgaggagctgcttcagtgtaggctggctaagagaatttctttggcgcttaacagggaggggcaggcatttgtgtttggagttcagaaagtagaagaaaaaattctggaacagcaaggcctggacaggacactgcagtggctggtaagaggctgtgtaattggagagtctgccccagcaaggggtgaaggggcacagcaggtttccatttagtgagcacttctcctgtgttaggtgctgtgcctacccattgacaggcattattttatgaataaacattcaatggagtgctcacagtgtagcctcctgttcagatgaagtcattgagtaatcttccaaaacaagtaggcctgatattaaaaaactctggccaaaaataaaaacaaaaataaaaaatgctgtccatcaaacttctcttgaaccattgttcctgcaatcttgtgtgcatgagaatcaccaccggaagtgtgtatgtttggggcaacccaaccacttactccaatgcagatttccaagtccccattccctgcaaaatggatcaaattgatctggaatatgatcatgctctccaggtgatcctaatgcagacagttcatgaaaactgagtgatgacacaatactacctttacagaggagggccagccagagagggagggagtgctgatgagtgagtaatgaagactagagatggatatgcagtggtctgctgaagccagctcataccacttgcaagagccaaatgttaaaattaaaggaattttgtgcatcatttgttgaacagagccattatttaaaaaataatataaatgatataaacttgcaattgaattgattatgttaaaaacaaatgtaataaacacacgtacttatcacttctatgttgccgtatttatcttctatattcttttttcctccaagggtagagactcaataaaattaataacttgtaatattttatcaagaaaaattttaagtgaaactctcttttatcttttaaaaaattttttttttagggtgacagagccatggagaaaacagtaactactgatgcaagttaatgccctgctttgatttgtgctacaggacaagcagctttacagtcaaagaggctagtgacaacctagtattatcattaaaatcatttaaatcaattaactaatgtataagcacttaacatgagatctactgtttttctttttttctttttttttttttttgagatagagtctcgctctgtcgtccaggctggagtgcagtggcacgatctcagctcactgcaacctctgcctcccgggttcaagcgattctcctgcctcagcctcctgagtagctggtactacaggtgcccaccaccacgcccggctaatttttcttgtattttctagtagagatggggtttaccacgttggtcaggctggccttgatctcctgacctcaaatgatccacccgccttggcctcccaaagtgttgggattataaacgtgagtcactgcacccggctggtacctactcttttacaattttaagtgcatagtacagttttgttaaccataagcacaatgttgggcaatgttggacagcagatctctagagcttactcatcttgcgtaattgaaactttatgccattgaatagtaactccaggtttcctccttgtcccagccactggcaaacatcctgctctctgttcctatgagtttgtctattttagatatctcatagaagtgtaatcatgcagtgtatgtttttctatgatcctctaggatcattcatgtcaggtactgcaaaattttcttttttaaaggctgaataatatgctattatatgcatgtaccacatttgctttatccattcatctgtccatggatatatgaggttgtttccatatcttggttattgtgaataatgctgcaatgaatagaagactgcatgcatctctttaagattctgctttcaattcttttggatatatacccaagaagtgagattactgtatcatatgttaattccgtgtttatgttttttgaggaactaccgtactgttttccttagcagctgcatcatctcacattcccacaacagtgtacaaggattccaattctccacatcttggtcaacattgtaatctttttttacagtagccatcataacatgtgtgagatgataactcattatggttttgatttgcatttctctgatgattaatgatgttaagcattttttaatacacccaatggctatttgcatgtcatcttggaaggaatgtccattcaattcctttacccattttaaatcagattatttgttttttcactattgatttgtatgggttccttatatattttagatatgaatattttatcagacatatgatttgcaaatattttcttccattctgtaggttgccatttcactctgttgattatatcttttgctctgcagaagctttttagtttgatgtggtcccacttctctaattttgcttttttgctggtgcttttgttgtcatatccgagaaatcattgcctggaccaatagcatgaagattttcccctatgtttctttctaggaatgttatagttcacaacacaattcactctgtgttgacttttgtgtatagtgtaagacaagggtccaatttcattcttttgcatgcagatatctagttttcccagcattatttgttgaagagactatcttttctccacagtgtattcttggcattcttgttgattagttgactgtatatacctgggtttatttctgggatctctatctattgatgtatgtgtgtgttttaatgacagtactatactgcattaattactacagctttataatatattttaaaattaggaagtatgaatattccagctttgttcttcttgctcaagattactttggttatttgaggtattttgtagttccatatgaactttagaaattttttctatttctacaaaaatgccgttgagattttgatagagattacgttgaatttgtacattgtttttggtagtgtagacattcaaaatatattgtcttgcaatctattaaaacaggatatctctgcatttgtttgtttttctttagtttcactgtgaagtttttcgtcttcttggttgactttattcctaaggattttattcttatttttattcccaaaatgggactgttttcttaatttcctttttgggtagtccattgttagtatatagaaatgcaactgatttttttgtatcttgatttttgtattctgcaactttactatgtttgtttatagttctaacacttttcttgtgagtctttagaattttctacatataagataatgtcatctgcacacagagacaattttatttcttcctttccaatttagatggcttttatttctctcacttacctaattgctgtggctaagacttccagaactatgttgaatacaagtggtgagagtaggtatccttgctttcttcctgatttttgaagaaaacctttcagtttttcaccattgaatattatgttagctgtagacttttcatatatggcctttactaatgttgaggtaaattctttctatatctagtttgttagaagttttttttttattatgaaatggtgttgaattttgtcaaagctttttattgtctttattgagaatttttcctatacattcatcaagaatattgacctgtagttttcttttcttgcagtgttttttgtctggctttggtatcaaggtattgctggccttataggataaattttgaaatatctcttctgttaattattttgaatagtttaagaaagattgatgttaattctttaaatgtttggtagaattcactggtgcagctctttacttttcgttgttgaaaggttttaaattattgatcctcattttgtctgtttcagtgtagagagattttacattattgaactttatttttatttgtctgtttagacattttgtctcctcttgattaagtcttggtaggttgtatgtttttaagaatttatccatttcttctaggttatccaatttgttgacatattgttgttcataatagtctcatgattctctatttctgtggcatttgttttaatatctctgcttccatttatgattttatttatttgagtattttctcctcatttttcttagttattttaggtaaagatttgctgattttgtttttcttagaaactcagttttgttgattttttctatattctattttatttatatttgctgtaatctttattacttctttccttatgctagctttgaacttagtttgttattctttctctagtttattgaaatgtaatgttaggctgtttatctgagccctttttttctttttttaccatacatgttcattactataaacttctctcttagtactgcttctgctgcatcccataaatttttgtatattgtgcattcacttgtgttgaaatttttttttttttttgagacagagttttgctcttgttgcctaggctggagtgcaatggtgtgatctcggttcactgcaacctctgcctcccaggttcaagtgattctcctgcctcagactcccaaataattgggattacaggcatgcaccaccacgcctggctaattttgtatttttagtagagacgggtttttaccatgttggtcaggctggtcttgaactccttacctcaggtggtccacccaccttggccttgccaagtgccgggattataggcatgagccaccgtgccctccccttgaaatatcttctaatttatcctttgatttttttcttcggcccaatggttatttaaaagtgtgatgtttaatttccacatatttgtgaattttccagttttccttttgtttttgatttctagtttcatttcattgtggtcagaaaagatatttggtatgatttcaatcttaaatttgttgagacttattttatagcctaacatgtgatcacatgtgaatttgacactgttctgcatgcacttgagaagaatgtattttgctgctattgagtggaatgttatgtatatgtcttttaggtccatttggtctatactgttgttcaagtctgctgtttcctttttgattttctgtctgaatgttctatcaattatcgaaagtagggtatgaagtcccctattttattgtgttgctctctacttttccttcaagcctgtcaatgtttgctttatatattttggtgctctaatgttgggagcatatatatattttttttattatactttaagttttagggtacatgtgcacaacgtgcaggttacttacatatgtatacatctgccatgttggtgtgctgcacccagtaactcgtcatttaacattaggtatatctccaaatgctatccctccactctctccccaccccacaacaggccccagtgtgtgatgttccctttcctgtgtccatgtgttctcattgttcaattcccacctatgagtgagaacatgcggtgtttggtttttttgtccttgcgatagtttgctgagaatgatggtttccagcttcatccatgtccctacaaaggacaagaactcatcattttttatggccgcatagtattccatggtgtatatgtgccacattttttaattgttacgtcttcttgatgatttatccctttcatcattaaataatggggacctcctatgccagtttctgacttaaattctattttatttgatatgattatagttatccttgatctcttttggttatcatttgcatggaatatcttttttcatctctttacttttagcctatgtgtatctttgattctaaagaatgcctcctgctcacaacatataattatttttttaatccattcagctattctacgtacttttattggagcatttaatccgtttacatttacattatcgataggtaaggatttactattgatattttgtcattttctgttttgtagttcttttgtctctcttttcctctgttgctgtcttcctttgtgttttgctgatttttttgtagtgatatgctttgattcccttattttttcttttgtatgtatgtatttatttctttttctttatctattgtatgtattttctttatggtttccatgtttctttgtctctctcttctccttctggacacccataatcaatatatttgttcacttggtggtgtctgataattcccttagactctcttcactctttttgattttctttgctttttgcttctctgactggataatctcaaatgacctgtcttggagttgactaattcttctgtttgatcaaatctgctgttaaacccttatgatgaatttcttatttcagttattgcattctttcacctcagaatttccatttggttcttctttatcttttctatttcttcataatattctcatttatttaatgtgttatttccctcattttgtttagttgtctatctgggttctcttgtaacttgttgagctactttaagatgatcattttgaattctttgtcagacaattcatagatctccatttttttagggccagttgttgtatatttattttgttcttttgattgcgttttattttcctgtttcttcatgttacttgtagctttgcattgatgtctttacatgtgacatccatgtcttaatgacatgttctccactcttaatgaactggctttgatagggaaagacagcccagatagagtttctgggtcttgttcctaggtcctgatccaggtgttcagtctttttcttttcttttcttttttcttttcctttcttttcttttcagcactagcaatctcttgctccctctggttcccatgtcagtctcatctgtgctccatatgagatgagatagaaactagctcttcagggagctcactgaaaggctcaggacattagagtcatgatccactcctccttctttcctgaaggagaggccttagttctatgccttctacagatctctccgagccttgccagccatgggaaggtgcccattctcctagctttcccaggcatctggactatgccatgtctttaagcactctgtaagaggcacaacagaagccagccccttgaggggtgtactgaaaggccagaaatgttggatgctcaccctactctctatcccctgccctccctacaccaggaaaggattgtagtctctctggtgctgagttgtactcgcaggtaaagtgaaatagcttttcttatctgtttcagtgtggctgattgtgattttttgtttgtctggggtactgaaatttcttaacttaatcctgaacttcttatgaagctaatttgttacttatatcactgttaaatctgtgtttctgttgggaaatgagggctggaacttcctattctgctatcttgctgacatcactctatccttgatgttcttgaggttatttatgtctattgtatctgtatgggggagatgtatgtattagtggtggttctggctcagagtctctaatgtggctgtggtaaacctcagatgtcagagatggagccctcttgaggctcaggtggggctgagatctgcccctgcccacccacatggttgttgacagacctcagttcttaactgaatgctagaccgaggatgtcagtttctctcaggctgtttgccagatgcctcagttccttgctatataagcctctccacaatatggcagacaacttccccaagacaagcgatggagtgatgggggactgggggaaggaaaggagggagagagagagggagagggggaggagagagcgcacacacaagcatgagagagcaattaagatgggagctgcagtctttttaataacctaattttggaagatcatctcattacttttgctgtgttatgttcatgagaaaaccactaagtcctgcctacactcagatggaagaaattaagtttcatcacttgcaaaggaggagtataaagaattgtcccatcacaacactatatgatgtcatgctactgcatatctcttcctaacactgtattcagtgatacaacattggtagtttgaaatcagccatggtgggaatatttaaaccatggaaattagcaaacattctaagtcagacttttccccccagacagctgacatttaccagcacacatcaggatgaatatagagctatgtgttcacaaaatttttatgaagtagacgaattttaggaagggctttgaaagaaggaaataaaatattattgataaagaaaaagatagtttcttaatttaaagataatagaggtgaagcaagaagtggagggagacctagggagtttaaatatgctcttatggatgcctataatgacatgaagaaaaagcagctctttctttctctttttgtttcttgtgtgtgcatgtgtgcacatgatttgaaatggagattgcatactaaatttaactatgtgtacacacattaaagacttggcatacaagatttttctttaatccagcaatcaggatgggtatataatcttttacataattgcctatgaagccacaaacaagtaatccatacgccagtaaagttgatacagctgacctatacctaaaatagctcagaaattcaaagaccaaattttagttcatttgaactgatgccttggtgtatgtagtacgaccaataatatgtgaggagtgccaccatttatcaaatgagcaggaattcacttcaaaaagaaaatttccagaatcatagcattttaggtctgaaagagacagtgggaaacctacagtacattatttctcaaaatgtctttgtcaatcaaacatcaacatcagaaatgactggtcttctttttaaaacctagaagcttgttaatacctgaaacccaccccagacctgatgaattcataggggcttaagaatctgcacattctataaactctctacatgattctgttgcaagcaaacgttagagagtgaaaaatccaaaccttttattttatagattagggaaacaaacaactaagctgtaaaagagaaccccctgcccaacaagtgagaccacatagtaggcatgattttacacattacaatttttttttctccaaaataaaattttttaaatccagcaatcagggtggatatataatcttttgtataattgcctatgaagccacaaacaagtaatacatatgccagtaaagttggtacagctgacctacacctaaaaatagcccagaaattcaaagaccaagttttcattccaaaattttttattttggagaaaatagaacgcatatcctttgttcaaagagacagctaaggaacaacacaggacttcaatgaaaaatatgttgtttatgtgtgtagttactagtcagtatgccccacctagccacaaattagtgtggttactctaaattgctaacatgaaaatcttaacctcctacttctgaagttatttggttttagctactcaatttttttttctaggcttccaaggttgctgttttgggcatggttttagaaatataattataagtttgatttcaaacttctggaccatgtaatcaagcacagactggtcatagtggaaaatatacaatttttagctctgcctacattgacaaaaaaaaaaatggctggatccacatcaattcaacttgagtgccatgtgtttacagtgacagtttctccccgaaaacgcaaaaaaaaaaaaaaaaaaaaaaagaagatccatgctgctgtagtatatgtacataggggtgtttaaagccagcccctccagcagcaccttaccaaccatgtctgtgcttttatttattgatccaataagatgacttaaatatctaactccttttccacgtaaaagtttttattatgtgcaatgcattgttaaacaggtgaagaatgaacaagtttagaaaaacaaagaagcttaacatggaaaattacccgcatggtgtccacttttcctgctcggttgcaatacccaatggattatttattaatttagatttgtgctgtccctgaatccaaacagcagcctctttagagtaacatctgctccagacattgctccaggaatataaatcccgactaaggggtggatatttaaagctgtaaatgattttttatttttacaatagctttgcaaaaggaacggaggtgtcatgtcatcatcagagttttcttaacaggatttaatcttaatgccaaactaaatcctttgtctaaagcatcagcagagttgtacttattttccccatagtattaaagaggagggctggtgcaggcacagccatatgacattgccttatttattttgtctgtttgttttctggaagaatctaggaatgtgcataaatacaattaaggacagtatctacaaattggaagaaagcatttctattctcttaaacctctaaatcaaagcacttaatgttctgatttccagcaagaccttctaataaatgaaaacccaacccttgggtttgtgttttgactcttgatacaattatgaaagacgcatcaggagatggcaagtggctgccagtacttccttttttctggaatattctctaattcttggtggatcaagatggaaactggtaggcttggaatagatgtccctttaaaaggctccactaacaatacaagaatattttttccatacgcagtgacgtgggtgggtcatgggtgtctcaatgacagtaacgttcccgaaccccggaccttagctgtcatttcacctgcgtcgtcccggacgccatttggctgttgacgtggttccgagccagcaaataacgccagcagccctcccagatccacgccggcccgtctctccgccggccccctcctcgcagtggtttctcctgcagctcccctgggctccgcggccagtagtgcagcccgtggagccgcggctttgcccgtctcctctgggtggccccagtgcgcgggctgacactcattcagccggggaaggtgaggcgagtagaggctggtgcggaacttgccgcccccagcagcgccggcgggctaagcccagggccgggcagacaaaagaggccgcccgcgtaggaaggcacggccggcggcggcggagcgcagcgatggccgggcgagggggcagcgcgctgctggctctgtgcggggcactggctgcctgcgggtggctcctgggcgccgaagcccaggagcccggggcgcccgcggcgggcatgaggcggcgccggcggctgcagcaagaggacggcatctccttcgagtaccaccgctaccccgagctgcgcgaggcgctcgtgtccgtgtggctgcagtgcaccgccatcagcaggatttacacggtggggcgcagcttcgagggccgggagctcctggtcatcgagctgtccgacaaccctggcgtccatgagcctggtaagggcgctgccccctgacagccctgggggcatcccggaggggggcggcagagggtgggactggtggcggtgggggaaggagggagggatgggcccaggggtgcctcttggtaaaaggtatctaaggtggaaggtgggaagtggagggagggatggaaatggggaagaacccgacttagagcgccagtggcccaatttctgctttcccgtcccatccccccagcaccaatcccatctccccagaccttaggccaccctctagtaagtataggcttgggaggctggggtggcgggggatgggggggatagcaatacagaaaaaacaaatcctgacgcacgcaaccccagcggtcgctctcactttgctgtgtgaaaaacccaaaggaatgattgcgagtcccccgcaaggggggttggtcttccttgctgacaagagtagaaagataaggtgcagaaggcagtgattgagaggaaaggagaacgagggagaaagagtcatttatcatgttttctctaatttccagaggaccagtttattggctctgtgtacccatctctacctgtgtgtgtatacgtattaggtacactcgctgctgtggatgcttggggaatcttagggatattgccaatctggggtggtggtgtataaagatacgttggtgcccctcctcctaccagggtgaaaagtggtttctgacttttgaaaccagattttgaaactgcacaaggcctttccaaggaaaaaggagtattccattttctctgctataaccatttgagatgaatagtttgtgatggggtctttattccaactgatgttcccaaataaccatctgtattcgtctttcctaggagtatattaaagcaccttttggtttatgttaattgtgatgcatttagtattaataaagaggtatttaaaaatgttcttgggacttttttcgttatgtttctgcttaggaaataatttgggcctggtcttctgataatcaaggtacagctaaagtaatctgtgctaataatatcagcatgggatggatgcttaatttttgtttaatgacaaagcaagcaagaaaagtaggctaaaaattctcagtgcagggccagtatagttttataatgatacgtaagaaccaaactgagaagagattaaaataagtgatcaatagacattttgatcttcaaatatatagtaggtgggttgatcaagaataaatcttcaggaaatatttcttaccttcaaataatataagaaaaaaaggttcatgtaagtttgctgtcaaaattctaagatcagatcctagaaaacatttaatattaactactcttatctaccaggattcagcatgtaggattggacattttgaaacttagtttcatactgttatctgaagacagggaaaaatttaaaatgtgataactgattttcagctaaatccaataaccaaagccaagatatcctaggcacagttaaagctaatgtaagtatttgtgagtctcctgctgcttacttaatgagaaccctttgttactctattttgtagattgatcccagagttttttgcgttgttacttcaagagattatatgaaagctaatgtttaactttttgttgtttcaaatttggaaataaaattttaaagtgatattacagttagaatgtgatatgctttagaaaatgaaaacaatgatttctttgcttaagtatctggaatatatagttcatcaaggtttgcaaatccttcttttagattgcaagctgtatgaagtggggaccctgattccagcacccagctcatgtttggcacacagcgggcttgaatatacattatgaaataatctacattatggaaaaatactgaatatgcagtgtggaaaaaatgaatccatcaatagctgcataacacagtgtattaaaataaaatgttttattcttcatacattcaaaatacgttgattgaattcctcttacagagacaaactcggaagtgttgtacaatatgtactttacaattcctttttaaatgaaggagactctaagtctatggtattactaatagaatacaaaatgtctgtgtcccttatatttttaaaagtagaaataaactattataaaccaacactaacaaaagtacaaggtgatatccccctccatcaccttttatgagcgtcaaggaggttagagatcttcaggaaactagtaaatatagagatctgatcagtatacaagtttgatggtgcttgtgtgaattaactttaaggaagtttggaaaaaggaaaatgttcaccattcttaaatggcctttcagtttcttttaggttaaactattttaagaagtaaaaaggaatacttattctgaggtacaagtgggctcattcagtgttttttttgagcacctgtatactcaaggtggaccaggcgtctgtgagttgtgcctctgcacaacccatagaagataacacagaagatagtcgcttgccctgagggcaatagagaattgggagcttgaagaacagcataaagggatgtgaggctgcaagatcggctttgggaggactggagaaaaagacagtaaggtcagcaggtcagggagactggattattgaagaattgatgacaaaagacagtaggtcagcaggtcagggagactggattattgaagaattgatgacaaaagacagtaggtcagcaggtcagggagactggattattgaagaattgatgacaaaagacaggaaatgtacagtttgttgacatttacaaattccaaaatagctggtatagatatctgtcttcactaggacccctgcttttgaaaaagggccaattgtctttactattttcaccttttaagtaccttattttttggtttgaaataacctttctgattcagctttaggaaataatattgaacttaagaaatgtgtttacttgactgaaattttgaggtgaaattgctcacttttgttttattttccagcaagagaggtgtcagatttgttgattagttttcttaatctagattcttttcctgaacattaaaaaaacagtggatttctaaggatttagttgtcgtaacagaagaactccaagaaaatacaacaacatacccacaaaaagccctttcttgtggtagaataagcaagctagaggtttactttgttagactagcagtttttggacagagatgtttgttgatacaattagctctcttcctgagcagaaagaagtgatctttatacatgcttggtacaggacatggggtgtagttgaggttatctcctgaaaatgactttctttgcaagatgttcaacttttgaattcatcaaaaggcaaagcaaattccattttgaattggtcattgaggaatagccaaacctattctgtgatgacatcttaggaatcagcttgattgttgaccagctgaatgttgggtctcagtcatcattttgtatcacttctgaggtctgcaaaaatctattgaaagagagttgcgagtagcagccaatttcaataagcagaatcacaaatggtcctgtcattggtctcatcttttcagacattgttaagtctggaccccagatgggtttcctctacactgggagttagtgtttgtggcccatttggaactgggatgaagaatgggcttagactaggctaggggctgattctaagtgctcaaatatgtccccattagatatcatacctgctaggcatgatcatttttcccgtttttctttccttttacttagattttatacttttttcttatttccatgcttaaggactcacgtattcaaacccaaacatatgccttcctaggcatgtatatccatcatcgaaatacagtactcataaaagaaacctttattaacttatgtctaagtaatggattctgtgttcccagaccactcgacccggagttaaatatgagttaagattaatttgcttaaaacactatttcttttacacgtagttcaagatagcttttgggaagtaaatctgatttatagctaaaacgctatctcaaaaacattctttagagcaggatttttctttctcaaaggctggaatgattattttggacgtattcctctctgaatctgttaaaatataaagtgtataaatgccagtatgaatttgccaaatattgtgatggaacatttaatgctggcaaagtttccacacaacttgaaaaaaataagtggggatttttattatttgtatggcgtctttttatagcagattagtatgtgttagtggcaaatggttacaactaagtaacaacttaaaattcgtgaagatagatgttagatcctagagaagaatctagacctaccacacatggtcaagagttatttttagacctgaatgagtcaacacagcttttgccagaagtgatgttcttgattgacttgtaattggttaatggaagagaaggcaagttgggcttgcccctacatgatagcctttgctcagacaaaagaggcagctttctgtgacaactgatttcagaggtggcagacgactcatttgctagtaactcccttaccgtcttaccacggggcgaaatcctatttctaaatattattaagaaatacaaaatagctcttgtaacgggtgacacattaacccagcttttctcaaaatatattccatagaacatatattcagcatggtttgataggcattatgtaaacaaagataaacaggtttgtatattgaaagacctaacagagctcttaataggctaatgtatgtttcaaatctccaagttagattcgtactgtataagatttcccaggcttttaccatgggatttcctcctctcccgctggctggtggctcacacctggttgaggcaggaggagtgcttaaggctaggagtttgagatctgcctaggcaacatcatgagatcctgtctctacaaaaaaataaaattagctgggcatggtagcatttgcctgtagtcccagctacttggggggcttaggagggcgcttgagcccaggaatttgaggctacagtgagccatgattgtaccactgcactccagcctgggcgacagagcgagaccctatctcagaaacaaaataacaacaacaacaataaaaaagggagcttatcttggaagtagtgttacacttccattagcccattatcattctttatcatagtattaaagattcatttgtcacatgagactggatgtagaacaaagaaaaaaatgattcagttggcaattctccagcagagggcctcatacagggagctcttcaggggtagggaacatatgttttccattttttccctccataaacagctagtgtagtggtttatgtagagtaggcttttaagttttgcttagaatcagagcatgattctgaggcaatgaggcagaggagaaataattttgtttgtttgcttttttctctctcttacagagctgaaaaggacacataattttgatgaaaatgattaaagttagacaaatgcaccacaattcttcttttattgttaaatagcttcatgctttttacttttgttcacctcttttccttgtgtatgacaagggaatacgttaagaacacagaactcacaggatcgctgtgaggccaaagtagtgtagtatatagaaacacatttaatgaagttgcttacatctggttattaaaaagaaatgctaatttgtaaatattctttttttactttcagttggtctggaaactgtgctccatggcctttacactcatttagagtaggcactcttggctgcatcgtcacgtgagatctgcctccaccaatcctgccaaatgctttcctcttaggatgctgttgcacaggcttagttgatagccctgaaggactttttccctcttcttactgttttatttttgttcacaaatgtttgcttttttttttttttttttgagatggggtcttgctgtgtcacccaggctggagtgaagtggcacgatcatggctcattgcagccttgaactctagggctcaaggtgtctccctcctcagcctcttgaatagctggactacagatgtgagccaccacaccctgcctgtttgccttttatcaattttaaaatgtgggacattcttgcttttcttcagtttgacatgatgatgaacaataatcatcaagcaagcttgaatcaagcaagcgtcactcaataggacactcaataggaacaaagtgtgcatcagtatttgagaatgtctttatggttgtttctttaggtagccaaataaatctacggcaatatcaacattttcattggcaatctgacttattttcctaaagaatttatgatgaaactgctccagtcctgactaacttagtcttttacagtctcagcagaagcaaaagctctttgaaacctcctttctccccgctccctaactttcttacccctgctggggctctttctttatgcttccatatttctttggagagctgtaaagaattacagtgtggactttgatgtcaggggacttgagctcaaatcctgaggcttcttatttttagctgagtgtccctgggcaagtcaattaacttctctctatctcccaaattcatcacctatgaaatgacaataatgtgatgattaaatgaggtggtaaatataaagttcttaattcaatatgtggcaacaattattattacctcattatggtatttcccactgttggtctacagataaatctatagacaaaatacaatcccggacaacaagaagctcctatagctcctgtagcttcttgtgctctaggattgtattttgtttatatatattttttaatcctgaatgtctagtattatgcttgggacatagtggccactcagtgaatatgtttgaataaatgaaatttctcaaataggcaaaaatgcatatcataaaacaaagccatgttggtcgatgttgacatcatgcatattagcatgccagtagtgtgataacaagaaaggatagagatggtacttttcttttgcatatgcttattttttgtgtgcactgaatccagttttgcataatggagaaatataccaatgtgaattacatgtcttttcaagtttcagtgctgaacttgctgtgtttgttgtctcatataactggactagtaaggggctgtcttccttttggaagagaagagtcttcagacatcttagaaagttaagctgctttttaagtgttaaataaacattttaaagataattggtaagcatttatttagtaaaattttgacctttaaaaactctgcatgagacctgagtgttgaaaactaagaactgtgtgcttgtttttaacacagaagatatgtatctccaggttttcattttcctttttctcatgaaatggtattcaaatcgtgcactttgaaatgccacagaggaggaggtttatccgagctacgtgatgggtcaaatgaacttaaatttgaaacatgtttaaatttgcccttttgtttccttctcattaattactggaattgccgtgagtccgttgctctgtgaacgtttctctttctttgaacattcaggatatggtgttttgtaagtgatctaacagccagctttttctaataaaacatggcctaagagaagagcctgtttgtgttactagtgtcttttatgattttcaaatgatttacccacttctttaactgtccctagatgagtaatctttgaagggtagggtggcacatgtggagtattaaagagatggctgttaagcaaagataaatgaattacttatgataatacaccgtggaacaactttccactactggtaaatattttgttttctacagaaatctctttactatcaaatcattgctaaacatcatagttctataataatcccctcatttgaagacatttcatttcaaacaaaggctcattattttaaaatggatgcaaattgtttattttctaaataagcctaaatataacttaaattcaggttgctaaaaaacctcttcctggccgggcgtggtgtctcacacctgtaatcctagcactttgggaggccaaggcgggtggatcacgaggtcgggagttcaagaccagcctgaccaacatggtgaaaccccgtctctactaaaaatacaaaaattagccagccgtggtggcacatgcctgtaatcccagctactcaggaggctgaggcaggagaatcgcttgaacctgggaggcggaggttgtggtgagcgagatcgcaccactgcactccagcctgggcgcagagtgagactctgttaaaacaaaaagacctccatgttggtcaggcttgtcttgaacttctgacctcaggggatctgcccgcctcggtctcccaaagtgctgggattacaggcatgagccactgtgcccagccccccaaaatttcttgctgtggttatgcatgtcaaggtaattagaaggaacaataattatcgcatttatttgctcaatgtaggcaactcctcatatgttcagatcccaaagtgatgctgactgattggacctatccaatttctcttcctatacaggcgaaagtatttaaaatcataaaatctttccttcactatgcagctgctagtcactgccattgtgtaatgttttctccaagaaatagcttatttctagaactctgctcaaaatttgcacaaatcataacctttagccatgagttcagggtagtgaaacttcaatataaagatcagattgtcaccttcctgacccaggtcttgaataccctttttccttttctttttttagccaagtggtaatttctaaaacaacctttcttcatagctattataaaatattactgtgtggcattccacactgaaattaactttccaagatgaaaatataggccttttttaaatagaactaataatttcaatgtaatttagggactatttaatgaacacctactatgtccatgccattttactttacctgttggtcaccctttgaggcaatgccattgcgttccttgaaatgtgttatttcatttttttgctttggattcactctttcacacacgttgagcttatattgcatactgtataaccagtggatacattacttgattctgcgtaatgcctgctgcatatgatgcaggggttgaaggcttctctatcttattcttaatgtagcaaacacaaagacaatatctgtaggggaaactactgaaaatgttaaagacatttgcaaaatgaaatactttttgtcctttttgtgttttagttgcagtgctggacatctgattttaaagtacaacagtcctattcaaacattttcatttgtctcagatcttgacattgttcagcacagattttttttctttaagtttactagaggaaaccagtcttattcattgtgggaactcagtaaatgttaagccagattttcaacataaccagcatcaggggaattaatttaatgcacttttggaaactgcattaactccacaaaatcaacaagacctttatagagctcacacaaagagaaatcagctgctacatgtattttctcaagagtcaaattcagttttgagaaaatgctaaagccataaaaatatagagatagataaatctcatgtgaatactattacatagatatataatgaatgatactatgtagctaaatagactgaaatacgatctagacatataggttttatttagggttcgatgatggcaagataattgtgaatgcagaagtcgtctttgttttaaatttcaaattagtttaactatttatatttatagatttcactcctatctataaaatagcccttgtttttcttgtttttacttctacttatagctattgtcaggaattgagagttttttctttaatctgagaggttggttcttgtaaaaaatatgatttctcaagaatgtttttttcaggaagttttcttgggctattattgttctctgggtttttaaacagttgggctaactttgcctttgctttcaacagaatgttaaccggataccttctgagataggttacaacttcatggcttcaagtattggttgtgctggagttgtcttcctccctggagaacagtccttgagaactaatttcatagccaaacatgctaaaactgttagaaggttgaggtgacttaacggccatttataaattaagctctgtaaaattatttggcaaataaatattattaaatgccactagcataataaatgaacaagtccaaacatctagtgaaaattagaatttcaattagatttaggacatattttatattgtcagtgctttattttcacagttgccaaattataaagtgaaatgtcttctcatttcttaaggagtctttttcaaacttgtctgtcttctcctggaatcaagatagtgactgcacatttcagagtgaaccatctggtgcaggtctatagtaggttcttgatgtgttgttgaaagtggtgagtgagtgaacacttcagaatgaatgacacacatattagatctagttatacacactttgccaaaccattgacatgcatgcaagcacacctgcttctccagctgcaaggcaaatagttatatcaatccataattctgccttccttctagaatggtgaccttgaggagaggtggctatctttggcagattaattactgtatccacagtgcttggcatgtatattttgtcaccaactgggtcttatgttaatgttccaccctaggctggtcgtgtttcttgttctggtgttttctatattgagccctggttctgtgttgccttcagtctactcagtgagatgcaggtcctcattctgttcttgcatttaacattaatttctccatacaatgggtcagactcagtacttaaaatacggagacttcctcctctggaagaatttttgccgccatttcttgattccaaatgtatgagctgcagaaaactttagaggtgttgaacatgtgcaaaatacctgataaaaatgcttctatgtgttaatgcataggaagaattctataaactttcctcaaattagcctccttcaaattagaataacttttgggttgaatgttattaaatacttagaattgtctccccattgtccataatgggttagtttcagtattccactggtcagtgtagcattgggattagtagcatttttatattttcatatgtatgagtaacacacatttttactctacttgtcaaacccatttcaatttctaatttcctctccactagttaactatggagtgaacatgagaaacttcattagaagagtatattcattttactcatgtgtctaaattgttaggttgtatgttgaggacaactctaggtttctctccagcagtgggaaacatgaactatgtgatatttttaatatttttgagatccttttctattgtttcgagacttctgagtatgctttttaatatagattcagattactggatagatgagagtgagggcaccttatgctattttaacaaacattttcccttctcctttgagtctatttcagtttgcacaaactgtatcttaaaaaattacacctaattttcagggacatcaattcagtgtgaggtatttttcctgaatagttttaaaactgttattcttgttgctgttattattttaacattgaagctgaactcattggatactataattttgtgacctctgcatacagggaaagtgaatcaatgagaatgcatttcttaaatgaatgtacagaagagtgagacttgttaatattttttcaaaaattcattggacaaagctaatgcattcatgggctccataaagacagtagtacagggaaaacattcatacctctgccaacatttccaaaaggccaagaaggctctcattcatggaacatatttcattttccataatattctcagccctcagaccaaggtagtaagaatactttattatcaaaaaggccctactaacaacttgcagtgtaaatcatcctaattggacagatcactgagaaaaaacaaagacattcattcaccaggcatttggaaattccaggtagaaatgctttcaaaccaggccacatttggaaatcaaactctgagtagtagagggctgtaaacgaaatactgcatctttcatttctgtataggttattatatttgtagcgcgaatgtacttatttaacaataataactaagtgcctcctatatgagtgacattctgcagattgaagaggtatttcaaaagggaacaagaaacaacagtattttaccaagtactttgtatgaaggtattgactctaattcttcagggagttataagagagtggtctacagtggagggctttcagaaggaggtggagctttgagcaggacttaaaagatgcataaggtatggaaagtcaaagagaggactttattctaagctagtaaaaaatcattcacatttcttgtgtctttttcttcattgttctgaatgtgtgacatataagcattcaagatacattgtgccagataattatgttccattaacatgtgaaattttcatctacagaaaatttttgtttagagaatgcagttttgggggtgctgtgctttggggctgatttccctcatcaagacggtaaaactatttgggatggagcatatactaatagaaatataatatacttatatatatatagtatatgtatactagtatatatactaatatatagtgtatatataggtatataatatatatttatatatttacatataatagtatgtatctataatatatataatatatcatgtattgtaaatatatgatatatgtatatgtaatatgtaatatacatatatcatatatttacaatatatgtatatattatgcatacatattcggagctaatctttgggtattaatgagagtgggagtccagagcctagcatatatgtaatatgtaatatacatatatcatatatttacaatatatgatatattaaatatataatatatgtatatattatattaaatatatatttatatattataatggagcttatacttatatattatatttatattacattattccattactatagtataaatatactattataatgatattataaatataatgaaatgttatacatattttattatatttatatatcatatcataatggagcttatcgtagtataagctccatcccaaattgttttattgtcttggtgagggaaatcagcctcaaaggacaacaccccaaaactgcattctctaaaatgaacattttctctagatgaaaattttacatgttaatggaacataattatctggcacatatatagtctgttataatatatcacatatataaataatatatatataaatcaaacataatacagttatatagtatataattataagtagaattatattaagcatatactagattatattgtaattagcaacaattgattactaatgcttttcctccctaggtagctattattgagcactctctagtaagccatggaatataaagatgttatgtaattttgattttgttaggctaatttccagcagttaagtatagttcaattagtgttctgttttgactatgtaattcaaaaactatgttttgtaaaaactcacaaaaataagaacaagaacaaaaaaagcaatgtcatttgagttattgaaggagaattcagcccatagattttctccatgctttggcagctgttttagagcattcatccagctgcatttgtctaacacttgaataatgatcatgcagtttgtcagatgcttttgggagagaaattcactatgcagaaatatttagtatttaactaatttttccaattataggtttttgattagggtaaatttattttgaattactcctgatgttaaacccaatcttcattagtgttccatagaattgtgaaacattagaattatagttttttcctagctagaaggagcactctcattttatagatgattaagttgagcttcagagagacattaaacaacctgcccaaggttttgaagcccaggaggcttggaactcattttctgatacacagttggacactcttcttaaagtatttcccataacaatgtacacagttggagaaatgaacataactatttcttactggtcatggagggtcatgagctgtttatgtgaactgaagtctgtgagggcattactggaatgtaacttatcagttatgttttcaaatccttagagcagaacttcttgacctgtgtgctgtaaatggctatgggtgtgccggaggcggatagacagggcctagggtggcaaaaaaccaggaaagcattgaaataaatcactccagcacactgtaagtacctacagaaaatgttatttttcttggcagtagaatccactctctaagaagaaacaagcttttgttggaagactgctctgataaactttttggagggctgggccttcaggaaggctgaggacctaaagtggataaaaaggagagggtatgtagagagtcagagggtatgtagagagtcagagagagagaagagaaagacttaagggctggtggctcaagagaaactttggggaaacagaaataatggatggggacatcagcagatctacagtgctccataatgatttgtggagtaaattactttgggagatgggatgaagtgctttaattttgctttgagttagggactggtaaaatccaagattgcccaaggaaggactgttccatataagttacaatacagttatgaaaacttattagcaaagatcagatacctactataccacagtgcttctgtgaatagattcaagtaattttttgaatttaagcccggcatctcccacatgactgaccatttaggaatcctggtcctaagagaacatgaccattgggagtgggcctctgggaagggtgttgtggtgtgcaagggcaaccctcagttgtgtgcaccacgcagaatgaatcatgtgttgtgtcgctggaagttaagggtgaataatataaataactaaaaatgggtgaggtttcctgttaaaaaaacatactcgtgttgatctgttcatgtgtctacattacatttcaatgtgattcagtagggaggatttcttgggcccagtagttcgagaccagcttgggcaaaatagcaagattctgcccctattaaaattttttttttatgtgaaaaatgttacttgtgctgaaggggatcacatatttgttgagaatgttttccaaaccaacaatcatcacacaatttctcaaaggactttatttccaggtttgtgaaagttttatgaaacatattaaaatgttataagaatcattgataatatattgcatgtttaatgaacagcctttattaaaaagaagaaatatataaaggaactatatctggaatgaagagcctccttaaatgattggacagaaaatagtggtatgaattactgtaggaatttaagaatatatgatatacgtgtgaatgatgtttttttgttttgatttttgtcctgtgacaaactctaccgaaatgattagttgatgaattctgttggtaatttatagtcaggatattagcaagcaaagtattccaaagtcttctggctgatgtttatgtgaaagggtgtgttctcatatgagcaggaaatgggctaataaggcaatgaaaagactggagataatttcacggttaatttggggtaaaatttatttttattataatattatttgtggtgaaagtattaagtctgaattattcagacaattgctttaattctccatttgacatttgacctgtgcatagagctaacctttgggtattaatgagagtgggagtccagagcctagtcaagtaagagattaggaagcagagatggaaagaaagttctacctatgccaagggtcaatgcacagtactggtaatgatttgattcggcagttttattagcagccatttctttgacagactaataaaaatgacttacagattcttttccaagttatcttatataaatggattatgatgaaaaatgtgtgaaccacatttcatcttctttcttgccttctgttaaatatgtgttcagcttagaaattaaatagcacaggatagaacttgaaatcataaattctgtgcatgatatgtagttcaaagggattacatgataattcacatgtagagaattgtacaggatagttgggaaatgtttctcaaccctcagagaatgctcactaggcacatgcataacatgtagatgcccaaagcatttcagaaatagaattacaaaaaacccccaaaacacttgtcatgaaaggtttgtgaacctaatctcgcctgtatagactgggctaattctgatagtaagaggagttctcccttctcttaagtaaacaaaaactattggctttcatccaatcggttattctaagaccactgcaacttttttctctcacaaaaaggagttgccctaaagaagtttcatttgctttgatcttttttttcctccctcctctaaaggaaaaaaggtatgtgtgtgttgaaatctaaaatatggcaaagtttccatttaaaaatactttttagataaccagatttgctcttcgcacaatgaggtctttggtccctgggagatattttatatcatattcctgaatttgttcctggagtcatctttaacggggctagggaacttattgggtgctgtaagaactgttggtatgacccaccatgctctctctgtctctctctgtaactcctacaacttgactttgagatagatctaaagaagtgagctatcaaatgttggaaatatcaggtaagaagttaagataggctggtcatggtggctcacacctgtaatcccagcactttaggaggccaaggcaggcaggtcacttgagaccaggagttcaagaccaggagtttgagaccagcctggccaacatggtgaaaccacatctctactaaaatacaaaaattagcagggtgtggtggcatatgcctgtaatcccagctactctggaggctgaggcaggagaattgcttgaacctgggaggtggaggttgcagtgagatgagattgtgccactgcactccagcctgggcaacagagccagattctgtctcaaaaaaaaaaaaagataagggagattattaaaaacaataagatagacggaaatataatatttaaggttagagaagaaggctgagtgtggtggctcactcctgtaatcccagcactttgggaggctgaggcaggacaatcacttgagctggggagtttgagaccactcagactcacttgagaccagcctgagcaacatggcgaaaccctgtcgccacaaaaaaaaaaaaaaattacaaaatgttagccaggtgtggtggtatgctcctgtagtcccagctactcaggaggctgaggcgggaggatggcttgagcccaggaggttgaggctgcagtgagccatgatcacagcactgaactccagcctgggtgatagaatgagaccttgtctcaacaaataataaaaattaaaataaaaataagaaagtgaagccaactgaaaacaaaaagtattaaaacacagagaaagttagaaaataaagtttaaagatgaaatagaaaggccaaggaaaaatgtttaaatgttgtggagagaatatgaatgtactatatattattgctcacccttaaataatgcttggtatatgccaagtgatgtttaaaggcacgacttacccacatatcccttatgggtttggtactataattatccccattctataaattaggaaactgaggcccaaagagattaaatgatttatttaacatcacaggtttgtaagtggcaaaaccaagattagaatatacatgtatatatagctacattcttaaatacgcaattcggtatattagacacctatttattttgtcttcctgccttctgatattagctcctctcttcccttcttggggaaatgttccttcttaccatgtgacttgagtggaagatgttgccatgttcttagacactctctttccatgctttcaaagtaagcatcctttctaccatcttatcttgattatacaacgtatttccaaatattattttagattctctgcattttcatcagataaaacaggattatctcccttttataggacaaataatcatttccacttaaaaatggagctgtattaaaaacaagcttttggccaggcatagtggctcatgcttgaaatttcagcactttgggaggccaacgtgggaggattgcttgaggccagaagtttgagaccagtctgggtgacatagcaagaccgtgtctctaccagaaaaaaaaaaaagaaagaaaaattagccaggcattgtggtacatgcctatagtcctggctactccagaggctgaggtgggaggattgcttgagcccaggagttggaggctgcagtgggctatgattgcatcactgtacacagcttgagcgacagagcaagtcctcatttctaaaaaaaaaaaaaaaaaaaacaaaaccccactaaggttttaatgttatcttgtacattcatactaaataatttagaggctggtaacaaaaagaatattgttctggtctcaattaattaattattctaattaatacataaacttattttattaattgcttatttacatcagatataatattagtaaaagattgataagagcatgtaccagtgacaattttctgagacattaagatttttctttatgtttaggactattagcctacaactgctaatatatacacatatatacacacacatatacacatgcatacacatatacacatatatgtatataggtgtatgaatacatataggtacatatatacatataggtacatatatacaaatgtgcatgtgtatacatatgcatacacacacatttaaatggagtatgtttatctagaaatcaggaaagttagaaactgagagtaaataaacatttaaaaatggagaggcaagtggcttttcaagatagccctgattttaggtcaatggaaaaaatctaagcagttattttaactaaagtatctggtgatcatagtttggaagatctggaattttaaggtgggtggctcacttgacttgaaaatccaatattttttctgaagtaggtgttgccatggtgacagaacggcttagcaactgaagacagatttcattggctggctgtctgcagacttgcttgttgagtggcattaatatgttgcctcctgctgttttttttctgaggagaccatctggcattagctgtatttaaaggtacagttctgttaaacaaagaataccaggtgatatacactgaggtgttaaaaatatgttttgcaggcattagttggtttaatcaatcaatgactaagaagttccacttcaaatcacaacctattataaccaattaattcactattctaggctttgacagtaggcattaaagggttttattgtggtacttacttatattataaaaatttaattgcctaaatgtactatactaaatgatcatattaatcttgatgtgcctaaaaattaatctacttgataaactgttctctcacattatatgttcataaaccagagatgtagttttaaaataatgtttactgaggatgtttaatatatcagagcataaacagctgtcagtttttcttttacttttgagggtgataaaaataatggattttcaagtaagatgtattaagatgtcaaatgcatctattctactaattataactgttgattctaaacaataaatacctgttgtacatctgtgaaaagacataccctcttttttattttttgagaaagagtctctgtcacccaggctggagtgcagtggcacgatctcggctcactgcaacctccacctcccaagttcaagcgattctcctgccctggcctcctgcctcctgagtagctgggactacaggcacacgctaacacacccagctaatttttgtatttttagtagagatggggtttcaccatgttggccaggctggttttgaactcttgacctcaggtgatccacatgccttggcctcccaaagtgctgggattacaggtgtgagccaccgtgcctggccacatatcctcttttaaaggagttccctatatactagggaggataagacacatgcatatgttatgataagatagaaaatgacaagtaccttaagagtaatacaaagcgaagtttgagattgaagaatggaggacacatttaataaggatactcaccgagacttctgattggcttaatcttgaccagtgtagaggagagaagagaattctaggagaaacagaagcaatcatcagtgttataatcccagcctctctaagagtgggttccaagataatgttcagaggataataacagagcactttgtgcttagaccttactgtacatgtagaggaagcaaaatctttacaagtaggtctttggccatatcatgaatatccttaaatgctagactgaggatttagacttcatttgtttgggagttaacagaaatagatcacttgtgcattgctaatttaagaaaaagatattgtatgcttttgacatatttagggaggtgttgtggacccaccacctggagagagatatatggccagcagtttgaaatgaaattcatttcatagcagaatttgaggacagaggaaaagatttaggaatcacttgcatgactggtgagggtgaaaatggtgattatggatgagatgactgagggagggagaataggcaaaggagagaaagtgtatcaggcagaaacttagaacacaccaacatttttaagattaaatgagcaagaagagagcagagagatgtagtcaaagaaagaggcagtaggtatgattcagagctgtagtctcaagataggactgggggcatatgacgatgcccagtgctgtggaagttaatgaagcagaggatacagtaaaggtcactcactcccagcactggttggaagtcgctggggacatttggggaagtagtttcagtagagtcaagaggaagaagtcaaacaaatggataaggagtaagtgaagggcagtttcacctctaacactcaccttttctctcacccattcatcaaaccaagcctttcttttttaaaggctagtcaagtgaagcagtgggagtaaagaaggaataaactaagttttttgaaagattacatactattttcaacacacattcattcctgaactcatatcattgtggcagtcactgcattactctcttcatatggttctcacaaagggccactactgacttcttaatagggtgaccttatgtctttgtttccaacatattcagtgttcctggggtatttgttaatagagccctctttcaccctcaaaactgtcctagtttggatgataaattatgagttatcccagctcttcatcaccagttctaatgagccgttttcaatctttatcttacttgaccttatttgattttttttttctttacacagctgactactcccctttagtgtgacttgaaaccccacttctttgatttgtactggataactcttctggttctcctgacaccttctcagtcttttctgcggccttctcttctgtacaccctgtaagtggtgccattgcttagagttctgttcttggtttcttctcttcgttacacgccttttccatagacaggctcactcataacaacaggtgcagttaactagaagccggtgaaggaaaaatataacccttgtttctccccagtgagctttggatttgcacatccacctgcctagtacacttttactataagtgatagtcaacatgtggataagaacttgagcattggagtgagacataaggctgccaggtctgccgtttaatagcttaatggccttaaagaagaaagtctttatgtggctcagcttccactctgtaaaatcatgaaacctgtcacgtaagatttatgtgcgggtaaaatgaaatagcacatgtaatgtgctgagcacagttaatggcacacaacatacacttaatgaataatagaaattattattatttcccaaactgtattctcctctcattatttcttgtcttgtggaacatctgccttcctgagtggaggagggtttatgtgtgggggaacatgaaatacttttggaaagattgagtgatgccacaatatatgaggccctggaagctggacagaggaatttagacacaatggtgggttacaggggcttctgcagtcttgtgagcatagaatgattctgtggaaagtggtgttgtaataaaattagttattttaatattaagccagatgtgtttaaagtaggggtcgggaggctgggcaaaaggctgatagagtaatactggcataatttgatgaggacctggaaaggtgtggtgacaatggaatgaagaggaaaggataattagggaaaggtgataaatggacagattattttattttttatatcagttctttcttcagaaggttgtgagatatttccatcaaaaatatatatttaataaaaatgtaataaagcttctttatggatcaagaagccactactgttttgtacctatttatttgtgaaagagaaggaaaatgtgctaataataatagtggccaacattttcagcctgattctctcagagtttgcttagatgatcatttacctcttcagatctttgaaagaatttcataaatgactggtcccatttgtaacctttattattctcatagttacacagaattgttgagatgcatacttcagtattaaaggatgttggtgtttctagtgattctggccggttacatgacaccatgtgatacagtttggatatctgtccctgaccaaatctcatgctgaaatgtaatgcccagtgttggagacggagcctgttgggaggtgtttggatcacaggggcagattcttcttgaatgacttgacactatctcctggtgagttctcgcgagatctgattaagtgtatggtacctcccccaccttactccctttctctccatgtgacgtgcatgctcctgcttctaccatgagtgagagctccctgagccctccccagaagccgtgtagacgcaagcaccatgcttgtacagcctgcagaaccgtgagccaattaaacttcttttctttataaattactcagtctccggtatttctttatagtaattcaagaatggcctaatgcaccatgtaaattaaaatatacacttgcaaatatgtcacaaaaagacttactctcccccgaagaggagtcaatacaaaaacctgaagaatgtggcaagtggaaaaacagaaatgagaaaactacctttgtttataaaaaatatttttaagatattttttctttggaaatagattgttcttttgaaatctggaatgtaaaatgccagactcttcttctgtttttctggatttgaaacaatcgaacactgggaaatatctgatcctgaactaaaatgcaggcacaccaaatttgaactcagattgaaaaagttaacactgggaatcaactagaaattaacggtgattatgaagaatattttgattgctatttgattctttcatagctctgtaaaacttatgtaagcaagctattaaaaaacaaaagctgaaggcgactgttttatgatgtgtgtatcataaaggaaaccatcaccacctgtcattgaaaccaggaaaggctcatgtcaactaaatgtgaaaagaaaacagtgtaagaaattaaaaaaaaaatcatattcttgaggccatgaaacacatgttccagaaaacagtttattagaattgcattaagtaaaaattaatgtctgcacactgatggggaagcagtgtggagtggtatggaaaatgttagagcagtctatttttgtaaaatctggaagttggaataaataatcattggggccccagctctaaaatcctactaccactattaatgtgacaatgatttaatttttgaatgaaatttaaattgtaacatatgccatggggaatgtgttttctggcttgctaacaacatgaaaagaggatgttgaaagcctcttgtaattcatgtttttaatttcattctttttttttttttttttacagagtttggtttttattgttatgtgtttgtctgggtgcagaattgccctcaccacccctggccaccctggcctcctgacaggaacaggcaaagagatggctccagatggctcttggctgccactctaggcctcagggcttatacaatgagcacagtgggttccaccttccaatagcgcaaactctaattcacagtcagatttcaccaggagggggagatgatcttggctgaaggcactttaatcagggagcaaacccaatgccggagtttgtcttccttctcgttactctgataaatctagatgccactctgttggagaaccagcactgccggcagctggggttagtgcactgactgagtgaggcatgaggcctgctcactgatgaaacttcttgttagggctgttagtgtggtcagctagcagctggcttggggtgaactcttttccataggcagcctcatacttcttgagccggtccactatcttctgggcttcatacagatccacaaagcagaaaggccctccaagacaaggtgggaagctgagcccgaagacggctccaatgtctccctctgcaggtgtggccaagatcccctcttgcgggcacgtgactgcctcattcacaaatcttgtcagcaggcggaactggatgtcttcatctgaggagacttcagacttaggaggcatcttcagacttgctaaaataccgttcatgtcagaattcaaattcttattcttcacactctcctgatagatggaaaagcccttcccagactggcgacctaggaagcccttggacaccatctatgtcagtagttctgggtttccacctccaaactgctccccaaaggctttgcccagatctttggccacatgtttcgctacatccacgccaacttcatccaccagtgtggcggcacccacaggaaggccaaggcttgtggtcagggaatccagcttctttgggtcaactccttcctggaggattcagatgacttcagacatcatgggtgcaagacacctggtagtatagaagccaggtccatccttaaccacaatgatgaccttcccctgcttgagaccgattgctacagttgaagcactggtgtctttggaagtcttcttggttgtgatcatctccagcagctgcatcttgtctgcgggagagaagtagtgcctgccaatcaccttctcaggtcttttgctgacagcagcgatttcactgactgggagaggagatgtgttactagcaaagacgtagtgatctggaatcactgcttctacttcctttagcactctgtgcttaaaactaaggaagttgtgatggatggacagcatccatcaccatgtctgtctttcaaaaccttggtaatcaagcttcccagtcaagttgctgaagatggaatccctttcaaatgacgttagagctttcttctttactttgtcattcaatcctttgaacacttgttgctgtcctcagcctaacccagtgagtgtggcatctttaagtatagtctttcgccccttatccacggagacttgggcaatgcctgctcccatcatccctgcaccaggaatagccagatgcttaacatccttctgtggagctccagatgtattcttcttgcacaggacctgaccatggtagagtcccatcaaggcctttgattctttggtcattgcaagctctccgaatttctgagattcagagagataaccagcatcgctcccttgctcaattccagtctttaccacatcaattattttcagaggtgtgggataaagggaaagccctttagtccgctttcacactttttcttccacttttttgtaaatctgttgcctgacaaatggaatagtcatggcatacgctgttaatttttccactaatcccttgtctctctttggagagatcttcttatcagctagtcctttgggaaagtaattgcaacttcttctaggtatttgattgtccattcctctggaagttttagtcctggtcgcagagattccaccaattggtcaaccagtcccattttctttgccctgtctgcacggatgtttctgccagtcagcatcatgtcaaaagcagcaggcacacccaccattttgggcagcctttgtgtgcctcctgctcctggtaagatccccagcaagacttcaggagcaccgaatactgtttttctgtcttttgttgctattttatattggcataaaatggcaggatccactgatggcagtcacaacaggctttatggacttttcaagtttctcaaatgttctctgtgcttcttgtggtatctgtgttacttcttgaggggtcttgcaagtggctaaaatgttgatatcagcacctacaataaagcagcctggctttggtgagataaggatggcacttctgatttgatcactagcccagatttcattcataacttccgtgaactctgaatgcagctgtttgtttattcagcgtatttatctttgaatggggagagttaatttaaataactatcacatcccctttgactccatagttaatatgggttctggtcagcaaagcaaaggaccctgtaaaattgcggcgtatataaccttgggagcggaggatcctgaaggcagagaagtggctgaggctgccaatcgcccggtagaccaccatgttgagctgaagagaacagcagtggagagcgcttctctttaatttcattcttatcttttgtattagctttttaaatgtattataaccaaggagaatacaaatgaactgacttcacagtttttccctcagatttcagaattgtactgttcttaagctccctcctaaaacttgtctcttttattaaatattttaatatttaatggctgaaaatctttgtggtcattattactttgttgcagctttattgagatagaattcacataccaaatagttcacacaattaaaagtaaaattcaatggtttatagtagatccacagtgttgtgcagccatcaccacaattttagaacatttatatcatcacctcaaaaagaaccccatacccattagcagttattcctcattttcccaattcctcccaatcctgctccaacaactctaggccaccagactaatcgactttttgtctctgtagatttgcttattctagacatttcatataaatcaaattgtgtgatatgtggtcttttgtggccgactcctttaacttagcataatgttttcaaggttcacccatgttgtagcatgtattagtactccattatgtggatttaccatattttgtttttccattcatcagttgatagacatctgggttgtttcaattttttgtctatcatgaacaaggctgctgctatggcacttatgtgcaagttttttttgtggatatgtgtgtttatttcttttaggtatgaacctagcagtggaattgctgggtcatattgcagttctttgtttaacattttcaggaactgccagactgttttccaaaatgactacaccatttacattcccatcggcagtgtacaaaggttccaatttctctatatcctcgccaacttgttttttgctgtagttttgattagagccattctactgggtgtgaagtgatattttgatgttgttttgatttgcatttccttgatggctaatgacattaagcatcttttcatgtgcttattgaccatatgtatatcttctttggagaaacttccattctttttttttttttgagatggggtccggctatgttgcccaggctggtttcaaattcctgggctcaagggattctcccacttcagcctcccaaataactcaagtggattgctgggattacaagcatcatgccgggcttcaattttttctttttttttttttgagatggagtctcactctgttgcccaggctggcgtgcagtggtgtgatcttggctcactgcaacctccacctccgaggttcaagcaattctcctgcctcagcctccagagtagctgggattacaggcatccaccaccacacctggctaattttttatttttttattttttagtagagacggggttttgccatgttggccaggctggtcttgaactcctgacctcaggtgatctgcctgcctcggcctcccaaaatgttgggattataggcatgagccaccgcgcccgacccaactttttttttttttttaaagagacggagttccgctgtgtctcaaactcctgggctctggggatcctctcacctcagcctcccaattagctgagacaacaggcatgtggcactgcacctggggctgtctattcattttaaaatgggcaatttatcttattattgttgagttgtaagagctccctacgtatcctggaaccaagccccttatcagatatacaatttgcaaaaatcttctcccattctgtgtgttgtctccttactttcttgatagtgtcctttcaagtacagaagttttacattttgatgtggtccaatttatgtattttttcttgtgtttcttgtcctctttgcgtcatatctaaaaaaccattgcgtaatctaaggtcacaaagatttacacctacgttttcttctaagagtgttatagctttaactctcgcatttaaatcttgatccattttgagttaacttttttatcggataagtagagggtccactttccttcttttgcagatggatatcccattgtcccagcacaacttattgaaaagactgttattaaaaaaaattccatccctcagcatattttcacaagtcatgaatttcataagtgagtagaggcaactcaaagatagcaaacaacttgattaatatcattggctaataaagggcaccgtaggaatttaaaagccttagattatctgcttccaaaacccatacttattccaatataccagtggttctcaattttgagcctgcgtcagaatcacctggagggcttgttaaaacactggttgctggggtcccacccccagagtttgattcagtaggtctgaggtagggcctgaaattttgcttttctgtcaagttcccagggattctgatgccactggttcagaggccacactttgagagccattgtaatgcactgcgatggttcccctgtgtatcctgatgctcgaagagccttcagttggggtggagggagacacagagagaataatataaagacaatagtagtgacaaagggctaagtgtgcatggaggaagaaaacagtaattctgattagaatattgaaaaaagtttctgcaggacacattatggaatggattggtttatggataatctcaagcatttacctccacctggtgaaatcagacagcaactgtctcttcttacatttatttggccacaagtatgcttagagcagctaagctcttgagcacataagcaagtatatggcggagtgggtggtggttccggaatggttgacgtgggaaatgcagagagagcacttaagtgtcagattatgacactgaatacgggaaagtgatgggagtgaggctggttaaaatttttcacccacgcagtctccctgtgttgcccaggctggagtgcaatggtgtgatctcggctcactgcaacctctgcctccagggttcaagtgattcttgtgtctcagcctccccaatagctaggattacaggtgtgtgctaccatgcctggctaatctttgtatttttagtagagacagggtttcgccatgttggcctagctggtctcgaactcctggcctcaagtgatccgcccgcctcagactcccgaagtgctgggattataggctgagccgctgcacccattctccactcatgcttatatcccacagtcaggttcagtgaatcgatgccacttgtgtgagagactaaaataaataatggatttaatttgatgactttttttttgactctgaatctttcagtgtacaaatgaaatcttgataaagaaaatatcaataatagcagtatatcaatgctttcctaagaaactgtgaaatactgtggtgatcttatcctggaacaaactaggatgagccagtctttattagattattttgtactatatttatacttactttgtgatcattcaggaggacccttcatattgttgaatttggtaaaatttccttgcaggcctaggttaatggggtttacaggctctcaggattgtgtgccagttgtcctctttctaaggtagttttattcataaaccacacaggtttttttcaaaaacacaaaaaacacagacaaacaaacaaaaaaaacagaggccaggtgcagtggctcatgcctgtaatcccagcactttgggaggccgaggtgggtggatcacctgaggtcaggagttcgagaccagcctggccaacatggtgaaacccctttctttactaaaaatacaaaaattagctgggtgtggtggtgggcgcctgtagtcccagctacttgggaggctgaggcaggagaatcgattgaacctgggaggcagagtttgcagtgagccaagattaggccactgccctgtaacctgacagagggatactctgtaaaaaaaaaaaaaaaaaaatcagagattttaacaggtcaatcttgaactatgtgaacaacttcaatttataaaagagtaaaaaaatcgttgaattacagaactatgaactgactcctttttgatgcagcctgattattaatagtcttgttcacagctgtgcccaaagtagaacatcacaccggcactgggtaagtaaacaaaacaggccagtaactctgccaaagacctagctattaatggcaatttatttttattacatatttggaatcttgtcatcccagaaggtgctgaagtagaaatttagtaatacttgatttaagaggcagaagtcctgtaagtttgcagctattaaaaaatggaaagaaaagaaaggttacaaaggggaggggaccatatctgtgtttacatttgttcctttcctcaaatggaaggtagaataatgtattagaagatattttaaatattaatatctaactgaaacctgatattagagaatgagaaaattttgctgaaaattaattttattttcttttaatttatggtgttactataccttttagatttaggaaggcagaaagactgtgtgtgtgtgtgtgtgtgtttgtgtgtgtgcacttgcactttggggttccctttctatggatgtttcaggatctgaggataaaggatcacagtctagcagaaagctgggtttcaggggacgtcaaaggtaatttcatgactatattagtagataaatcgaagaccagagagcatgctgaatggaggacatttacatagtctttccaatgctaaaggaaatagggaagtgattatttcaaaattacctagaggatcttgagcatagtatgacttaagataaaaatctcattgtttctgagagttggcctctttctcctctccagatgaaatattttttcctttttttctcctccgtggaaagaaattattaattaaaacaaaaagacattgttggaaagggaggttttttagtcgcctaagagaggtgctattagtacttgtttatttaaaaattgacttttggtcaaactaaactatacaactttttctttttcaatccttcttccctccatccctcttcctttctttcttcctcctactttttgcccttcctccttccctgatcccttgttttatttagtttatgtcattccacagagctcacagttaccacctggtaggtacccttgacattctacacagttggtaaatcagtgtcataccagttgctaaataattggccaggaatagcctttatcaatgaatgcttcttctccttttcactctccattgaataaagatggaaaccagctttgcctcctttttgagtatggcctgttgatttctaatttgtcatagctcacatggaaaccttgtgatgcgcttgagggggttttctcatggagacctcaatacctgtggaatgtagggcacatggcaaacagatctggtttatctgatcaagtgattaatgcaataaaaaattataaaaattcaaagtgaaaagtgtgctcttgttactgtgtgtggtaagtagtttagtggattctggttctacccattgaagcactatacctgtggctggtgatggaggcgaaaatcttttactggaaggaatgggaagaagggtagtgggggccagagagtctctacgttcctccaggaggaggaaaccatctctttaaaatgacagtgctttccttccacgaaagaaccataatttttctaatcattggtaactattttggtctttcaaatgtgtcaacaacttgtacactggaacagcctctgtctacaggcagagcaggattcagtgatttttagaaggcatttgggccccagccagcctgaaagttggggtttacaactgtgttaaacagaagagattttgtttgaaagggtaaagcacatcatggaaaagttgaggaagaaacaaaagagaaagttgcaaacttacctttatgtttataagaacagatatgttcttgagagattgtggatttttaaaaatatgatttttttggtggtgggaaaattgtagacattaaatatcttttttaagttatgctgacaccttacaattacgtaatcctttataattttcaaataaatactaacattagtaagcaagtactacataccaggaaaaattctagttgctggaaataagacaataaagaaaacagggattattttattaagtcctctcaataaagcctatgaatcagttactattattatctcgattttacagattaggaaactgaggcacagaggagttgtgttacttgctcagagttttcatagtcaggaactggggagtaaggtttgaaatccagactccaattccagatcctgtgctcttggcaccactcagtcctgtctcaggcaggcagcattgccactgtgcactttatcctaaaaacaaccctctgagggaggtgagaaaggtatgtttcttcacatttaaaaaatatgaacatgtttaaaaagtaaacagtgatctatttacatctgtatgctgggaagaagttctagagtcatcatcttcacctcttcaatgcttcagtcattggcttcccagcctctaagcagccatgtattccatttctttttgcaccgttataaccagtgattttctcgaatccaaaatctgtaacgttcctctgcttaattccctgcaggtgctcactgttacacctagaatcaaacccagacttcttcgcatgcgcttgagattcttctggctgggtccctgcacacctctgcagtgtcacacttgcactctctgagccctagctctacagggcttttctcattttaacaaaacttgctctttcttgtctctcacatgttgtatatgccagttccctggcctcaacattcttttcttcccctcttccctcttactctacccttcttaagtggctattcttgtcccttcttttcatctctaccttgatgccatgtctctatagtgtgttgtaattgcatgtccaacgccacttttcctgagtccacgggcctggaaaccatgtgatgctgggtccaaagtgaagaattgggggatagagaacgggaatcttgttcacacagttctctccagtacccagcatggtgacccagaacatgtacatgtaaggcatttgtacatgtaattaattagcaggcatgttttgaacaccagcttcattaggagtgatgccatatttgaggcagaaacatagtatgatggagaattcaagaggctttggactcatagctcttagctgaattctggctttatcagtactacctttgaggctttaagcaagttacttaacttttctgagcttactttctcaaataaaaagcaaggataactaaaatgctttggaaactttcctgtgagaaattgatgtgtaaatagataattaagggacatgctaggagttgtgttacaggcatgaacaggaacacagaggaggggacaaccaacacagctcaagaggtcacagaagatgtcatgtaagccttttctttttctcagagcctctggcattgacgtgcttggagatacctgaaaattgggcagctgtttatctttctggaaatgtttagtcaaaggtcttctgagcatggagatacaggaagtgatcttccattcatgcatatttatgattctattctaagttaaattattaatagcatttgacgagtattctattttgatatggacaagaaaaatcgttcactttgaaacatttattgagctcgcttatagcacactgggaaaaaaagtcttggttttgttatttttctcaaaagatttgtatgtattttcctgcaataataaaccaaaaataaaatccatgaaggatctagaacttttaaggctatgtaattcatattttaagcctttactgtttcataaattatttaaataatttgaggaattactattgaagagagtcttaatctgtcaaattgatcagattggatttatcttgaaaacagttctgcatctttggataaaaatctattttattccaaagaaagctttttttatggcaaataaaagcaaaggtatacatttttaataatcttatgataaataggatgatctgctttaaagaagagtaagtttatagagtcagagtatacttgtacacacctcaaagtcaaacgtttgaaaaatgaagtttgttatgattctaagtgtagtttcgaatgtaagaaaaagttaaaagtgtgatgcagtcaggaagcttggaatattctcctgcataaattatatgtgttaacagccttagcagtattctcttgtaggccacttggctccatcttaaagtagtttgatgaatattgactggtctgcaaaatttgacttaagaaatgttgagccaaagtatcctggataacgtagatatagagataaagtaatatatatatatacacacacacacacatacacacacacacatatttacatatatacacatatgtacttatttacagtgtatataaaaaataatttagaagaatgcatccagaaaccaaattgagcttgaaaagtaccacctcacatgaccgcagggacagctggttattgtcttaggatatatttgcattttgaagtgaactttagtgacattacaaaatgccagattggaaaaacagccattatttaaaaaaaaaaacaaaatataattagcaccagatgaatgagttgtctcataatcacctcattattacaaattaattccaaatgaatatgtttgaacagggcattggttttgaatctttaatttatctcctccttagccttgctgctgacaaatcataaatagatataattaatgaaaatgttaatagtgccggtctccagaatatctctagatcactgaccttctgattggtggaaaaacctttggagaatgatctttacaggattccatggcagtgagttaatctatttttctctacatgggggcagcagacgaggtgagtttcttcctctgtcatttgtaggatctactgttattctctggagagctattgtgtcagaacggatttggattattttttaaaactactgctacctagagggtaattttattaaattcctttatcatttggattaaatacagcaaaatgaaaccagctcctcctgctcagaggagctgtcaccacaatctttaatattttcttagcattatttcctttaaagtatgctttgggacaattaataatgactaatacttaaattttcactatgagtaaaagctttttggtaaacatttattatatattccatgtcttccttttattctctaattatttcacctattcacctaattattttgtagctcaagtgtataatttaaatgatgtagaaatatagagatcaaaattaatacaaatacatttatatagtgatgtgttacatgttatatttgtcacaaatatagcatatatttgtttgtctagtacatatatagtatatacagtacatatatattacatacatacatatagtacatatttgtgtagtacacaggtatagtgcatatatatatatatttgtcacatatatagaagtcctgtgtcttccttttaggtaacatgggagaatgtaagtttttgttttcggtccaagaatgacacagatttttttgtttgtttagttagttttctttaggatctagatcccccagaggtaaacactaaatataaaaccgggaattagaagctggccttgggttctgcagttctaggcatggcgttaacgtttttcttaaaacttaaggcccagactacacaaggaatcttcccgcctgcactcccctgccagctcagctacttccctactcctgcgccaactcaaccgtaacagtagctgagacgaaagcattgctctgaagtaaggtgtagggaagctttctggcttccttaataaagttacacacgatcttctaagcttggcgatggagggagaaggcacatgggagggtcttcaccgatcctctggccctgactctgcctacccttcattcattcacctgcccctctgggggctctgggcggtgaccactgccactattgggctagctagtggtgggggcactgctccccttaatgctctggcccctaggggagacacaaaatattgttttaaatttccagtagtgtagctcatggcaggctgaggcacttacacaaaagggtgctggaggctttagggtaacacagtagaaatcatcaaagggagaatatgcggtagacaatttaggctcttcaacataacttgcttgatctccagaggccccaaactctgctcatgccaggctttgcacatgccgtttcctctgcttggactggtcttccccatcattgcctggctatcttcttctcaattactagatttcacagtaggggttccgccttcttgattcccccggcctgggttatataggtttgtcctagatagtgcggtggccccacatatgcctcctcatcaacctgttttacagttgtttatcctgttaggccataagctcagtggcaccagggaccttctctgtctctctcagcactgtattctcatcagcttggacagtgcctggcacacagtggggactcagaaaatattttcgaatgtgtcaatgagtccatgaatgaatggaatttggtaaaaaagagaattctgacctccagcttctctttatcttatgagatgctttcttcactgtaatcttgcaggactggagttaggttttatttagaaagctggcaggtttatttacaaaagatgcaaataaaccactgggcttaggggacagaaagaaagagccattttcttagactagaaaataatatggaatggattagggggcagaagaaggaatgggtgagtggggtggaggaatggcaacagataagatgttgatggttataaaaattgggaaactgtccaattctccttagtttagactttaaaaaaaatgagtaaatttcctagaagtcaagtgtagccatatgaaaatatttggactaagttaaatataattcccttggtattattgaattgcctttgacttggagacagagctattcattatagagcagtttctaagagcctgggcttcacagagattatctcttttcattcaacaatgtaatgaagtaggaattatacttctattttacagatgaagaaatagactcagagagtttaattgactttaggattgtaaaactacaaacagtagaactggcagccattcattcattccacaaatatttattggcagtattttttttttttatcattagctttgtcttttttgatggtagaaaatgcatttcatttagaactatgattttagcccagagaaagtgatgtagaaaaaagcactaagttaactagatcatatcagtataaatgtgaagcctcaccattttactcatccaaaagtgtctagggccttaagttcagttccttttattacaactttaatattttgtctgtcttaaaaaaaaaaaaaagacattaaatctccagcccctggtatcgtgcttggaacatggtgggtacttaataaataatttgtagtgaatgggaaaattgagaaccattagtcattttctattcagtattaacaaagtctgacttacttttttgtttttgttctgtgtgggcacatttcactgagtgcaacttatgaaggacctcaagatcaaattcatgtcgtactcttggaattgaattctgacaggtggactgagagttttttgtcctctaagccttcattctaagacagatgacaccaatgtaggtagttattcagaataatagactcaggaatttaataagggtgttgtttaaaacgcaaatatcaccaaccagtggtaaagcaaacacattctgtgtgaatgagtacagcccactgattgacattcaagacccattggaaaaatcaggagacacaagagtgggaagagtgcagattggagcagctatccaaaaatacagaaggccagaaggtggtgagaaaaatgtcagacaacagattgtggagaaaaataaacaagccaagaaaagtcctatttggccttaaaagaggcagatggtgacaggaagtgttcagtgaggagtgattgtgctgaaaatcacaaagtctataaaattatccatctgtagtttgaggtttttggggaaaattaaaactctttgctagcattacagggaagggtgatagcacacaaacagaatattaagtaagtgtgtatttgtgtcaggataatagaaatgagagatgcgttattccattagaatagaagttttgtttacttagagattgtgaccaaaattataaaacgtgttttgttttgcataaaagcagttgaacttgtattaaatctgttctttccacatttttgatgtaagtaagaattctcccaagaatgttaatagattgctaaggtagcaatgataattttctaactgaaggaatgtactaaacatttttttccattagagagtttttttggaatgggatatagaaaatgacaaatcacaatgctaactttaaagcaaagaattttaatttgaaagttgagaaaatatagcagggaaaactaatcatttggaatagtatgagataatttgaaaaaaatattataaatattttaagatagatgtggttgaacatttagaattgggaatcattttttgatagtttgggacctagttttctgtgcttacattttaattcagtactacttactccgtggtcttctggtggtgtgcaacttgaggaatcaaataagccagggtttttacaactcttttctaggtcattaaagcatttctgctatgtgcctgaatatgtctttgatttcatgcataagaaatattagatgcttcattctccttctttagaagaaatactaactgaatatgttggattcttctctatttttattgtttctctcttagatttttaaccacagttgctcaagtctaagttttgtattttaagtttagacgtgtaaagtaaaaggctgggagctgagtgtgtggtgatgcttcctccttttcccttgagaactgaaggcaaaaaattaaatttattataaaaatttgttttacttttaaagatgtgattttccagacagagaaacaaactcatgtatcggtgtattttttaatgaattagaagcatgaaatctaggtactttatgtaagtcattttatttaatcctcaaaataatgttttaaaatagttattattttcattctcattttataattggggaaatgtaagatcatcaaaaccaagtttcagtttcctaaagtcacacacctaatagcagagtcaggatttgaactcaattccgtgtctttcaatggcagaaggggttttgcacattagattacataagccattgtccattgactccttgtcctttgcacttgtccaagagtggtccccaggcacaaacatgcatgtgaagaaagctccagaagagattctgattcaaatctccagttgggaactaatacatcaaacatttcaaaaatcaatcaaccaaccaatcaacccagcctttattgtatggtggtatttaaaaatctaaactctattttctgcaagttgctagccaattgaaccaaacttcttcactggataatatttttaaacatagatttagaatgcctttttttcaaatatgaaaataaaagatataatagcttatttctgtgatatatgcatacataattgcttcccacctaatttttttttcacttttgtagccttatatgtgtgactgtcttaatatctcaaagggctagtgctatcctcacccttattcttagattttatctctttaattattttctttgctttgttattcccaccagtttgtcttctagaaggtcttcatatcatgttatcacttaataaacattctcttttttattctgagtgaaaatgcaccaaagtataaatctgagaaaaagtgaatgttttataacttttgtttctcagaaaattatagcagttatgttaatattggtgatatacttctcattgtagtcattcctatgctagcaatatttttattgctactgtggataaattatttcattatatttttaacttgttattgttggagtaaaacaactatttatttttcatataaatattttgtttttggcctttttgctgaactctgaattctaatggctgtccagtttgtttatttatttctttattttatcatctccattttacaggtgatgtctagtttattttttctgttttttttctgagtgtactatataaattgtatacagtgttggtactttatatttttaagtttatatatcgtaatttattcctatgcataattgaatagtagagaatttctagtatactgttacatagtatgtcttttccctgattttaatgggaatggcatttctgtgctcatatgcatagtcaagcattcaaataaccattcttctgaagttgcagattaggtactttaagcatttggaataattagtttttattaaatgtcattttgatttaagataattttttatttataggatactaaaagtaaactttggagcagatttttaaaacacacatttctactttctgacattttacttaggttttcatatgtatattcataaaggaaattggcccgtacttctctattttatataaattttatcacacttagaattagagttgtaatttattttcaggaaataatttcattatgatctacatatttgttaatgtcgtgagaaatagctcaatttgggcctgcattgtagtggaaaattatacttcttaaagctctgcctgattattagttacttccttttaactgcctaaggctgatccaatagcaagacacaaacctactgagtgtgcagtagtaaatttctcattttctgtagtaggatttggagtcttcgttgctgtgctctataggttaaaaacaacacatgtattgaaaggtatacttttaggacctacgtgcctggccatagcctggccatagctcctggtcctcctgtgggcagagaaggggccaaatcttagttggtatctcttctatgtttggtcagcaaataacctctgcctctattccacctgctggacttgacatttgtaacttttgtcttctgtgtcttgctgacagagatagggctcattcctagattggtgaattgcttgctctcctccaagttgtccaaaaaatcccgcatatttacctcacagccctgcatccttcttgttcttacagtaaggaccttgaagtttccttgccaccttcacatagtataccttttcacccaggaagggacaattggagttgtagttatagaattcttaaagtttgatttaggctaaacattgtgctcacattttcatccatcttataatgctacttaatatcatatcatgatttagaacacaaattacataaacagaaaggcatatctggatagcttgtgctcttatatgatgttcttccatttttaactaatgttaatggtgcatagcattccattttaatgcctttttctctgttgtttccattgtattgtttttaacctaattaattatttctgttttttaaaatagttttgtaagaagttagtctaggtcagcattctgcaagctgttctcagaatactaaaaaaagggcaaataagcttgggaaattgtactaaatactctccttgaggattcaaagtacatattaacataagaaaagatctgagaagttttaaaataacagggaaaacttttgaagtttattcaatgattaaaagaacttaaaaataaagaacttatttgtgtagaggaaggctttttcttggcacagttattaaaattctctggaatagattttaatttttttcttaacaccaatttaagaagtgctagtctatttcatcattatcattatcactttaaataaagagcttaggaaattacttactcaattcatcgttgttctttcatctcatttattattttttaaatatattttaattattttttatctatttaaggaatcttctctttacaataaaaaattgtttggttcctttatttttatatttaagcaggaaagcaggaaaagaattaaagttatggcattatctctgagtaaccctttgaacaatcctaaagctttttatatttagcaatctcattattgctattgcaaaccagagtatctgagataagtctcagtcaatttaggaagtttattttgccaaggttaaggatgtacctgtgacacagccttaggaggtcctgatgacatttgcacaaggtggtcagggcacagcttggttttatacattttaggaagaaatgagacgtcaatcaatatgtgtaagatgtacactggggccaggtgcggtggctcaggcctgtaatcccaacactttgggaggccgaggcgggtggatcacaaggtcaggagatagagaccatcctggccaatatggtgaaaccccgtctctattaaaaacacaaaaaattagccgggtgtggtggcgggcacctgtagtcccagctactcgggaggctgaggcaggagaatggcgtgaactcgggaggcggagcttgcagtgagccgagatggtgccactgccctccagcctgggcgacagaacgaaactctgtctcaaaaaaaaaaaaaaaaaaaaagatatacactgggttggtccagaatggagggacaactcgaagaagggaggggtgttccagataagagacaaacaaacattcttttgagtttctggtaagtctttccaaaggaagcaatcaaatatgcatttatctcagtgagcagagggatgactttgagttctgtttgtcctttgtcctcaagaaatgtccctgtggacaaattgtgagggaggtatgtagcttttttatcttagtagctatcgtttttaggaatagaatgggaggcaggtttgccctaagcagtttccaggttgacttttccttttagcttagtgattttggggtcctttcacactatttcataaataaactatttttaattttcttctttgatctcatttattttttaaaaaagttttatgcctcttttcaaagttttattaatttccagtttcatcatatggttattagagaatgtgatctatagtctttcttatttataaatttataaaatttacaaattttgtttctaaaatttatcaaaatttccctatgacaaattatgtaattagctattgtatttcatgtatatgccagaaggtgaattccctgttgctagattaccaagataaatatatgttgattcattttattttattttattttattttttattattatactttaagttttagggtacatgtgcacaatgtgcaggttagttacatatgtatacatgtgccatgctggtgcgctgcacccactaactcgtcatttagcattaggtatatctcccaatgctatccctcccccctccccccaccccacaacagtcctcagagtgtgatgttccccttcctgtgtccatatgttctcattgttcaattcccacctatgagtgagaatatgcggtgtttggttttttgttcttgcgatagtttactgagaatgatgatttccaatttcatccatgtccctacaaaggacatgaactcatcattttttaaaaaaatccctactgtccttattatgtccacttgacctgttgtaagcaggtggaggtgggttgctttcttctgtaattgtgtttgattattgcctacttagacttctaaaggtttttgccatatataacttcttgctgcatttttttttagttatttactcactagatattttgccttttcaaattatgaagtggtcctttcacctaaatactgcttaaaaaatattaaagtcaattttgcataattagcttaccttacttgttttttattttggggtttgtttgatatgcatgtacatactctgtttttttttttaagtctttccgtgtcattttatgtatatctatcagacgttgtagaattagttattttctcataatgtcttaggcttttttcttttgataggaaaatataaatgacttatattgattaccataattatcatgtttgattttattatttttatctttattttttattactgtttgctttctattctgtattttgcaataaagtccagtttttaaatttttatttatttgtatttgtatttatttatttttttgagatggagtctcgctctgtagcccaggctggagtgcagtggcaccatctcggctcactgcaagctccacctcctgggttcacgccattctcctgcctcagcctcccgagtacctgggattacaggcgcccgccaccacgcccggctaatttttttgtatttttagtagagacggggtttcaccgtgttagccaggatggtctcgatctcctgacctcgtgatccacctgcctcggcctcccaaagttctgggattacaggcgtgagccaccgcgcccggcccatgttttttactttgagtttctgtaatgatttaaaaagtagaaactttttttttttttgagacagagtctagctttgtcgcccaggctagcatgcagtgatgcgatcttggctcactgcaacctacacctccctggttcaaatgattctcccgcctcaggagagagtaatcccagagggattacagatgtgtgccaccatgcccagctaatttttgtatttttagtagagatggggtgtcatcatgttggtcagggtggtctggaactcctgacctcaagtgatctgcctgccttgacctcccaaagtgctgagattaccagtgtgagctactgtgccaggcggaaacttctttttaattccactgttgcttactataaagataatatagacttaaaacctctttattattatgaaagtgtaaatattattttaatatttgttggttttttgtatctagaagtttttactctgacttttaagctagaatatttttatcttgttaaaaaaaattactatttcttcttcactacatcttctagtttcttgaattaatttcttgagtctaatgaatttatagaactttgctcaagcaatattttggaccaatatttcctttatgtgcttacagttagacgacaaggtgaaaccagctttgcctccttcctgtttaggaaaacagaaaattctacctgcccagtttttagttggataaaaggagcaaggaataaaaaaaatattttggcaaatttactagatattgacaataaagtcaaatcatccaaagattgatgaaaatcaaatgtttaaaagcaaatatttcctcaaaaaaaaaaaaacacttaattccaatagagtcctagaagaagttttagaagtagttctcaaatgggtgagatcttgctacctaggggacatttggcttgtctggagacatttttggttgtcacaactctggggagagtagggatggaaaggcagggaggaggtgggtgctcctgacatctggtggaggccatagatgctgctaaatatcctacagtgcaccaggcagcctctcacaacaaagaatgatctggtcccaaatatcaattatgccatggttatacctgtgtagcttacatgctacctattgtgcctgaatgaattgcttacttaaagacttcagcaatacagttttctgtattgctctctctgttttggatttcagggctctcacaagctatgatcaagagtcttcagccaaattaaaataatggatcattttcccacactgaaaaatattctctaggggaatgtctttcaactctagaattttaagctctattcttagtggtttcatatctataaatactgttccttcaagaaggatatgaagcaagctttatttctgtatttctaaaaagtaaaattgaacgttagattattggaacaattatttttactgaattatagtttaaggttagcctttgttatatataatgatttattctgtttaaacaggaaaaatgttaagtccagcctccagctatggtgattaaatcatctcagttgctgtgtgacatctacttcttgtttctttccttgctatttaatacttaaagtgtggtgccccacttgtttgccaggagcagtatcacatcagactctgctgttaacaaggtccccaggtgattcatatgcacattaaagttcattttgcacctcttttggcattgactttactttcagtggcctattttatgtaatgtaaaattgtgtaggctgcctccaattattttagaagtaggaaaaggcaaatgtcttttgtgtctgtttgaagtaggctatttctggattaaagaaatacacatgcacactcaccggtttgagaaaattcagaaaagtacaaataatttgacacggttaaccctttgttacaatctcaccaatacactacaatgtagcagtctctcgtgaggtatcagccagagttttttgtctcacaaccaagaaaattaaggagcatggacacaaagggtgaggttggagcaaaagtttagtaagtgaaagaagaaagctcttcgaggcagagagcgggcctgaaagagagttgctgtttttatagttgaatgcaaaggcttttacaggaaaccagtgagggctgggagtctcatttgcataaggtgcaaatttctggtggctccaccccatcatactagtgcacatgcaggcccttagcttgagttactccatattgctttgttccctttactgtgcatgtgttagaggacggaattttccattgtgggcatatctgggaagtcagctgtgtaacctttcttatatgtgtggctgcaggcatgtcttaggcaagccccttgtgcaaaattatctgtgcctgcagcttgatttctcaggctgttcttttgattgaaagaattcaactgagaacccatcctaactggctgcctgatcagtttcttcctttctcttctctcactttagcaattacctttttgtttttttttcctgtgcatatgtctttgtataaattataattttgtccaacctttttttaaacattttgtcataaacatttcctgaaccattttctataaacattttctcaaccattttctataggtatttgtaggtaatatcaatggttgtataatattccattttatggacatggcataatttattaaatcactttatagggtataatttctgaattaaaaagaaaattaatatgggcattgggtaagaacctacacatattttgcatttttttcctgaatattagatcctctaaaggagattgtcttccatagcaagtacagaactccctgtctatgatggtttatcccccaaggctctgacggaagtattccattgtatcactcacacaaaacaaaagtggatataatacttctcaatattttccattggatctcctctagcaatagggaagggtgatttagaatctctgtgaatctcaggctgtagtccaaagcacccatacgttgcacatttgatatttaatttagatgtaatttcttcttgaaaaaaatgtgaatttgtattgcattctgtaatgtataaataatgttgtttattacttatgagtgaaatggacactatctttaagttctatttcagattatgcatttttatgctgtattttcatctctctctctctctctttctttcctcttttatttcttttttatagacaagcttttgctctgtcacccagtctgcagtggagttgtgagagcatagctcactgcagcctcaaacttctaggctcaagacatcctcctgccttagcctcctgagtagctgggactatatagacacatgctgctatgcctgactaattttaattttttaaatgttaatttttaaacttttttcattttttgtaggggtctcactttgttgactcatctcaaactcctgggctcaagcaatcctcagcatcccaaagtgttgggattataggcatgagccattgtgcctggctgtcctgtattttcttaaactccttgtcaaggtttaagtactccaatatagaagcaaccaaataattgaattgttgctcaaagaaaaaagacttactgtaatgggagataattttccctttgacatcacagcataaagacaacttggtctcccatatacatgtattacccatggtattagtttcctgtggattctgtaacaaattaccacaaatttggttgtttaaaacaacggaaatttatcctttgcaattctagagaccggaagtttgaaattagtatcactggactgaaataaaggagttgtcagggctgctgttccatcagagtctctaagggagaattccttcctttccttttccagctcctggtgggtgccagcattccttgacttgtggctacatcactccaatttctgcctttgtggacacattgtattctctttttctgtgcttgtaatctccctcttacaaggataggtgtgattgcatttagagctcacccaggtaatccagaataacttccctattgcaagatcattcatttaatcacatctgcaaagattctattgtttctgccatataaggtaacattcacaggtttcagggattagggcatggatatctgttgagaggccattttttcagcctaccacactaatctttactctttctgttaatcaattgtgtcactctcctgtcctgtgttacttatctattgccacatatttaaccacccctgcaactcagtggcttaataacaatcatcatttgatttttttcataactctgttggtcagcaatttgggttgggctcagctggaaagttcttcagcaagtcttttctgaattcacttagaagctgcctggttcaagcaggagcttcacttacgtctgactgttggtactagttgtcagccaggccatgtggactcggagttatgattctttgggggcaattaggttaacaattttctgtgtctcctatttttaataattttggaaatccaagtttatacaaaaacattcccacttattggaaaaattctttgcttttttaaacatactttaaaaattattgctgggtgcggtggctcacacctgtaatcccagcactttgggaggccaacacgagtagattgcttgagcccaggagtttgagaccagcctgggcaacatggtgaaaccctgtctctacaaaaatacaagaattgggcaggcatggtggtgggcacctgtagtcccagcgactccagaggctgaagtgggagaattgcttgagcccaggaagtggaggatgcaatgaatcgagatcgtgcctctgcactccagcttgggtgacagagtgagaccctgtttaaaaaaaaaaaaagttactaagcttctgtcatgttacaaacacttcaagtttataggaaagatgaaatacacatacacataatgtaaaaacaataataagcaaccaagactgattataagaaattatgtcattgtttatgctgtgcttgtgctttttgggtttttaaaaatgctgtatagatgactaacaggtaagaaacatcttattcttaatacctaatccctaaggaaatcataacctcatttggcatgaggccagccctaatcatgttgggagaaattctgcaggtaattttcatgtacctagagaatttctgattatttgaaagctgaatggaaatatcaaaaaataaaaataaaaataatgcccttattattattgtgctctttaaaacgaattgattgtagtctttttgaaaatcagtttttagtagctgcagaaatcatatagcctagaggcagttttcattttttaaaaaatattgcttgtaagtaaccatacgtagccaaattgattgcatatgttgactcaatttttggaagaagtaatcttagtcatacatactacaggaccttcttgttctctgagaaaaatgtcactttgggaaatttgcacaaaaaattttcaaagtagtgcaaaacaacatatgacaaaataacataaaattttttgagttgagtttccaaatgtaagtgcttgtgtgggatttcagaatgatgtttatacatatattctgcaagatcccatttcactgacattttattggtaatagatgaaaagttttattaattaaaatttgagttttaccatatctgacatgaatcccaaaaagaagataataaggactttcaaaaatttataatataattgattgttaaaattgtgtggtggtaacatatagtttgcacttcatgttggaatttgaaaaaatataaatcaatatgaaagtaatttttattatacttaatatatgcctcataaaagaaatgcaaaaagaaaattatttaaggatatacatttcagacctactaaaagagagtgaaatttagggtgacaaagctgtacttcaggaaaagaaaaaaaatgagacaatgatttaagttaaatgtttgaatttagacaccaaggttgaagaatgctggcacagtccagaggaaatgaatgatggaatgggactctggacaaggcctctgccaccacctcagtattactgaccttacctttccaggagaagctctgacctcggtggttgctcatgaccagatttctgctcttgtcttttccaataaactcgtctcacctggatggagactttgtgatcatacctaagacagttcttcagcagcctgagccccattcctagagactttccaatgtgtcctctgccttttgcctttcttatcatagatctcctgatactgacctataagctgcattttactaaggttcaggagctgtgtggtttgagttaccttcacacctatcactgcctgtgctggtaaggcttcctgtcttaatgtgatacctccgttttccactgtccacacgtacgtgatgccacctgggttagcctggcatttgtttttacatctgctttctcccactccagctataggttaggtgtgttagtactacaaaattgatcttgcgaaaaaggcgaaaggaccggcagaactgacgtccttttgtacatgagaggaaaggagaaagggagagagggcagaaattatgtttagggcacaaactatgtttagggcactaggccaggtagtttccatatagactctcactttatatagctctctaggaagcaggtgtgaatagctcccttaagtaaggacacatagttaataatagggggagattttctgaaaaagaccaggcattttccaccacaacttgctgcttcctgatgagtttggaacatccccagtggacagattctggttttttctgtatatattatataatcatggtaattgaaattaagtactgaagaacttttggaactttttggcagagatatctgaaagctgatttgatttttgttgaagtatgaagacagtaaaatatggtaaagtgtgataaggagccacagagtaataaaaatagctaaatgtatgagaaaagatctgaagggaaggaagaatattaaaggctttacagaataaagcagacattcctatgtgtgttaatagagaacataggtaacaagacaagagagatgagtgtagtagatgggaaaacaaaaacatctctttcttttcctcttaccccaccctacaccccaattaaaaaaaaaacccaccaccaaatgaaacaatccatgtaagacaagcaatattaagactatcagtatgatgccagagaaaaagaaggtcggggaagacaaagacactcccaaaacatatttcaagtactcagaaaatgaaaagctgatgggtgaagcaagacctatttgcccttgtctctcttcataccatgttttgtgagcatagctacattcttgccattgtgccgggcactgatgacggatgtgctaggcaagaagacactgcacaaagagctgaaaagaattgcaggattttaaaatcatttttgtgtgtgtgtgtgagacagggtcttgctctgttgcccaggctggagtgcagtggcacaatctcagctcaccgtagcctccacctcccaggctcaaataatcctcccacctcagcctccccattagctgggactacaggtgtgtgccaccatgcctggctaagttttttaatttttttgtagagatggcgtttcactattgcccaggctggtttcgaactcctgggctcaagcaattctcctgccttggcctcccaaagtgctgggattatagacatgagccaccatgcctggtgaattaaataatttttaataaaacttttcaatagtcacaacaatttcagagagtagcgtaagaatgtgagtatcctccttttccctcagtaatttatatgtttcagacggattattcatattcatctcaaagttcagggcccattcctgatctgcccccactctctctgttcatctttgtttccatgtggcctaaacagcgcaacccgcccccagctgctcctaccagagacctgggagttattccaggtgcctccttatcccttcctccagccctcaccaagcactgtcaattccacgtcttcgttgttcttgaatctgttcactgctttccacgacctccaccgccaacctagtccaagccaacagcctcttttgcctggatttgtccaaagacaaaattacaacaaatttagtttaaagctctccattggctttattgcaattctagaatcaggtgacacttcatcccataaaatagaataagtgtttcaatgactctagcagaggaggttggctctagagacagaaaaagggctgaagaaagaacaaaagtggattggttatttcaaagttactttccttgttaggcagagacagggagacagaggaatagaaaggtaatggattggttaaggactaaaagtgaggaacttaattttcatacttactggcctgtttggaaaattggcttttatctctctcctgatttctcggaaggtcagatgacttagttttagtttggtgacatggaactcagaacaagtgactccattttgatttttagcctggtctctcggagctcaaggcaggaacttagtccaaaataatggcctcctatagtgattactgaacagactaccacaatatcctctgacttcttttccttattatcctctcagcccctccaattcattctccgcaccaggtgtgggcaaactttttctacaaagggccagaaaataaatattttcagccctgccggccatacggtctctgtctgtgtcaactactcaatgctgccatttataggagaaagcagccatagccagtgcataaagaaacaggcgtggcggcatgcaagtaaaaccttatttacacaacagaccgcagcaggatttggtgttctcatcactgtttgctgagagtccttggtctacactgaagctagggatccttcttaaatgcagaggatatcctgtcaggcccctgcctaatgttatttaattgacttgctgctgctcaaggacatgcattcacaatgtcttgcttcttaaccttgcttattttgagccccttccttcttgctcattttgtacctgttctttggctttctttcgttcagatccttgaaagctcctttctgagctaggacctttgcacgagctgttttacggttccctggaaatcttgactttcctaacccctgctcaaccttctgtctttagcttaaatgttaccttctcagggaaaccttccttgtctttccagactgatttagtttttttctactagatccatacttttttttcatttatctcaactttttaaaattaaataaaaatctttgtgtgactgtctagcatttagctccttgctaaactgtcaactcccagggtcagggaacatgtgggagttttcaactccgaattctcaacattttgtctagtgctttgtatagtgggcacttagcaaatatttgctaaaaaaaatacatttaaatctataattttcatctataatgtgaacattgatattggagaaatgggtgcaagttggcaagccaaggtgaaatagcgatgttatagtgttcacctatcagctatagagagcacacagattttgcaagaaaagcttttaggttgaaccacatgaaactacctatatctgactactcttgacctacagaaaaggtcatttcatgtgccttaatgtaatactaaatattatatactctttttcttttggcatcttactttcagcacctaaagaactcggtggaacgatgagcactaatatggcacctggcacattgagcactgtatttaataagcttttgatggatatgaggttctggaagtaagaaagagggaagctgccagtgtgaagggtatatgcaggaagaggagctaccacaatacctggtagttgagtgcgtgataacacaacatctgccatagcttggtttgtttgacccctccaaatctcatgttgaaatttgacccttagtgttggagatggggcctaatgggaggtgtttatgtcatgggggcagatccctggtgaatgtcttagtgccatccttactgtaatgagtgagttttgctcttagtcccctcaaaacctgttgttaaaaaaaagcctggcacctcccttcttttgctctggctttctctctcaccatatgatctctgcacatgctggctcccctcaccttctgccatgagtggaagcagcctgaagccctcaccagaagcagatgctggtggcatgcttcttgtgcagcctgcaaaaccatgagctgaataaacctcttgtctttatgaattacccagcctcaagtattcctttatagcaacacaaatggactaagataacatctttgaagctagtttgccaaagttataggaaaaaagatggaaaagcaagagtctcaaataagttatacagcctcaatgaaatgataaaggaccatgactttgcatataatggctttctgagaaagttgaaatgctaatgcctttcaggctacagaaaaactgactttggaaaagaattcagagaagcaaaagaagaagagatgaaagcttgagtttgtgtttataagagcagatatgtaaccaatttattagtggaacatgttatgggttattatatcataggaaaataattataaatatgatgtaaaatattaattcctgaaagttttggaaagtaaaatagaattttttctgtgtaataagttagtataattcttagccaggatatgaggactatgacctcttatgtgcttttgtagttctgtgattccataaaagatgtagaagggaagtaaaaaataacattacacataaatttgaacatgttttgtttatcgtatataataatacgtgtgctgacatttatttactttatgtttcttgtacattttaaatatcaatccatgccattttatagcaaaatctttgattcttcacttcctgttgtgaatcagttccaagaaggctttaccctatcactccattaaagactataatcttcatcactgtttagatcaccagtggccaccttctggctaaatacagtagtaattggacacacagttgaccctacggaccatgctttccttcatagaacactttttaacctggttgccagggcttggtttcttggttctcttcctacctctgggctgattcttctttgccatctttgatagtttctcctcaacttcccaaactcaaatatttagaaaccctagcactctgttcttgaccttcctctcttctttgcatacatttattaggtttatgactttcaaacttattttgatccctacatataaaaaatatattttgcagcatttcccagcacacatacacacacacacacacacacacacgtgtgcacagaatccaagttctcttttctatatcattaaaaaatcctctttatacccactaaattgattttactacccacttagtgagtcatgacttgcagttggaaaaacatttttctaggtgatctcatataatctcatggctttagatgctgcatttattctgatggtacctaaatatataggcatgacagtgtgggatagtaaaaatgtgcattgcatagaaaccatacagcatgatctatgtaatcaatggggaaagttatgattgtttcctgatctttacaactagaaaaaatattaaaaactcatactattgtatggctgtgttccaataaaactttatttacaaaaaacaggtggccagcccatacactgcagtttgctgaaccatgatctagactattccaaaaactttttggaagaatcatttctggatcatcttagacagaaaaatctttttaattatttagagatgggctcttgctatattgcccaggtttgtcttaaactcctgggctcaagtgatcctcctgccccagcctcctgtgtagctgagactgcaggcatgtgccaatgtgcctaactgaagaaaaatagttttaaaataaatcttttctttaaggaaaaagcttttgtagagtcgaagaggaaaagcttctactttgccctctaaaggtttaccgaaaaccactgaacaaaaggcagattactaagaaaaaaaggcatgcaaaatttatttaatgtgcataagcacaggagacttggaggattacccagtgaagtctaggtgcttatatatccttcttcatagggaagtgtgaaagtgagatcctggggaactagtcatgaggactgctgttctctatgttgtctcctttctcagacaggtccttctctcagaagaataaattcccacaaaagtccttaattgagtgttattggtctggctggggtcacatgctcatatctgaaacagttgctgaggtcagagatgaagaatagtgattctaagccctgggtcagatggactgagagtgaagaagaaaatcatgatgccgtgcctcaacgcaggagaaattaattctggtccagcaaaagcttcacatgtcccctctggacaccatttaagtaatattttcagcatattttttcagagcctgcatcctgtattaaatcagctctgttctgtcattgtcccagatcctgtatctgcaactgagtttcttgttgtcaaagggaatggaagttgaaaggggattaaagtgaaaccctttgggtcaaacacttattaaacagcagctcaggcagtctgccagatcctgaagagataaagatgaagagggaaggcacagttgtggctcttgagatcattatatctaatgacctcaattagatataatgaaatgaggacatataaatatgcaaattcaggacaatataatatttgctatgatatcctcatgcattgggtatgatgggaggaaagacagtcagccaatctgggagcaatctgggagcagagtgtggggtgtggagagaattcagggaaggtgttctagaggagctaacatctgagctgaatcttgaagtatgagtaagagtttctggatgtagaaggggaggcatctaggcagaaggaacagaatgaacgcacatatggagaggagacagagcatggtgtgtgacgagctgctgataatttaacattgcttcaggatgaggtgtgaatcagaaagtgtctggaggggtggaagagactagatgttggcactcaacataagttgcctagtgtttagattaagttcagatatgaatgaatttagactttatcctgtgagaattaaggagatcttgaaggcgcttacttaggggaaggatatctgtggatgaatattttagaaaaatcactctggcgattgtgtggaggaggcaagatcagttctggaggtgggaggacagacagtttaggagactattttaacagacccagtgggagatgatgagggtagtggatgggagaatgttcagaagggaatgagtatgagcaatattggcgaagtttgataaatggagttatgtgagggagttgttttgcagcacggggctttcctggatatgagtcctcaggttaggaaggccattttggtctagagaaagtgacaggtatatttggtagtacaaaaaagcctttgaggaaagagtaggggaaacaattggtcatctatccttctttatttgaggcacaatttccccctccattggtgtattttatcaacatgtattcattgagaatctcctatatgattgtcactgtgctgagattctaactatgaacaaagcgatcataacccttgctcctgggtcctacagtttagtgggaaagacaaatggataatttgaatgggtcatttcaaacacgatgagtgttacaaagtcactaaaattaacatggttttaaaaagatgaaacagatctaatgcagtggaagagttcatcgtgacttccaggctagtgggtagtaaggattgtaaaggctaatgccagcttctttgactggggcaatactttatatggactgattttggatttcttggcactcatggactgtagagtttgtagtagagtttcaagagtgcttgcgcaaaggatgtgcacggatggcaaaaatcagaggtagagatgcatagttcacctctagttctaaggctggcccctttaatattgggcaggccagtagaaatgcagatttggtgcaaagcttcatatctgtcctggtgttttaaaagagtaagtgtttccaaaggtgtctgattttcagtcaggaagaagcttaaaccttcagagattctgtctcttataattctgacttagaaaaaagggaataatgagaaacacttcatttgccttgttcattgaagatgcttttggataaataatctagcatcatgtttgaaaaaccgaccaaccaaccaaccaaaccaatgttaacaagaacaatagcaaaacaagaataacaacgtaaaaagcagttgtctaataattcccaaaaggtggccttgggttgagccaactttaaaattttagtaaggcagcaaaaagatcacgtgaaagagaaatggataaggtagaagaagatggtggggagggggaatagaattaactgtgaaaggagagtagactgtgtctttattgttggtcattctgatttataagtcaacagaaattcatttcctagttaaattgttagaaataaattattcatggaagagccatctgtgttctctattgccaatttctccacataaaaggaacaatgtgttgtggcagaagtcggctgaagcttttttttttttaatgtgactcatgtcactttgaagatttactttactttcaaacttatatctcagttctcagtgtgacaggaggttcatgttacatttcttcctcttacaaaaaatccagagagacttctaatcaaagaattatattgatactaatgagaaaatatatatttacggttgctgctagacatttctatatataaaagataggggcagcagactgattggaagaggggagcagtttacaacaaatagagcaaatgtcaacattctggataaaatcatgttgaggcaatcaaggaaccgatagcatgatgagagggctaaagcactccccagatcagctcgtgagcccattaaatgaacaaaatgcaattcccttgtttatgaagtttatttctctgttttctataattttttgtttagcttttaataccttagctcaaagatcatcatttgcatagtgcaattatattgttacatagctttgcattagatatccatatcagcctttcttgccttcttcagtttttcctactataaacattgtgcatgtgtgtgtgtttttctgtttttactctctgtgtatcctttctaggttcccaacatgccgctcctgctgtgaaggctttaaccagaaaaactcctaatgttcttctgccagggatatatcagtgggaggcaggaagaatggtggttttaaagttcatcttcattattatagaaaataactttggctctttacttatctagaagttagatcagtttgaactgagccccttgtaatatagatgttggcaatatggaagtgtaccaaagtattcatttgcagagaaattaatcaaagataagtttcagaatccccttagctgctgctgctgctctcacaaccccacccccccccacacacacaagctgtggtttctggaacagtggtctggtgtgcaggatttggaaaaatgccactgatttcatgattcatatgcacaccatggaaataaacaagagcaaacttctataataatttaggtactttaagtcttatccactttgtgggattttttcctcgtaccttcccaactgagttcctgtagccctatataaacattagcatcattgctgggagaattccaaggagtgagtcagaaaataccacctctgcccctatgtcaccgatttggaaatatttgccttgaggggttgtcctcagtgacttctgagtccttgatagacactaactaattagcacttgaaaactgcctccgagacctggaacttgttggttgccagagaggctggtgtgctccttctttcatgtgcagcattagcaaatgccggtgtggtatgaatcttaaaaattcagctctgacaatctaatctcaataatgaaagtataaaaacgctattgcatcaatggaaatgcagatgtcactgggtggcaaatgcatcagtacaaaggcacatccaaagggaggcaaagtcggagacgtgcaggtgctgagttagatcttgactgcacacctggacctttacagcagtattcccagggggtgaccacatgtttgggtttgctcaggatggccccatttatgactgtttccctggcagaattaatcgtcgagaccccgttcactctcaagaatcttgatttgattgttaatctgatgaacagtgaaagtgttttcaatggctcaaatagcataaagaaacccagagtatctggagaatgaagcaatttgaggaagtggctcctatagatcctgaactccttaacaggccagattaatagcacttggtggaccttggctttcctgtgacatagtacgtcccagtgactccatttgctacagagtggagccatcatttgaatttccatcacggcctgtctctggagcagaccactgtggtactggggttttgggggctctctcaagccagcttcatagactcgctaaccttattttacaagtagcattctagaaccagtcattataactttcagggtgggcattttccacgagatcctggttccaattacgcctaattatttgttatgtcctatttgggttttctttttacagatctttaagaaattttcctttggctctgagttgagtcaaaatgttgagttcaactttcatcctaagcaagatagagggcatgaattatggttgaggacttatgcatattttgaccaaatgaaaatgaccactgttgctccagcccaattgctgctactctagattgtgaatgcagatatagtcaaaatgactttggtaaatgcttctaatcatgactgattatctttttggctggtagaggaagtaggaatgcattcatattttgtatgaaaggtagcgttctttttgtaaattcttgctatttaaataactttttgggtttgtcaaaaccttttcaaatttttccagttaaagtttcttcctacagcaagacggtgagtttgttttttttttttgttttttttttgtttttttttttttgagacagggtctagctctgtcacccaggctggagtgcaggagtgtgatcatggctgactgcagccttgaacttctgggctcaagcaatcctcccaccttggcctcctgagtagctgggactacaggtggatgctaccatgcccagctaattttgtaattcttttgtacagacagagtcttgcgatgttgcccaggctagtcttgaactcctcggttcaagtgatcctcctgcctcagcctctcaaagtgttgggattacaggcatgaaccactgtacccagcctagcaaaacattgagtttttataccaaaaatatacagcagctcgtgctagtgtatccacagtactacttccatatttccttctgatattcctcaaacttatcttcttgagatgggaataaactcaacatacaggaagttcatacaaaagtgctaaattcagtttccagattataacaaggccccataaacatcaaaacatcagaggttgatctgtgctgttcaatatgctacccacatatagctatttaaatttaaattaattaaaattaagaataaataaaaatccagttcctcagttgcactagccacatttcaagtgctcaaatgttatttcccgggacagtacagagagagaaaattgccaccactgcagaaagttctactggagagtaatggtgtaggaacaggcagaccttatataaaacaatccttttattttctggtgaaaatggaattgagccaacctttcatgcgttcctagttctgattctgtgccattaagtcagagcactatgagaatccctatattaccttgaggaagaacagtgaaaatttacagtgctgcagctgtcccagaattcagaacccatgatctaggagactttagatttcatgaaagtaaggtctaagcttaccctgtttttcactgcaatcccagggtctggcacatagtagactttcaataaacacttgtgtaatgaatagttgagggaacccagcaaggacccattaaaagggcctaactacaaaaacacgggcatctcttggggtttggatcatttttgagggttccctgggaatcatgcgaaggggcaggcagtagccattggagatttctcctttgtagaagccacagcacagcatagggcaaatggcatttgctgagtagcttctcctttttcttctctttcttctctgtctcctctccttctcatctccctattccaacatcctatcaaattgctaattctgtggagcatttattaaatgccagccactattctaaggtcctttaatagattatttcatcttcccagtgattctattgtattgctttgctaaggccaccataacaaaataccacagactgggtagctttaaccacaaacatttattttttcacagttctggagactggaagtctgagatcaaaggcaggcaggtttgttttctcctgaggcctctctccttggcttgcagatggccgcctcctcactgtatcctcacatggccctttctgtgtatctgcatcactagtgtctctttctgtgtccaattttctcttcttataaggacaccagtcaggttggattaggtgcatcccaatagcctcattttaacttaactgcctatgtaaaggccttatcttcaaatacagtcacatgctgaggtactgggggataaggctttgctatggtctgaatgtttgtgttctcccaaaagtaatttgttgaaaacctaattgccaatgtgatggcatgaggggaagggcctttgggaggtgatttgtacatgatggctgaatccttatgaatgggattagtgcccttacaatgagaccccagagagttgccttttccatcacatgaggacacagccagaaggtaccatctacgaaccataaagggggcctttagcaaacgccggctctgccagtgccttgaccttggccatcctagcattctgaactgtgagaaattcatttctcttatttatcagttacgcagtttatggtgtttgttgtaacagcctgaatggaccaagccaggcgtcaacatatgaattttgagggtgcacgatttagcccgtaacacctataaagtcggtgttattattagtcccacattatagtagaggaaactgaggcatggagtaaccttgcccaaagtttaacagctggtaaatgatgtaacacagatagacatctcaccagtctgacttcaaagcttgcatttttaaccattagaaggggtactgcattttcttaaattggcaacacatttgggtttgaaactaattagaaaaagatatcattgaccaggcgcagtggctcacgcctgtaatcctaacactttgggaggccaaggcaggcgaattgcctgagctcaggcattcgagaccagcctgggcaacatgatgaaaccacatctctactgaaaaaaaaaaattaaaaaagaaaagaaaaagatatcaccatgagaggtagatcattgcagcattggaggtgatctgcctccccaggtggggagactgtgtacagctattgctgccccagcttctgccgttcttcatatgcttgtcaactgcactgtctccaaagttcctaccagctcagccatattcttcctccctgccctcaatgcgtcttccccagttttatctgggagtgaaacttgtggtggttagagagattcatcttgggctgtggcaatcttcagttgcacaaaccgtgtgaattacaggatggccggagcaactgaagggccagatccctagtcattgcaagtcggatagctttctctctagttactttgttttgtaatactaataagaataaaaattattttaacttcttccatatgtattattccattctctttcttcttattttatttttttaaattttttttgagatggagtcttgctctgtcacctaagctggagtgcagtggcacgaacttggcttactgcaacctctgcctcctgggttcaagccattctcctgcctcagcctcccaggtagctaggattacaggcatgcaccaccacacttggctaatttttgtatttttatagacacgaggttttgccctgttggctgggctggtctcgaactcatgacctcatgtgatctgcccgcctcgaactcccaaagtgctgggtgtacatgtgtgagctattctctttcttctaaaaatatgtaaatttattttccctttttttgttttttttttcttttaggcacagcagaatttattctactttattggtatttttttgttttattggtgttatttatccttcataccgcatatttaattgttttttaaaatactaatttcgcttttagcttttaaaatttctactcctaccttcttttggctggttttggtattttctttgaatttgaaaaaatgaaagaaatgacaaagaaagttaacagcttttaaaaataatggcaataacaagttagatacagaagtagaaaaatgttcttttcacaattgtatagccaggaatagatttaacaaaaaaggtgcaactcccacatgaagaaagatgtacttattgacaggacttgaataaatacaaattaaattcacaagaagatgtaaaatcatgaaaataacagttcttccaaaattaatatttgacttaataaaattccaaccagaattttatttttttaagcaaaaatattattttcggttcatttgaaataataaatgttttagaattccagaaaatatgttagaaaagagacttatattggagcactagtcctactggctattaatacatggttctaagattcttttagcaaaacagcttgatatgaagtctggaaaaaagcagctattataatagaataaagtccagaaatagattaaagtatagatggaaacctaatttatgataaaggtagaatttaaattcagagggaaaacgatgttggtgtaattggcttctaggtagaataagataaaatgaaaccacaaattcacaccatgtatatataaaatatacatgtgaggtggaataaatactgaaatgtcaaaatcagaatataaaataatagaagaaaaattttgattatatttagtttttctttaaaaacaggaaaaatccataagccatttaagaagagttggatagttttcactaacaaaattataaatttctgtgttgaaaaatgcacaacataaagtaagaaatacaagtttagactgagaaaatatttccaatactgcattataaacaaaagtgtaatgtacttatacaatgagacttaataaagcattaagaaacatagaaacaacaggcaaagcataagatttggcaagatacattggatggaatgcagatggccaataaatgtatgaaaaatgtttaactttttaaataaaagaaatacaaattagagtttttgttttgctttgttttgtttgttttgagacagggtcttgctctgtcacccaggttggagtgcagtggcgtgatcacgactcctgaactcaagtgatccacctgcctcagcctcccaaagtgctgggattacaggcatgagccactgcgcccggcctagagttattttctaatagtttggaaaaaataataatttttattgctggccttagaatgagtaaacaaaccctttcacacattacgaaggggggtgtgaattgctacaattgttttgggaaaagctattgaaatataaaattcatattctcctcaaatcaacaacactgctgttagaaatcttacctactgaaatgaaagcacaagtatgtattgataaacaaattatgcaaaacttaacaatggagatatgttttgagaaattagttgttagatgattttgtcattgaatgaacatcagactatatggtagagcctactacacatgtaggttatgtggtatagcctattgctcctaggctacaaacccgtctggcatattactgtactgaacactgtcatacattggtaagcatttgtatatctaaatatagaaaaggtacaataaaaatacagcatgaaagattaaaaatggtacacctgtatagggcacttaccatgactgtaggactgaaagttgctctgggtgagttagtgagtgctgaatgaatgtgacggcctaggacatgaccatttaaaactgtaaaccttattaacactggatactttggttacacaaaatttattaagaaatatttttatggccaggagtggtggctcacacctgtaatcccagcactttgggagaccgaggcgggcagattacctgaggtcaggatttcaagaccagcctggccaacatggcgaaaccccgtctctactaaaaatacaaaaattagccaggcgtggtggcgcatgcctgtaatcccagctacttgggaggctgaggcaggagaatcacttgaatccaggaggcagaggttgaggtgagctgagatcacgccactgcactccagcctgggcgacagagggagactctgtctttaaaaaaaaaaaaagaaaagaaaagaaaagaaaagaaatatctttattttttcagtaacaaattaaccttagcttacagtaactttttttacattataaatttaaaattttttgactcttttgtaatcacacagcttaaaacacagaagcattctatagctgtacaaaaatcttttctttctcttatatcctattctataagcctttttgtattttaaaaatttttgtatttttctactttttaaattctttttttaaaaaaacaaggacacaaacacacagattaacctaggcctacacagggtcaggaacatcaaaacataggccctaggcaatgggaaatcttcagatccattataatcttatgggattgcagtcatatgtggggttaatcattgactagaatgtcattatatggcctatgactgtacattgattttactaaatatatgcatgtatatatacatatgtacatatccacaaggatgtttattgccttttcagaaggttcatcaataggagagaggtaaaaattattgtgtatttataaaaggaattgttacccactattataaagaataagatctaagtgtgttgacctatagaggggtagagagaggaaaggagattatgaacttttcaaaaataaaacttcagataattttgtttgtcacaggagaatgcattacttttcatattaattataataatggttaccacttattgaccgttacgatggaccaagtgtagcgggaatttaaatatatcatttataattctcacaagaacatgcaagaacaatgtcttcagttacctatggggaactgaggctcagattggcagtcaagtggtggagccaggattcagcccctagcccatctgctgagaaagtctttgctctttcttctggttcctaccatggctgcatcatcttctgtgtgggccctaacggggagcaggaaatgccccacttctctctgggcatgggagccataagaaggaggtccctaacatgtacaaccactgctggttttggtcctggggagaactaataaagaataaagcaaaaaaaaaacccttcttttatcattgcgagcattgtcaccagtcctaactgaccactccactctaccacacccatagcaatgggctgccttactgtgtcatttttgatcgtcagtccactatccagtgaattattgcatattcataagctagaatgtggacagtcagggaaggccagcatggaagaggtaaacacctgaaacttgattatggagacagagtcagagggtagtgatgttctttggttgtggtgctacatcgtgggttgctgagttccagtactgctgtgaataagctctgtggtataggggaagatatttaaactcctgatgccctaggttttctcatctgtaaaacgcagatgaaaagagttcctacttcttagcgtgtgtttgtgtgcacacaggcacatgcacctgtgtgtatttgagtgtatattaaatgaattaatacacagcccttggaaaagtccccaccacagggtaagcccaaaagtacatgaaggccattattatgattatcaagaccaatcctcagattctaggtctaataagatagtttacttttggcatgattagcctatgattaccaatgtcataatgctaatgcctgcatttataccatgagtttaaagaaggataagatcaggtcgaggttaataaccatttgaattctgacatgtttgtgacacaataatgttcacgggtgacaccaaaaatgttgaattataatttgctttcttgaatcccggtttattttaggaggggcctaattttttgtgtgactcctgttaattttcatgactgtccttgttgctctgttgtctgtgtcttttcctgtcttggatgttggggagatgagcgatatgtagataggagaggtgagtgtgagggcagaagtgtggttggttgagtgttgaagagagagtaacagacccgtaaagaaaaccacagtatttcctacccttgatgctgagatatgcgatgaatatatctatctgttgatagagctgtttaggtttttgtttatttgtttgggtttcgtgcaatttcatgtaaaatttttctggtaattttttgttatttaattatcttcccagaagagaaattcttttttttttctgggtttggggcacattgctttatctttttctgagttgttaagcagttagaaaattattttaaatagattttttttgatacacttgatgatttttatcagtaaacttgaaaacggctgtttattttggtcacaaagaaatattttaataatgcttttgacaagatatctcaaaccatctgaatagagaatcttaaatagctttaaaagaatcatgaacttattagcaaaaataatgaagttcagtataacatttaagttgacattttgagatagtagataaagtttacttgggacacacatgaaattaaaggtgattcgttagtgtttagtaactgtctttatttcttcatttttttgttttatattttatttagcaaaacatcttaatattatttttagtttggagtgtttgtagaatatttaaataaacattaaaaaattcctaagggaagggacaggtgaaatactaatacaaacaaaaactgttacaaaatcagaaatgtcaagattttggggggctactgtgtatctgtttatctacttgatcttatatgcgattttgtctttcatttcattactcttcttcattgggaagaaaaaatcctctcaaggtcctatctcagtccctgaagaaataaataaaaaagagtagcagaagatggatgagattgagtgggaggtaaaattagaatggttgcaatcagtaaaaatcttgaaagtactttagtgagagaaccataaacaaaatatgatagtgcatatcctataagatccatgattactcataatttattcacaagtacattaaaaatgtaaaaccatgcataattatttaatgtataattaaaatttaaatattgaatttgaaactgggacaagcaatacgctttcctgtcatctgaacagttctggagtatcataggattatttcatgtctgataatattccatcatcttcctgtatctaacatcagatttaatacacacagcaggtactttttgatcatacagtttagcatttataatgaatcttggagctgaagccatatagcagccttgaaaattatgctgtatgcctttgaatgcgtgggcactcaagtaggttggagtaagaaaaagcactcaagtttttgttgttgttgttgtctttaattattttaaaagtcagtctcatttgatctctctttctttcccccactcttgattttggaggttccaaatggcctttctccactcaaagagtggttcttaggcctgcaggatagcatggtccactgacaagccgcatggcatcccaggggagcttattagagctacaggctctcaggccccactccagatctgccgaattggaatctgcattttaataggatcttccgttgcttcacgtgacatccaaatttgaggagccctgccatatgggataggtctgaatcaggccgatgttattgtctatattcctggaaggattgcttaattttccaaacttgtttgggttctgtagctttttgaatgatcccagggacgcctgatattcctgttggaagtttctaagtctccaacagggaagatcatctatattattattaccagtatgagtaacaacaatgggtgatatgatttccatttattagctacccactagtggagcatgatgcaaaatgtctcatctgtgtatttcacctgtaatcctctcaacaactcagcagaagaggttttattattatttatttatttatttatttatttacttgagacagagtctcgctccgttgcccaggctggagtgcagtggtgcgatctctgttcactgcaacctccacctcccaggttcaagtgattctcctgcctcagcctcctgagtagctgggattacaggcacatgccaccacggctggctaatttttgaatttttagtacagacggggtttcaccatgttggtcaggctggtctcaaactcctgaccttgtgatccacccgcctcggcctcccaaagtgctgggattacagtcgtgagccactgtgctcggcccagaagaggttttaagaagacaatttacagaaaagaaaaccgaggctaggggttattgttcaaggttaaatatacaatgttagttctgaaatcaaacccaagtttgtctcccctaagccacgtaccgcccccccaacccccgttttttttttcgttttttttaaacaatactatattgctacatgccactttggtcctcttgcagtaaggaagggcatataaaagtgccctgtttgtctgggatcagaaaacaagcctgtgtaggcccagagagacaaatatggcttgttgtcacatgtgtgcaagagctaaagtggatctcacagaaggagagggcagaatgatagatactagaggttgggaagggaaggtgagaatgaggagaagttagttaatggacacagttagctagaagaaataagttctaatattcaacactaccgtcggtaaattatatgtaataatttattgtgcatttcaaaatagctagaagagaagaattgcaatgtttccagcacaaagaaaagataaatgtttgaggtgatggatatcctagttacccaaattcgatcattgcatattgtatacatgtatcaaaatatcacatgtatgtataattatatatttatgtacaactatgatataccattaaaaaaagaaaataaacctgtgtataggcatatgctgatatttattgtgactcttatttctgttttctgattctgacttataaatgtctagaataaggttctttaaatttgtaaaatctttgtacatttttgtgatttgttttttgggttttttttgcaaatgtgggggaagatcattcatagttttgtttaaattgaattttcaaaaaaggccataacccacaaattgttaagagccatcccctaactcagcctgtaccttcatggccctcagctgttgaaattcccaccagtctgctggcatcattgcatccctcccaattactagattttcccagtgccttcttcccagatcattccttctcaatcctgccctggcatcagaatcacctctagaccctgtacagaatacagctgctcaggccccttctcaaaccttctgaaggatgaccttgggaatggggctcagaaacctgtatgtttaagaagctccacaaatgattctgacccagagcgctataagtcagcacaattttctttctttcttttttttttgagatggagtctcactctgtcgcccaggctggagtgcagtggcgcaatctcagctcacaggttcaagtgattctcccgcctcagcctcctgagtagctgggactataggcatgtgccaccacacctggctaattttttgtattttagtagagacggggttttaccatgttggtcaggctggtctcgaactcctgacctcgtgatccgcccacctcggcctcccaaagtgctaggatgaaggcatgagccaccatgcctggccaattttcttattttctttctttctcattttctttccttctttttctttctttttccttccttccttccttccttctttccttccttccttccttcctttctctctctctctctctttctttctttctctctctctttctttctttctttttcagggtctcactctgtcacccaggctgagtgcagtagcatgatcatggctcactgcagtctcaacctcccaggctcaggtgatcctcccacctcaggctcctgagtagctggaaccacaggcttgcaccaccatgcccagctaatttttaaattttttgtagagacagggttttgccatgttgcccaggttggtctcaaactcctaggctcaagtgatcctcccgccttggtttcccaaagtgctgagattacaggcatgagccaccacacccagcttcaattttctttacaaactttgaacaaaaggagatacttcatgaacgtcctcttgtggaatgatctcctggagggagacccaaagcagcccagtcctcccacaagagactcatcatcatctagatctggctttcctggtaagatcctaactaaagaaagagaggtgagcaaaggaaaagaaggtatttccaccttcactagtttataaaaaataatgtcagagtttcaatatttacagaaatgccctcactttttgaaatgcaagcatttgatgccttcacaaaagctagaatttttttttttacaaataccccatacacagtggtgtgctggtaaatgttttacaatcagctctgatttgtagcattgcctatttccatggtgtaaatactcccatcctggccaatttgaagctaccaacttggctcacaaatttcctgaaaattaaaaaagcctctcatatgccagtacaagcctactccatcccaccactgcatatggagagtgattatctgggagagatggcttctggatttctccataggctcaggcatgcagaatgattcagagagctccatttgcttctttattctccttcagaagattctactgcgtggcctactccttccgaaaccagtgcatgttcgacaccgcaagtctttcatgatgatgttgaaaaaaaataacatcctgaagatgttttgacaaattaatttgacttttgaattattttccttttgagagaataaaatgttccaaaggtctcctgggaagagattgttcaaataaggttttatattgttgattttgttttaggtagttaatgctactacctctttatctgtgggttagtaaattgacgtttttctccttcatttatctgtgtctgctagaactgtttgacattctccacccacacaggttctgatgacattacttttactcattgtctatttacctgtgaaaggatgagctgttcattcatgggcataaagagcaatgactgaggaaatggactagtgtttttccattaatttttataatcatgtcttagttcactatgatgacgtacagttttctctttgttccagagaactatcaaaattgtcactgacatttatttacaaccatgatttgtataggacagttttagaaacttgaataccagtagtttgtcaagcaagatacagcgcctgcttctctagaatcaggggatgtttaagaggttatctagtccagcctcacagcttgtctcttagatatctttctgcttctgtgggaattaatgacttctactgactgtagatttgtctggagttttgcagaacaaaccaaatccttccccacataactatcttggaaaacctggagaactttcgacctttggaaacttgatgctgcctcctaaacttttcttctcaacctatgaaatgagcttctcatggaaattattttccaaaatagatatacaaagcacaataaaatatgttaatgagagaatcagctaaattgattcactcgaatcatagttgctgccacaagtcaggtgcattcctattttctttccattacctctagtgtcacttcgtttacctctgttttgtgcttaacttcttagacaaatttatctttccaatttatcttatttgataagaatattagtgaaagacagcagaatcttctaagagagttatctaagataactagaagctaataattctaaaagatgcttcaaggtccaaaaaccctcttcagtaaataaatgcacaaaggcattttgataagcatttgatgtagccgataactattatagcactttaaaaaataattatggtctttttggtgattaatatctacagaaagatttcaaatcatgaaactaaatcattaaaacaatctctgccttatctgatttgtatattaaaacttctctgtgctcacttaacaatgttcttaaacaagtcaaaggtatttttttttttttttgagacagagtcttgcactgttgcccaggatagagtgcagtggcatgatgtcggctcactgcaacctctgcctcctgggttcaagtgattctcctgcctcagcctctcgagtagctggaattacaggcgcccgccaccacatctagctaatttttgtatttttagtagagacagggtttcaccatgttggccaggctggtgtggaactcctgacctcaggtaatccgcctgctttggcctcccaaagtgctgggattacaggcgtgagccaccatgcctggccacaagtcaaaggtttttctgaatctgaaggctttcataggtagcttcttcttgaatggtaataataaggtgttttgtgatactaattttaaattattgatttctgtgaattttaaatgatgaatttatatgaatgggaatggaaattatattgcctttttattgtgaaggtcgtcttgtaggataggactatagagagagcagaaggaattttgaatatctgatattattgctgacaaatattttagaaaaactatataataggttaaagtaaattttcttcattgatttattatggctaatatttagggcaaagggtgatatactctcgtgagtcagtaactgctaggataacttattcagtcaaaaaattttccctaggcccgtttaccgccactccccctaagttgaattcataatgatgcagtgctttggaaaacagctctgtattaatacaaggtaaaaaagcccccacaaaataaaagcttcttttaattatcctagcatgaaatgaaacaaaaagaaaagtaatagggtagacgctaatttcatctttctttctttgtttctctttgtttctctctttctttgtttctctctctctttctctctctctctctctctttctttgtttcgacggagtcttgctctgtcgcccaggctggagtgcagtggcgcgatctcggctcattgcaagctccgcctcctgggttcaagcgattctcctgcctcagcctcccgagtaggagtagctgggactacaggcgtgcaccactatgcccagctaattttttttttttttttttttgagatggagtctcactctgtcgcccaggctggagtatagtggcacgatcttggctcactgcaacctccacctcccaggtttaagcagttctctgcctcagcctcctgagtagctgggattacaggcacccaccaccatgcccggctaatctttgtatttttagtagagacggagtttcaccagcttgaccaggctgctcttgaactcctgacctcgtgatccacccgccactgcctcccaaagtgctgggattacaggtatgagccactgttccaggctgtagcctcattatatgtcttattgtgtttcaaaattctgcagatttcttagacctcagtttccccttttggagaatctttggagaaaccagaagccatctatcccaaataattgctttccacatgcagtggtgggttggagtaggcttttactggcatatgagagcctattttcattttcaggaaatttgtgagccaagtgaccacacattagtagcttcaaattggccagggtgggagtatttacaccatggaaatagtcaatgctacaaattagagctgagtgtgaaacatttaccagcacaccactgtgtatggggtatttgtaaaaagtttgtagctttcttttgtgaaggcatcaaatactttcatttcagaaagttaaggcattgctgctaatattggaactctgacattattttataaacttgtgaagctggaaataccttctgttcttttgctcacctctccttcaattagaatcttagtagagatattttagatgtcatatgtaagacaactttgaaattatattaaaagcaaatgcataattaagattacaaaatgattctgtaatatgtctctgcagaataattctgtaatatattccatcttgactgcccattaaaaatcagatgaagtgagatttcacttttaagatatcatgttgatttggttgttttctaaatttcactctgaaggaagaagcaagaagagagaatataatgctgtcatttcttttgcaatcattttttgttcctttgccttttcttggtttcctttctccacttttttctttactttttcctcatttcttctgtaagtgagtaatctgtttttgtaaccatcctaccccctcgtgttgtttattggacccctggtgacttgcatttcctttaggaatatgcccagcatttttaggctgctaaaatatgagccaattaatgatgttcttattgacgaggtctaggaaacttgtagggttcagtttctgcaagaatgatttacagtctataataggttagaatgtcaaacaaggggaaacaattagtagcactaatgttttaaccccaggtttatcactgagggaggatcattgatgaagaggcccatctgttccaaagatgtttccaacttgcttgtatagcagtttgtaaatcaaatcagtgcggtgattgtgaggcttatatagccacttgtttgtcaatttttaaaaatcactgcttttgtgcacatttcatcatgatatctttgaaaaatggggttttacctgtggaaattacactattgtttttcagcattatgttcagtttattacatgtaccaggaacacgtgttttgaaattgtcaccagctccaagaattatgtaatcagtgagttaaatatataacttccaaatgaattagtgcacctatattttggcaaaaatttgttgttggaggaagaatagattcatcccagagtaagtttcttgtctattttcaggataaaagatgggagaattctgttactataatcaagttctttcttaaaatacccttaacctactttttttccctctaaataatgaatgctccacttcttacatagaatttcacaatttacaacccacattcacatttgttatttcatttcctgttggatattttccctctgctgttttcttcctatagaaaggccattgaataattggctctaagatttgaaaggagtcttcagattatctgttcaattactgtgcctagtgatcagcctgtctcttatttccaaaaggagaagaaaatattagataggtagacagactgatcatggggccaaataacagagtgaaagtaaattttcttttcataggagtggaagacaatattattttttacttttgtctttttatttgatcatttatgtcatgctcaccctactgacatgtggacttctgtttcagtggctctctggtcactttaaggcataaattccttttaccatttgggaacattgctaacttgcctccagcttcaaatttcacccacatggatgtgagtttctggggtgtaaaagagtaacattttatttttgaggcaagagacttctttctttaaagctgcttttttactgatttagttatttcaaatcatattaatacaaattggggcaaattaagagttacaagtctggacttaaaatcatttgcctgctctggtttggaatttatgcagctatttctgccttaattaaaactgtggatatttttaaagcttagaatttattcttatcttattctgacgagaatgcaaatccaaccaggcacattaaatgttctgtgatacggatggaaaaagatagaaactgggcccagccaggctggatttggtttgtgagaagatcgtcttttaataatggcttgattgatgattgtgtgccatgtgaagtaactggaatgctggatggttacatgaaattgtgggaaaattgacacaatggggaaaagatgcttgctgagcctatgaagtgcaacctgtgcaaatatgatgattcctcaattgcaagatcaggaactcaggattactgtgtaaaaaagaaaatgaaggccgggcgtggtggctcacgtctgtaatcccagcactttgggagggctgggtgggggggggcggggcagatcatgaggtcaggaggagttcgagaccagcttggccaatatggtgaaaccctgtctgtactaaaaatacaaaaattagctgggtgtggtggcgtgcgcctgtactcccagctactcaggaggctgaggcagaagaattgcttgaacctaggaggcgggactgcagtgagccgagattgtgccactgcactccagcctgggcaacagagtgagactctgtctcaaaaaaaaaaaaaaaaaaaaaaggaaaatgaattagtgaagaaagtaagatgatgtaaaaacaaccatccccagtgtcctgagggtagtgcttctagccgctttccccgctcccccaccccgttgctaggagagagatgagttaacacacagggacgtgtacattataccagccggatccacatacctggcagctgcaacctgttaaacctgtgtttttttcttctgtgtaaacactataaacaggaaggcaaacgtcatccatttacgcagaagagaaaattgatgatgaaaaactgtcactgctttgcttaaaaaagtctaaggtaaagaacgtattgactcagagagggccattcaaaatctaaagtcttcaattttattgctatttctgtattaaggattctgaaggcaaaatttcttcagaatctgttgtttagactttacaacaaaaatagctttggggagctgcttgcctggagaggttttgtggtgactatggaaattaatcttcttgatgggaaatcagctgttcaccatactgctgccttcattcccaaagaagagtttccattcctacctggaatggctagagcctgttggctagagcaatgagccattgaggcctcctgatattccacccgggtgcagcctccttgaagctgcctcaagcccccttcagttactcctttattcccttcactgctccagaagggttttcaagcatctgcagctgcacctctgtctcaagggcaagctctactgtcagccacgctgctgcaaggatgggattgaaaagcaagaccattcatttactctttcattcacaaatttattgaactgatatttaagcttagaatttattcttatcgtattcttacaagaatgcaaatccctactatgttccagactctatgtgggggcacaggtgacacactggtgagctaaaatagatcccatcccaggactaatagaccttacagtctgggtgacagaggagttaatcaaataactacattgatgaatgtatattttcaaactgaggtgttaaaaataacaaacccagcctgggcaacatgacaaaacctcatctctacaaaaaaattagttgggcatggtggtgcacacccatagtcctagctactcagaaggctgatgtgggaggatcacctgagcccgggaggtcgaggctgcagtgagccatgattgtgccactgcactctagcctgggtgacagagtgagcctctgcctcaaaaaaaaaaaaaaaaaaaaagaaagaaagaaaagaaaagaaaaataacaaaggaactgtggacttagactaaagctactccaaggaagctgtatttagccatacttagaaggctgtgcggataaaatatgtgaatatgtgaagcagagagcattatagggacgagcctcgtggctgaaagaaggatggctgaaacacaggagggaaaggctggtgccttgagaggcaccacgccaaaccacatggaggttcaagatctcgtagagaattttggtctttatcatgaaagcaaaggggaagttactgatgggttctttggtggaggtgacctgaggagggttgcgttttaaaaagaaagctttggccttgggagggaaaagagctggagagaggccagaggggtgggaggaatatcccagtttggaaccttgaagcagtttagttacatatccaacattccttcaccgttgcctcactcctgaacattgtccattgcatgtctgagtcttcttccagactctacattccttcagtttaggaatgctgacatatttgcttttggatcccatgtagtgtctgaccctgggatttgcatgtatgtccaacaaatgctgtatttaaacaatgtggctgttccgcatctcacaagtcatgttagttggcttaaaggagcatagctcttctgtattctagtgataacattatatagtgatctaagttattcctgaggacagaaggagttagagatacacttgccttttcttttgctatcatatgtgccttgcattttatttccgtacattagtatcttcaatataatgacctttgttgtcctgtcttcatgtcaacctaaagcattgttattgtcattagtgttactaccgcctcacaaatacatagatatattgggggagatttttcctgagagaaatctgcagatttgaagagaaaccatgtcatacattttctgagtctgaaaatcaggagttgcaaacataaatgagtaaagcagcagtagggaatggcgcagcctgtggcagaactagggggagcatgctctatcccaaagcattcacattcgaacacaaaatatactgtgctagctaaaccagacatctgggggcaagtgtggcttagtgactatgggtttgttgtttcttctttaattgattaaaaaaagatttaaacacagagaagttataaaaattttcagtgtaattaggggttgtgggccaagctttattgagtgacatgaagcttcaaagttgttttggggaagggagcaggaccaaaatgccttcttagtgcaactttttcaaaaaaacttgtgaagccagcttctaatattcccctggctacttgctctctctctctaatgggctgcagcagtttctcctgtgcctcaatcaaatgaatacatcacataaatgagggtataaactgcatgagtttacagaaaggaagaaggttattattacctttgaaatcagaagccaagaaaacatctcttctcacacctcctcatctcttctcttactttctgggcaagtccctaggggtaattttattagagactctccctcaaagtaaaaactgaggggggtataaatagccccgatcctgctcccacctgatccttagattaagattagcataagctcaggctgagaggtcaccacaaggtcatagttttctggggtgaatagtcacttaattcagaaactcaggaatctcatgcaaagaatgcttagttaacatatttccaggagaaaaataattctaatttgctttcttataccaagaaccagcagtcttagtgattttgtaaatgcagaaattgggcccgtgggatggatgaagcagaaacgagcagaacaacaggattaattgagatcactttgctgctacgttctgcaatttcattactactcctaaaacgcaatggagagtctcacaaacaggcaacagtgacttttgttagtattctgagcccttcagcaaagtatatcctctttgggctgatttataccataaggataataaaaatacatgccttacacattttagtgggctgttgtgaagagaaaattagattatgtatggcaaggaacttcacaatgacaagataatgtcatgtaataataatattaaagaaaattataggaaacatatagcacttgctatttgtcaggcactgttctaagcatttacattcattattttatttagttcttataataaccttccgtatgggctagaatctattgttatctctaatttttagatggaaaaacagagccacagagaactgaagtaacttgcccaagcctagacagtaagaattggtgctaggatttgaatccatgcagtctggcccctctcaatcactatgatttaggaataaaaacaaaaaaacaaaaacatagacgtttaagtaaaccagaagactagcatttgaatcctggcttcccaggccatgtaactatggagacagtcttcttaagcagtctgaatttcagtttgtttatctgcaaaatgaagttggataataatacttatttttagatgtttggtcaggattaaataagaaaacatgcaaagcacagtgtttaataggaggcacgtagtgtgttattattattagttattgtgggtgagatggtatattagtcttgtcagactgccatagcaaaatatccacagactggctggcttaaacaacagaaattaattttctcacaggcctggaggctagaagttcaagatcaaggtggcagcaggggtggtttctggtgaggcctctcctcctggctgccgccttctcactgtgctctcacatggtctttcctctgtgcagaggagagaaagagggctctggtgtctcttcctctttttataaagatgacagtcctattggatcagagctccacacttataacttaatttaaccctaattacctccttaatacagtcacattggatgttagaccttcaacatactaattttgggtgaatacagttcagtccataacaggtgggtagctgggaggcgaggaatagaaggatagaaggggtattttaatgtctacggtagatttttttttaaggcatcgctgctggaggaaaaaacccatcagatattcataatacatttgtaggtatacaatatatttggctctgtatgtcatagaaaacatctccatgctatctattaatcttttaggtgagcctgaatttaaatacattgggaatatgcatgggaatgaggctgttggacgagaactgctcattttcttggcccagtacctatgcaacgaataccagaaggggaacgagacaattgtcaacctgatccacagtacccgcattcacatcatgccttccctgaacccagatggctttgagaaggcagcgtctcaggtgagtgccaggcagctcagatcaggcgtgctttcttcattttctgtatgtttgtacatacatgtttatctaaaaattatgccctcgcacaaagcttacagatggtgcagtggagggcataagtgatgcattcattattcaactcaccagtaagaaaatagtttagaatgaaagggattatgggtgagtttttccagtgaagactgcaaatcagaaattgtgttaagaagttaatgttctaatagtgttctgttttatgtttttcaataaattattcatccatttttgtgactaggtaagttttgttttaaaaatctacaaatataaaaaatatctactgccttttgttgaagagtaacgccatgggtgtatgtggatgagccagtgtcacagcgccctctactgaatttaaggaagaaatacttttggccggaataatgttttactgatgtttacttggtttttacatacgctgagtaaagttaaaaaacaagcgaaaaccctacctcttaactaaaaataatttaatatatcttcgctgttagatgaactggaaagtaatgcctttttaagagaagatatatggtgtgtgttcctattttattggacggggcgggggacattatatttgctgttttctacagtttaaaataattttcttagtctatgggaacatgggaacacattcaagttaatatttagcatgtttatctacagctaaaaaatccaatgacatagtttgacattgtaagaaacccagccaatttctgtaaataaatataaaattgatacgatttctaaagttatgagagaaaaattctagtaatatataaaattaaattatttaatattttaaggtaatattcagaatttttagacacatgggcaacagattatcattgctgttttctgtcttatagatttttatccctcacagtctaaggtatctaaacttccatgacttaaaatatgtgggaaatatatctatatcatgtgatataatttaacagtaaaacaagaaaattcacattataaaatgaaacaaatataccgaaaatttattagttttccagattgtaccattagttaaatgaagagtttaaacgggagagaaattcctcaaatcataaagccctagaacttttgttctaggttcatattttttcatgaagactataagagggagacatgttattagtctataacgcatgttaaattcattttaagcttctaatctttagttattcttctaaatatttaaaaaataggttgctgtgatttacagaggcaatgaatattttacttaaatctaattatagaatgatatgctttgaaataggtcatttataactagtgaatatatattgtgaaatttgataaatatctctttatattattaacatttaaaatattattcatcgaacatattttcaaaatacttatgacaagtacagtgatgcatctcttaataatggggaagcattctgagaaatgcaatgttgggtgattttgtcattttgtgaacattctagagtgcacctacataaacctgcatggtgtagcctactacacacctaggctatgtgatatagcccatggttcctaggctacaagtctgtacagcatgttactgtactgaatactgtaggcaactgcaacacactagtaactatttgtgtatctaaacatagaaaaggtacagtgaaaatacagcataaaagataaaaacagtacctttggacagggcttttaccatgaatggagccagaagttgctctgggtgagtcaatgagtgagtggtgagtgaatgtgaaggcctaggacattactgtacactactatagaatttataaacactgtacactcaggttacactaaatttataaaaactatttttcttcctgcagtaataaattaaacttaccttactgtaactttcttttttttttgagatggagtctcactctgtcaccaggatggagtgcaatggcatgatctcggctcactgcacactccgactccctggttcaagctattttcctgcctcagcctcccaagtagctgggattacaggcacgtgccatcatgcccagctaattttttatatttttattagagacggggtttcatcatgttggccaggatggtcttgatctcctgacctcatgatccacccaccttggcctctcaaagtgctgggattacaggcgtgagccactgcacctggccaccttactgtaacttttttactttataaacttttaaactttaaaaaccttttggactctttgtaataacacttagattgaaacacacaacacattgtacagctgtccaaaaatcttttctgtctttatatctttattctacaagcttttttctatttttaaaacttttttaaagcattttaatggtttcttagtttttcaaatgttttgttaaatataagacacaggctgtgtgcagcagcttatatctataatcccagtgctttgggaggcccagaggagaagattgcttaaggccaggagtttgagaccagcctgagcaacatagcgagaccctgtctttaccaaaaataaaaaacttagcctagcatgattgtgcacatgtgtagtcccagtgctttgggaggccaaggagggaggatcacttgaacccaggagtttgaggttacagttagctgtgattatgccactgcacccaagcctgggcaacagagtgagaccctgtctcttagaaaaaagaaaaagaaactaagacacaaacacacatatcggcctaggcctacacagggtcaggatcatcaaaatgtcactaggcaataggaatttttcacctccattatagtcttatgggatcactgctgtatagtctgtcagtcgtggtaagaaatgtcattatgcggcccatcacagtactttaaatctgataccttcatgtttatataagtaaagtagtgaaaatgctgacatgggagggcattgttgaagtaaataatcttaatagttattttaaagagcattgatagggaccttaaatagaaagtgacataataataagcaactaatgatttttctctttgacttttttttttttagcctggtgaactcaaggactggtttgtgggtcgaagcaatgcccagggaatagatctgaaccggaactttccagacctggataggatagtgtacgtgaatgagaaagaaggtggtccaaataatcatctgttgaaaaatatgaagaaaattgtggatcaaaacacaaaggtagtgaccacgggatagtcttcttgggttcgtctctagcctaaggaaatatgttccaatatcttcatcatcatgaaggacagaggagtaacatcacagcttgtatggggtggttaactgtggctttaagtcaaggctggaagggctggtgccatgaaatttgtcctggcccctagaattgggccgtaggtggagaggagttggaggtgcagatatagggaggaacccagttgtaggtttcttagaaaatcaccatggccttctcagagaccctttattagctcatttgatcagctcctcctgccatattaccctgttgctccttttctcttttccagaactttctcctcccttgctttacaaaactctactttctcctacctcttctactgtctttcaaatcactactcagtttttttccctgtttcttctacctgggcataaatgctggccattttcagggtctcatctgataccgttatttgcttccctgggcttccctccttacctgtactttcagtgttgtctgttacacaaggtctcccagatccgtgcctctaactccagaccttccacagagatttatgtctctgttttactagctaacttgggttcctttaactggtggaacttgatatctcaagctcaggttgtccagaaacaaatattttcccttagaaccactattctttcatttatcccaatcatcaaagcttttgatttttccatctctgtcaccgctcaccagttaccacctctcagcgatttgatctctctgacacctcttccatttcccttcttctgcaaactcattcccctgcctcagctgagatccccacggtctcctgctgtaactggcacagtggcctcctacttgtgtttcatgtccagcctctcccaactctattctatcttctcaaattctcaatcttccagagtgacctcacacacaaattattgctcttttgcttaaaaaaccttagcagctctccactgcccagaagataaagtgaaaacttaatgtgatggttaagtatggagactctagaggtaaccaccttggtgtaaatcatggcttcatacttgctgtgtgaactttgtaaagttatttgacctctctgtgcttcaggttcttcatctgtaatatggaagtgataatatctacctcataggataaggattgaatgagttaatacatataaagtacttgaagccaggacctggaacttttattaccatttcagtgtaattttttggtactctctgttatgtagctcagggctaggtggacacatttacatatccactaaacatttggtgcatctttgaaccaatattgtcatcagtcacttggaggacaaattgagcccatcttggaggaaaggtgaagaactgctgtcagcagccctctattccttctctattgttctgggtatttctgctttcatatgtcccctacatgtagtgtctttcctaagtgagagctcgcaaagtaccatttctccatttcattctagttgctgggtcattccagcagctcttggcccctggaagctgccggctggtttattccttaagctggcttcgataccctatagactcaactcataccaactcttttgtgctcctaaacataccattttctaacaattttatgtcttcagatgagttgctgctccaactgtctagaattctcttgtctttccttccatgccactccctctgtgaagtcatcctctactcttcaagacagattcttttttcacatgttcttcatctatacttccagtatgggcttactgttacatccagctttatgtatgttatttgtttatacacctgttttcccctttgattctagaatttgatcacttgattgtaagaattacgattaatatttgattatgacaggcagtaggctgagggcctgttatgaataaacacaatccagctcagcaaacaaatcacaatatctgaaaaagagggccactgcaagtaagcagacaggaatccagacaagtgttcatcatggggttgggatgctggatgaaggatccaggagacagggagccttagattattggtttaaacttttaaaaactctcctgcctatatatgggattcattgcagaaacatgggctgagcctacaggtgggggctggtcttcttagtggtggcaaatccatacaggtcttcagcaacctcaattcttgcctcctcagaagaattcgaccaagaggcataaggcagagtgagagactaaagcaagttttagagcaggagtgaaagtttattaaaaagtttagagcatgaatgaaaggaggtaaagtacacttggaagagggccaagcaggcaacttgagagatcaagtgcactgtttgacctttgacttggggttttctatgttggcatgcttacaagggagcaggaggttgtgtgtcttttcccctgattcttcccttggggtgggctgtccacatgcacagtagcctcctagcacttggtaggcactgtattcacagtgtgtttatcgaagttgtatgcatgctctcttgagttgttcttcccttaccagttgagtgttcctactaagtcacataccagttaatccgtgccattttgcctcttagtatgcttaagcccacttgcccaactcctgccgtcttatcaggaagccgatcaccagttttaggcttttctgtctgttgagggactgcctttccctggcacttgctgcaaccaattattatgttacagaggcagtttaacaaccgcttgaccatcacctgatggttgcctgacattcctggtggttggagggccctctcttgtcctgctcatgtctgactacctacctaccataacatttcccccctcaagaatccaagacctcaattctttgggaaaaatggataaaggtcagtcttctgtaactgcttcctactgatagaggggtggtggtggttgttttgtgggtcttcacctcttgctagctgtcagggtaggatggctccatgggttggtaaaaacagtatccagccaggctggagggagaaaggggtggaattaagcctctgtcatgtcttgttgatgggaagtctaggggtcctctgtagaagggtgactcttgaatactgacatgatggtgtctctcactgaggatcatctggagcttgatggcctgaaggcaagaggagacgaattagtttattagatttagaagaatgtcaaaatgaaataagggagtgaggacaactccaaaaaatcctgacgctgccaacacactcaggtaactggtggctattttcgtgcctgctaagacttgtgtggatggggttacaagccaattccaatgtgttcccagaattagaatattgatccagatttttacattacccattcctcttgtttcttctgagctgtggccagagatcactggttggttcacaggaataaacagggttagtctaaattgcagacaaaaactcaaaaacaactgctgagaatagaatctaataccaagttattagattatagtctgttatgttcttgaaacataacttttctctctccagtcctcatttttattaaaaacaaatcatgataggactgatttgtttgcaaaataagcattagtcctatcatacttggcctggttatttgcataaagcacagcaagaataattatttgccatataggctcctttttaaattggctttgatgaaacttcattccataaggtatttcagataagacgttttaaatgccttgagcccagccatgggtttctgccatcaaatacctgtatgaattgggtaaattcctctcctcttgaggtcctaaataacctggggctcctaggcctgtcagaaagtgacattctttactccccatggatcaggaaccctgtacagggactgtgtagacaaggtatgagaccagttttcccaaggggtttttattggctctataagtcaaatttgattccttaaaggagagcatgccattccagtcaaacccttggtaaaataaccagtttctccaattgtgccttgttgcaaaagaaaacagattactattgcacttatgcaaataactgtattgccattagttaagaatacccacaaatagtttccaaattctggagaaatcaggtagagagaaatatgctccaaattttgtttacaggagtacttatttttaaaagctgtaaatagctcaaaagaaagttttcttgactttgaaaaacaaaggatcagcaatgttttaagcaaaaagtcataaaaggattattttagtcttcttttagttcagtccatgcagttaactcctgttctgcctggtatttgtgaacatttcagctctccatgagagtcctgaaagttctttctctattctaatgttacaatctttaaagttatcagcaacctgcattcaagagtgcctgccagagtcctatagctgattataaaggccaccttttaaagaggattaaaacaagacaacaattgtgaatgagaaaaagtcttagggcagccacagtcaaagacacagttgccaagaaaatttgttatttctgtggcacacaattatgtagcataacagttataattattactgacaatgtatactaagttatatcagaattataggagctttgtataattttggaacacatacaaataacacatttatgaagagtagatcaatgctttactaaaagtctgttgtgcttttcaatttgtggaaaaactgaacaatagttctttaactttagccaatatgattaggcatagaattttttttatcagattgatctttcacaaaccttccacaacttgctcaaaccttcagctttatcctatctaactttaaaaaatcctttaactctctaaactaggtcaaaaaaatccacatttttatgcctttttatataatcttttactaaaaccacattctactttccttacatgccttgcatataaaagttttccagtagtctcaagaacatgttacactgttaactcttagcaacttttacttttggtgaaaaacctgctaagtaagtgattctgactatgtactaggtttgcagcttaggacactagacagaaatgcagaaaaggtttgactctttctagcatctagggggcatgggtaactctgtatgtccccgggcctcacgtagctttaaaggcagcaagttgtacagttaggagtcaaagtagcagtttatgaagcatttagtaagcctaataacttttaaaactgtataactttttaaaaataaattctctttcacagatcttttcacaacttacacagaccatctatgacatgcttggactttctgatttgtcccaaacattcctctttttaaacaaccagtcatttaatttaggacaagaatttaccatacaagatcctttctcatataaaacttctgttctttataatctgccttaccaaaaatacctcctctttctctttatagcttttgaattatattaaagtcattttctttctgttaggaagttaaggtttgtactgcatgttgctgtgtgaggattgtgaagggggagcagagaagaatgaggttatctgcatactgcagaagttatcccccctcaagagattgctcagttagatttttgctggggcttgtctgaataaatgtgggctatttctgtatccttgaggtaggactgactaggttgaagttattagttaaacatttaggtaactttccagaagaaatagagctattagagggaaagatgaatttagagactgggtaaatattaatcaggcacccatcttggaaagcatatttttgcccaaaagagtgtgaatcttttcttttggaaggaggaggtgccatttgccccattatgtggcagaatttggaggagagttcagagaaggagattagcacagagtaggcagctcttaaatcccaaagggaaatttataattttactcctccaggagtttctcttagctttgtcttgtcaatgacttggaagccagccagagcagagagccccttcagctcaaggccattaggcattgggactctgtcccagagccctttggccctcagggcatccaatttccagtagctaagcttgtggcagagggggcaagctgtgctaggcttcctctcatttgtcccattggggcagtttgccttccagtggcctggcttcccacaccaatggcagttacctgaaggagtgtttttagggaaacctggatgggggctggagagcttataaagcagccaataattgagcattcctcttgtttctgcatttttccttctccttatctctatcctccttattatgctctcagttataaaagactgaggaggctgatttgagggtttcctgcataagggcaatgggttccaaggctgacttttgtattttctcccagttcatttttaggccaaacgatattacaaaggaaagctagttttgttttgttttaagctttgggggagtcaaatgtttctgtttttggggatgcatctgaggagtatatcctgtggtatagagacatggttacccatctgtaaagagggaacagaggagaaaaaaaaggaaaaaggaaaacaaaggcatcccctcttactttcctgttatcctagataagcatctcccattcatccttagggttctggaatgaaccagtcttaccgtgtacccattaccttggttccatctcatcacaattacccacttgagaacagaagagatactagagtaaacagtgggacccttgttcatccttgggactctggaataaccgttcttactgtatacccctaacctttccttcatctgttttaatggtaatctgttaacctagaaccaaccttcatgtctgtcatatgggtcttttgtgactgcaaccttgggctggcctatgtccttgtctccatgacattatggtgactctcactcagagcattgtagcaacaaaatgattgtctcttttttcagatttccttcccatgttctttaagtagatgagaagcctgtttttcagctaactgccacaagatggctggatttccctcccttcgaatatgaccttgaaggtcttggtgcatgttaagaagggcatggaagtgattagagaaatggaggctatgggaggaagtgagataaatactcatggaaagctttcatatgcgagtgaaacggcaacatttatttgccctcttaacataaagtagtaacctccggaggacttgaggcttgaggtaagaactcacaagtggcaaaggaagaattttccctcctttcaaaggagtgttaactcaaaaaaagcaaataagtgagatccttaaagggccacagtgaggacctatgcagacacacaaagtacttaaaaagtcactggaaaacagccctggagggtaacagggacaaaaagtatacaataaatcataagggctgggattccaatttgtatctatcctggcaatgcgccaccagacaggggatgagttggaggtcatctgagctggtagggtaaaaacaagtataaacctcaggggatatttgcaagggagcctatgtctttgctgctgcacaaatgcagcaagagccatgggcacacaaataacaaggagtgtgtgtttaagaagttacatggcatgtgacgtgaaagcaaacaagaggcaggcttgcccctgaggcggatggtctagctggtgtacaaggccatttgagaacacgaaggagaataggaggtgaataggtggagtaaaaaggagaataggcagtggttttggggaaatagccaactttagttgaaaaagcagaggaaaccccagacattgcagtgttaggctttagttctaccactcttgtaagcctcctgtccaggagggccattagtgtctgagttctactcggtgtgaactccgagttccttccacccctccgagccacccattagagtgaactgaaagatcagctagcgggagcagagccattgtggctgagaagaattgttctagtggttggtcagtaagcaggagagcaaaaagagagaaggaaactgcatacaggggttgagtacctccagccaaagaaggtgaggcatagaggtcctttaccactgggaaacatatccaagtcatgtggcacaaaggtatgttaccagtgatgaatccatatgggtttgcagcaacctcaattcttgcttcctcagaagaaagaattaaattgagaaacataaggcagagcgagagactgaggcaggttttagagtagcagtgaaagtgtattaaaaagctttagagcaggaataaaaggaagtaaagtacacttggaagtaggccaagcgggcaacttgagagatcaagtgccctgtttgaccttttgacttggggctttataggttggtatgcttatgcttctggggggttgtgtcccttttcccctgattcttcccttggggtgggctgtctgcatgtgcagtggcctggcaacacttgggaggggcgcttgcacagtgtgtttactgaagctgcgcacatgctcacttgaggcgttcgtcccttaccagtccagtgttcctagaggaaggtcatataccagttaaactctgccattttgcctctcggtgcgcatgtatgaacccatttgcccagctcctgagatcttattgggaagctgctgatcaccagtttcaggttttttaatctattgggagactgcctttcgctggcgcctgctgcaaccaattattattttagagaggcagtttaacaacctcccgcccatcacctaatgtttgcctgacattcctggtgttgggagaaggccctctcctgccctgctcatgtctgactagctacctactgcaacagtctgagacaaaggctaccaaaggctgaggacactggcagaacctgataagtgagtgacttaagctttcctgcttctgagtcatggatacacgtcactgtctcagcctgaaaattatctttcatgggagagggggagccagaaaggcggcaggctggggtaaccccaggtgaaagagggcagtcctgtgtggtaaaccacgagggctgagacagaaatggaaaacttctggaagcggagtccccatattagcctacaagctttccccattgcttgcattgacttgcttgtgctgtctttgttaaatctgagaaatgaagaaaataattccttccacctatcatagaagaatggtgaaatcaactcaggttgacaggatatttgattgtcaactttgtgcaagcaccattatttctagccagcactaccttcttctccagctgaacctgaatatttgcataatctctagattagatgtttttgtatttctagcttaggcaatacttatttaaaagaggcatgttcatggtactattttttaataagagcttttgtttaaaacaaactcagtgtgacttcttttcataaaggtaaattaaagaaaaatacatgaaaatgaaagattagtccctttttggaacataagcaagatttgtttactttacactaaatctttagtaaacttacttcataatcatggggtgatattgcctatgtctggttcatcacctttttccatttttgtctgtaagtgtgagacagtgttttgacccagcttggtacaaaatatatagtaggcagttcattaatgttattatacattcctcttccctcttccccttctcagcctaatatctgtatttgtatcccttatagaggttcttaaatgtcaagatttattcttctgtttggtggaacagggaatcaaatcagattaatagaaaatagaaatgcagattcctcctcctttgtatagctgtgagaaaaaaaaaaaagaaattcatattcccacataagctgatccaggcctggggtgtgtgtgcttcaggagggggtggtgggaaggaagttcattcttgcaaagccctccagatgctggaggtagctgagacacatccactcgctcgagatccatgctctccttgttcttctgaacttctctgaataaaaagctctctcttgctctcccagacttccttctctaagtcgtttgtcatcggctcttgagctcttcagcctggtcacctccactgttatctgggctcagtacatgagccttggcctgaaagcagagtcaattaaaatatacccagccatttattaagtttaccctgactttaatagctagagttgtgaagaaaactgaataaatagagcttcaacataatttaagaaccaaagacatctaattatagaacatcatatttgagctgtatttataatctttaaatggaaagtttaaagaaaggccacaattgtttctagtttctattaaaggctcaattttaaaggtactccaaagtcttctctgtggatcagttaaatatataattatagtacacaggggtctcaggatttagtcagactaaaagattctgttaatagtcaaagggaaatttagtttaatttatcaaattgtagaatttgcttgcttttgaacatactggtaacatgcatataagcaattgtgtatgatgtaagaactagtaataggctaaacctgatagcttcacacaactttgtgtatttagggctgtatctttcaatttgtttcaagaacagtttcttttaaaagttttttattgcaaaattcatattttattacaaaaattaaaacatgcaaataaggagaaagaagaatccattaccctacaatcttcagtgaacaccattaacattttgatacgtacctttcaaaattattttttatggctgtatcaacctgtaaatatatggtgcatactgtgcaagccattctgaacacttttaggtggataacaaacacaggaatacagtctgccttggcatggctttgcctcctaactcccactaaaaccaaccctccctctcagagagtattttccttacccccgacagatgggccatgggtacttccaacttctttatttttactactcttttctcttttcttctcctaccccaattcgtccctggacttggtgaagttccacctccttcctgaagtcctcaatgattctccaaaccatggtgattttgcctcttctgaacttattgaaatgtgaatatttgtcaatatctgccattgggttaaagaaaatagagggaatgagagatgtacaaagaagaggaggactgaaaataaattcaatagtaaaagaaaaacttttgaatagaatattatagaagagtgtgttaaactcatctcatataatattcatgtcatgttagcaattggatataaaaaacataaattcacttaaaaaagcatatgcattatagagtattttgatttcatctcccatattagttatttttaggttgatttaaatcaaaatataataagagtgtatttcagatccctgtggaaagaatgcattattgaatacatggaattgagacaaatccatctcataaataacagcatagatcaaaataaattctagacactacaatttaagtttaaaaagtatgaaactagaaaactttcgtaaggatgtaatacttagagggggatagaactttctaaatttcttgtatagacactagcacatagtggtcacttaatacttattgaacgaatgaatgaaatggaaaagcaaagagaccataaagaaaagatcaataggtttgatgttatgtacttaacataaatatcttaatgctctgtattttaattacaaaatttgaaaggcacatgacacacttagaaaatatttatagtgtgtaggtcagagctaattttttttactaaacaactcttgcaagtcaaaaagaaaagctatgcatttctcccagcactttgggaggccgaggcgggcggatcacgaggtcaggagatcgagaccatcctggctaacacagtgaaaactcgtctctactaaaaatacaaaaaaattagccaggtgtggtggcaggcacctgtagtcccagctacgcgggaggcggaggcaggagaatggcgtgaacccgggaggcggagcttgcagtgaaccaagatcgctccactgcactctagcctgggtgacagagtgagactccgcctcaaaaaaaaaaaaaaaaagctatgcatttcaatagaaaaattagttaaaccatataaatatgtcacagaagaataaatagaaataatctctaaatataaaaaacttctagttttattagttaattaaaataatgcaaactttaaaaattctattgtcattaatcaaagtgacacactttaaaacacataataattccattgttcttaaaaagattagagatggaaggtttattatactgttgctggttatatttctgtaccttacaggaatgcagtttggaatacatttttaaatgtaaacagttttagctaatatagattttaacttaaaacatttttagctaaaaacgtgcttagcttttggtcaagtcattcaatttctagggatttctctaaggaaagtacagatttggacaaatggtagctacaaaggtgttcatagtatttttaatttttaaaatataaacatcccagtatcacctcttggagattactagtactagtgtagtggctgtgtagccggcctggctgggcttgagaccagcctctgccagtaccagctgagtggcctcatgctgttccctaacttctctacatctcagtttactcatctgtagggtgggggaaaatgtagtccctatttcatagagtaaatgggagaattgaatgtctgacacagaaagtgtttaataagtattagctatcattttattagtatttaagaatggtatatccagacattggctgccactcagccattaaaatatcattttagaagggtatttaataacatgaaaaggtgttcattatctgttttcaagcaaaaaaagcagtatataaaatggcatataaatgatcacatttaaaaattatataaatacattgggaaaagactgaaaaagagatatatacaaatgttagtagtggatatctttaggtggtaaaattatgggtaattttaattttcttctttgttcttgtctgtctctacattttctacaatggatatatatatatatatatatatttttttttttttttttagcaaaaataagatctaccaaccaaatgaaaaataataaaaacaacctcctactctaaatcacacttttccacagttaacagtagcttatgtgaaaataggataattttaatagactaaagctgatacactagaaacagcgtgagccttagggtttcactgactggatgtgaactcttagctgtgtgaacttagatatgctatttaacacacccaactttcagattcctccttgtgaaatgggtatgaatatctttgcatatccaatacgaatgttgaagtgcagtaaaatagttcatgtcagaactattcataaacagagcagagctatacaaatatgagatcttataaccatcaaaccctactgatgccattagattttctgtcctaaagaacagcatggatcacgttgccagtaaaatcttttcttttcatcagagaagcacttggggtttgagagtcttcctagttgctattaaaaactcattgcataaaagtatcaagcttttggctccacattatttctttggtatacatttcttttttcctttgttttgcttccaagatatgaggggcagtgaatcattctaaagacttaacatgaattcttgaaacttgcctttattttaaaatttaagatgaccattccaaagtaaacatattttacagtccactctgaaagagactcaacctaatattctttgataggaacaatgtttgaagtaattgagggaagttgggaaaatagtaagcaaaatttggaaataaactttaccacatgtttgaaccaccacagaggacaaatcttgttctgcagttcaattattttcttttctcctcatattatccttaactattcataataacaatgtgtgaaccactacagatcagacagcgatgtcccaaaatttgtgagttgcatgctggttttcaagttacaaagagaggataactggcagcccacaaaaataaaactttgaaagaaatttaaacacttttgaaacattttttattaaaaatctgagaaagttagacatgaggaatactgcttttgtaggaacctttattttttctgtgaggacaacagcaaaatagttgaaatatgaccagctttcagttttttcctttacctttcctatgtcttttctgtcaagtgatcataccaatgattattaaatttataatccttttaatctctcatctgaacagcttgctcctgagaccaaggctgtcattcattggattatggatattccttttgtgctttctgccaatctccatggaggagaccttgtggccaattatccatatgatgagacgcggagtggtaggtattctttctgcttctcttattggttcaaagtttataacactgtacaaggttttataagatgatttctgtaattttttttaaggaactgaacattaagtgatttttgcctgaagaaagaactatgtttaacaggaagctctcctaatcatttcatatggtgttggcatatctatttggcagaaaaggactcactttttcaataggttaggtgaagagaaacgtgatcttgacagtacctagccaacagaaagggagaaaacacacgtcataaacttgggtcactcttggacactgataaagtggagagattacagaagttgtgtaggttcatgtagaagatggcttaaacatgggggcagcctcttggtgcttgatcaggatccctgtggatctctacatgtgtcttattgtgttgacacagttttgcatttggaactgtttctggtggtgtcagggaggggaagtggtgctttggctttctctaactagttttagttaagcttcagacaaagcaagctttagccagacagatattttcaaattgttttttgttgctccagggaatttcctgctttggatctattttctggggcctttgaagagttagctttttgtaaaaacaggatgattagtttgtttttttttttttaattttagattcggggtacctgtgtaggtttgttacacggatatattacataatggtgaggtttgggtttctagggtacccatcaccaaaagagtgaactcaataggtaatttttcacccctcacctcctcccatcctccccgcttttggagtccccagggtctattatttccatcttaatgtccaggtacacccattgtttagcttccacttataaatgagagtatgtggtatttgatttctgaattatttcgctccagataatggctcctagctccatccatgtcgttgcaaaatacatgatttcattctttttaatggctgcttagtattgcatagtgtatatgtaccacattttctttatctaatcaaccattgatggacaattaggttgattccatgactctgcttttgtgaatagtgctgccataaacatatgagtgcacatgtcttctttatataataatttcttttcctttggatgcatactcagtagtgggattactaggttgaatggtagttctatttttagttctttgagaaatctctgtactgttcctcatagaagttatattaatttacatttccaccaacactggtgggaatccacgacaacatctgttgttttttgactttttaatcatagccattctaagtcatgtaatatgatattgtggttttaatttgcctttctcagatgattagtgatgttgaggatttttccaattattttgactgcttgtatgtcttcttttgagaaaagtctgttcttgtcctttgcccactttttaatggggttgttgggatgataattttagatattggaaactgagtgttgaagaacgtctttggggaaataacattgttaaataaatttgaagactttgtggtttgttgataattgggaaacttgtaggcctgcataatttataatgcatgaataagaacacagtgtatcaaaatatgttatttatttctataatacatacaggagatttaaaaaatataaaaccagatattgaatggtatatatgagaatgattcatagtgggtatgaggttagtataggtacattttttaaattaaagatttaatgataaaaatcttcctcctattctcccaggcctagtttactatgactttattacctttccctgcaaagctttcaactcataagtagaatgtacattctacccaatttctactttgtagtattaggaatggaaattttgtaacttaaaactaagtgtaattatttagtatttaaattttacctctttcccatagttatgtagctaaaaaaatacatcaacaatacaattactcaatactgaatcactctttagaaaacatgctgtgctgcttggtctgtgtctgtttctttaatcttgtggatttgttttctaggtagtgctcacgaatacagctcctccccagatgacgccattttccaaagcttggcccgggcatactcttctttcaacccggccatgtctgaccccaatcggccaccatgtcgcaagaatgatgatgacagcagctttgtagatggaaccaccaacggtggtgcttggtacagcgtacctggaggtgagtttccattgtgctctctgattatgtgattgtagcttatttacaatgaccatttaggtttagagagtgatttagatttagagaatcttcaatcgtcctccatcattaaaaagtagactgaatctatagttcttccattaaagtcaactttttgcgtgaatgattactatgtataattttgtttttgtggattttaaaaattgtgatgctaattgaagagatacaggaaatgaactgaagacattcatttggaaaataataaattgaatattgttaactaccctactttccaaattcaagccttagggaataagatggcatccttagtttatgccagtcatgctctttcactgtaggtaaatatatattttagagggcttgttttggcttttagcataacctggtgcacagtacttttgtattaaatgatgggataatggggagtatttgacatggaatatttagtttatgttcactattctaataatctctatgagatcaggtagctttttgccttttagtctgaaaaggaagcagttgccatgtgggacagcagctgggggaagccccttcctaggtagccaaggaagctctcttgccttccttgtcccaaggcggactttacagagctcgtattttcactaacactcaaggatgaagagtgaaatgcgaagatatttatatatatttttacttttctctttgcctgagaaaaattttctatggcccacctggaaaaagaaaatttgttagggtaataagcaacattagctaattgaagggtattggtatgtttaatatgcttaattttgttgaattatgtgctgagaaaaatattctttctgatttttttctttctgatacatgttaattctgtttttatttatattttgcattttatccagatcagacttagtactctttccccaatagcttcagaaatatgatctatgtcaaatttaggatttagagcatgtctagtacatcagatgggaagtaattttatactttagtttttataaaaactttaatgacttcttggaattcctttttgaacaaatagtgtattgtcaacaaaatataaagtaatctatatcagttaaatactgataataacattattaacaatagtaataatgttagttaacgattacgtctcgcttaactaaacagtcaaaggaagctccgttagtcttcagttctgtatatagtgaataacattcatgtcttaggtcaggttttctagaagcagagcctgagatagggatttgggtacttgtaatttattaagggattactttttaggacaaaccctgtagggaagtgagggaagcagggcaaggaaggggatagagctaaacagggttgtggtctcaggcaaagtccagccttggcctgagccattggaagaagcctggagcataaattaggggcaggtttgtctccccttgagagaaagggaccagcctttggtggctccatatctgtcagccattggttgtggggtgccagcaggaattgggggtgagagatagcatgatgtaactcccaagccaggtgggagattctggctcccatcagcaattctctggaaaaggggtgggggggtagctgtgagctctaacagccaacacctgcagcagtttgggtctggatgccctgcctccataaaagcaatctggtgggcactaacagcatcctctgctaatttgagtcagatttaaattaaaattgttctgaatgcagaatattctctttggtgctatttgaagtattgttatcattatatcttgtatgtaattcaactcagggattgttgaattagcatatagtgtgaaaggaaattaaattctaggaccccaaattcatttagctaaagggaaaagtcaagctgggaactgggtcacacaaacctgcctccccattttggttcctaaataagatgattacaagatgaaagggtacacgcctcccccatattttgcccacagggaaattctgggtgagctgttaaaacttcaccatggccatgtaaattgatagcttatctttacaggtgcaggcaccccagcccaccagacacaaatgcgtatccgattgcccccctaccccattttgtctgcgttatcttatgtaaaatgcacattccccacatttttcctctgtcccctttggtttatgtgaaaactctgtgcttatcaatatcccaccctctcccctttcaatttggagccctcaaaatcatcttcggagagaggcatagacctgtctctggggcgcatccttaactttggcaaagaaatctcctaaaacaattgagacttgtctcatcattttccttgattgacaatagtatattgccaagactcccaatccctcaggaatacactatgatattgattgggcttaaggaataatatagtatgtcagatcatgtcacatgaagctccaagttcttctccagtagaaaggtagacttagagggatgtgcatttctttaatagatcagtggggatgaagtcttttaccctgttgtcttctccgaagcccactccagcaatgtggaaggtgggtaatgtctgcattagcactctgcagcagcaaatgcttttgcttaggaacctgagagtttgtgcttttaaggtataacaacccccgacctatgttgttcaatcccttacagcagatgatttcccttaagttttcccacaggcttcccaaatgccctggtttgtgtaccttttacttggttcttgattcagaagactagcctgtgtagagttttaggctccttgtgcatattttgactttccatttggtgttttggcagggatgcaagacttcaattaccttagcagcaactgttttgagatcaccgtggagcttagctgtgagaagttcccacctgaagagactctgaagacctactgggaggataacaaaaactccctcattagctaccttgagcaggtaaacacagtccccagcataaaaatgcaaggtttacaagcattcaaacctgtcctacaatggtcttgtaagaggagtccaggagaatccgtctggtgcagaatgaggatgccatatttggaaggcaggtgtcagcagtgtttcagttaggcttttatttgtcataggttttgtggctcaggactattcaccaagaactgactaaactggagagtatacagaaaagacgtagactctcgtttctgtttgtattattctaagcaagggcaatcctaggactctctcccaccctgatcaccgtgaggcatcccaggcagagccagaacaaaagtaaggcaagcgaggcacctgaatggaaaatttaaggaggattttaatcttaggggcatgcaagtacaggattagcacttgagagtgagtgtctctttaagttttgagctgtacaagcctcatctttctcaccctagactcaactgcatcacaggtaataataataataatgagttatgtttgtcatttactatttcccaggcattatactaaatgccttttatgtaatagttagttcatttaatccacacaacaaccttatgagggaaattatcatcatcatcattataatcatcactaaattaaagatgaggaatcagagacacagagaggctagacagctcacctgaagttgcttagctagaatctgaatcaaggctgtctatttccagaatcaccatgctgtactgactttcagaacagaagcctggatctttaccagagagtcatttatgtagccattccaatgtgatccatatagaattttgggggatctcaccatctgccagaataaaatcctttacctactcaggccagtcctctgccaaccccaccccctgcatagtatgtagacactggccccagaggcagtggcagtggaaagacctaagactctgttcattcctgcagttctttgccagtcttcaaattttatcctgaatgtggccatttacacctaaagtcaagtagagtgatgttagtttcatgtgccaacaaatagtccagaccaatctgttaaactaatttgacataaaaaagctgttaaataaacatttaagtatttatatgtgtatatgtacatataaacatatacatataaaatcaacactttttttaaagtaaaaccaggagttgaatccagtttctttctccaccattgcaaggctctgttgcagtggtccctatagcttgctatggcctcctttgaataaaggctgctctaaaaaaaaaaagaagaagaagaagcaaaatcagcataggaattcttttacacatgtcaaatatccatatactgtaataccttaccagggactgtcgtggaatagatccactgatgtcagatggtgattaaagagcactcattccactggattctttttaaatcaatggattcctgctgcatgttagcttaaaaaggtattttccaacaacaaaaactaaggataagcagtccacgatgactctagaacaactttggtgggaacccctacagaatgtctcctttgaggagagccgtatttggatggatcttctgagagcaaagttaactgaaaagtatgtttttggatagaggaagtaagatgggactgattggggtgttctccacttacatatcaaatacagtgctttttattttaataaatatttaataatctttaaatgtttaataatatttgtcttaatactccttaatacagtgcttttaattttatgtatatagtttttcaactaaaatgtattgactagtttcacatcccaggcattctgtgaggcactggggatagtgaccgtcctcaggaaggcttcacacgagtgctgtcagaaacaagaatacctaatcacaagagaggaggagagctggctgaaaaacaataaaagcttagctacaaggagcaataacagtacacagaaggggacctaaccgagtcacgggagtttggaaaaggcttcttggagccgggctataagatttactaaagttgatgccaataagatcatcactgtgatcaacaatttaaaaacatgcttagctgctgtttaaatcatctcttagttcttgagaaaaaaaataatacaaaacaaataaaacacgtcttcttaccatcaggaaaaaggagatttgtcatacttatggtagcaggtgggcatgcatccaattcatctgacagtaatatcaatttatatataaataagctaaaaagaagaaggttaaagttatacaatcctattttatgccacgcaaaataagaatttgctctgtccacagatccatgtgatctaccttgatatggcattgtcattaggatgcaaactgtgtctaagcagtgagtggtatttataaccagctcatctagcttgcatcatagaacactccagtttaggaaaacaaaggctgatgaaaaatcagtgagggctgccagaagttctgtgttgtaattgttgtcttgacaatggtggtgattagtaattgaacacctgggcctaaaatctaagcttggactagtttacaactcatggaaaataggtgattaggagatctatttctgtaattgtttgagaggaaatcccttgcagagttttaaagagatgtttgcagggactagaattgtaaagctaattagagtagagagtctgctaaggagaagagcctcccttccactcagtagctttgaaagagtctagttctcaaaattctcaaaaaatttcttaaagaatggttcatgggccaggcgtggtggctcacgcctgtaatcccagcactttgggaggccgaggcaggcagatcatgaggtcaggagatcaagaccatcctggctaacacggtgaaaccctgtctctactaaaaatacaaaaaattagccgggcgtggtggcatgtgcctgtagtcccagctactccggaggctgaggcaggagaatggcatgaacccgggaggcggagcttgcagtgagccgagatcacactacactccagcctgggcgacagagcgagactccgtctcaaaaaaaaaaaaaaaaaaaaaaaaagaatggttcatgggcacctgcattagaatcacctagagttcttattaaaaatgagtttcctctcctaccattgaatcacactctctgcagggcaggaccgaagtatcttcatttgcagcaagctatctgcgtgacactaagtacatgagggtttaggggctataaacagtcctagcaaaaatggagaatcttctggaggctttttcagccttcgctgaaactgagatgtcctggaatctggggagcaatcattgcaggcaccgcaagtgtagtaaaacagcttctccaggcatgagtgaaatttggactttcgtgatttcttttgcaaaagccatacaatctgaattttccagtctgaattcatgggggagttgacacagcccatacacttctactgagatttattactacactggaatttttcaaacagaaaagttgacatatcacagacagacatttacttctttaactatttgttaaactgcatattgcacatattgcaatataagtcttggattgcagaagcagaaaaaagtaaagccatgaatattaacctaatatatttctgcctaatacaggcaaataatatgttcttgtagtgattgatttacttactttacaatgatgtgggaattagaacctttctttaaggcttatgctattgataatttcaggattatagtgcctcaagaggaataaagtacttgggtaaagcctcttttatcagctagcatctttctaagttttattgaatggggcctcattttaagaaatttagagtttgggtctctatatatagcccttttcttcttctctacactttttctgatttttcatcttttaattcagaaagttaagttttcatgtttcatgttttccaatggctgaatttcaaactcttttcaattttggttggcttattagttatggagaaaagttagaattgaataaatcttaaatttttaaaaatatatttactctactatactggttgccaataaaatgatcattattactgtttcctatttgcaacattaaaaaattacatgttatttttatagggtgtgagagttttctttttttttaagaaaaatggcacacacaaaaaatattgctggtaacaaggcacatctttttgataaaacagtgtaccactgccgaatttattctttgatgacaaaggattacaggagacttatctgtcttctgtagggaaatagtcaagtatcataagtagcgaaagacaatttattttctatagcccgattgagtgaggcacaacctgagcatttgggaggttggtgcatattttgttgagtaatcaagtttaatgcattacgatttgatattctagatgcagtactttcttaaagacctgaagcgactctgtcacttcaaacacatattgacttagatgaattgtctttccaaaataaagagaaaagcagtttttgtagtttgcagtgtattaaataatagccagttgatgactacaacttaatttagggggattattttcaatggcagctctcccatcttctttctaaatcaacattctattttctgttatgaggctcactactctattttcagccaaaataatgttaatagatttaatgcaaaagcagtcacagtatatatctttttatccagaatgagctaatattaacaggcttttattatgatatccttgttaattgacagtagccatataatgaatacacaggtgaccaaaattgaaagagagtaagttatgaaatgcactaagactagaactttacacatattggagcaggacgagctgcagacaaaacccctcagacaccgagttaaagaaggaagggctttattattcagccgggagcatcgtcaagactcatgttgcaaaaacccagctccctgagtgagcaattcctgtccttcttaagggcttacaactctaagggggaccgcatgagagggtcgtgatcaattgagcaagcagggggtacgtgactgggggctgcatgcaccagtaattagaacggaacagaacaggacagggattttcacagtgcttttccatacactgtctgtaatctatagataacataaccgattaggtcaggagtccatctttaactaccaggcccagggtgtggccccgggctgcctgcttgtggatttcatttctgccttttagtttttccttctttggaggcagaaattgggcataagacaatatgaggagtggtctcctcccttaatatgacactttttaaaatgatttggaaggtactaaaatcttttttttgggaagcaaacaagacattaattttcacttatctatttagggaaaagcagaataaaatgcacaaaaaattcagtggccttttgtgcatgtcttgattcttaaacaatgggggtctacggtatttgctggaaaataaagagatgcttgatatgaaacatatttaaggccatttctataaatttataggtcatattaattttttggttatttttgaccttcacagatacaccgaggagttaaaggatttgtccgagaccttcaaggtaacccaattgcgaatgccaccatctccgtggaaggaatagaccacgatgttacatccggtgggtctttgccacaattggaggctctacgttatgtacaagagcataattactaattatcataattataagtcttatgttcttctaagcaaaacaaatagctcgtatctctacagcgtttctcagctttgatctggtgaagtttcctttgtgggctcaggtcaggcggagtgagtggagcccagggcggctgctgcgttagaaatccgggtgcagcagatggcgccctttcctcagctatctcgccccagagctgggaggtggtgccacaggctgccgattcttcgcggttcttcaggcaaaggaaaaggagctgctggagttaaaataccagtgactttctagtctctgttaagaagtgctaacgagctgcgaatggggagaccgaaggagggagcggaaagaggaggaaggaagaaaactgctgcgggttgtgtgtctaaaaattctcacacagtttttcatttaatccgtataataaatccgcagggattcaaggttaaacaagagtttataggattgaggtgcgatgttagtgacttccaggttttgagctccatttccatttccccagtttgaggaaaatgatgcatttttctggcaagtctacctactcgcattaataaacattgatccaggtcattttagtttgtcatttgttgggatcttttcaataatgacaactttttctttttagctgtaaactctttacaattttttttagactttgtgacaattaacctttaacttatgtcccaaaccactctgtaccatcaactctttcttaaccttcacatttatagcttggattaaaaaaaaatctttaacatttgtcctctaaaactccattcattcttcatgtatcaacagcccactaggtgccagccagtatgccagaatctgtgccaagatgtcagcccatgtagccccttagcccttagctgagagggtgaaacccagcgttagtatccctgccacaagaaacctgttagccctaatatgtcatacaaatattttattttctctacattccatgatgtgaaatgtttaggaaaatctaacctagggaataaacacgtgggaagaaattaaatcagaggaggggctctagaatactccagcttttcagggacaaggtgataataagaaggaaccagcaatagaactgacggtagaaaatgaagtgtgttgtactgaaggtagaaaatgaagtgtgttgtcctggaggctttgaagtgcttcaagaagaagggagtgaaaaagcgttaattaagatgaaccttgtgaatgaatccttggatttagcagttcagaggatcttgaaaaaatctgttcaatggagtgaatggtgggatcctgattggactgggtccaagacagaataagaaaagaaccattctgagattgagaacatgaacaaacctttccagaaattttgctataaagcaaaaagacaattgaggcactagctgcaaggagatgtagatttagaggtagatttgatgatacggtgatgggggcttaatttttttgactgtacctatttttgcaatgaaataagatgtaaagtaacaactgggaggttgaacaggatgtgtaggggtgttaggaaaaaggagaaggtgtgaagtgtctacgaaaaccttgctcttcaaagtgtggcctctgctcgcaaccttagcattgccctggggctggtcaggaatgcagaacctgggagctggaatcagatttttcattttaccaagttcccaggtttgcacccaagtttgaaaatcactgacttaggtaaatgggagattgaatggactagggtgcccagtgtattctaagtctttagaaatctaaatttctaactaggacctcagagatcctacaagggctacctttggcccacactctgtgaagattctctgaccagcaggtcttcacctggcaagaatcaaaacatgatggctgtatgttctgaccctgctgcttggggaattcatctgtctttttacctgtgttgctcctgatgtgattagaagatctatgatcgtacgaggtttattagacaatttaacattgatatctataaagtagctataagaaatgaagcctgtaaagagagtttcacaccctattcaataaaatttcattaaattccctatatatttactttaaaaatcgagaatcaaaaaaggtgaactgagctagactgggtattccttagatggcataattatgcattgtgtaattctgcatatttcatgtgctttgtgatttgatattctgccttcctacagcaaaggatggtgattactggagattgcttatacctggaaactataaacttacagcctcagctccaggctatctggcaataacaaagaaagtggcagttccttacagccctgctgctggggtaagtaatcataataatagccaaacgctataataataattaagcatttatcattgtcaggcatactgaagtgatttatatttaatcttcgtactagccctatgaggtaggcaacattgttatctcaacttaacagatgagaaaactgaggcttagcaaagttaatatgaagctctattaccatttctcagtttttgaagagatttacaagaaaatgaaataaaactttaaaaaattaaatttttatttgctaaccttgatttccatctcaatgggattatgtttcatttgcctttttatctttagcacctagcgcagtgcctttctcaataagtatttgaaaaaaaaatgatgcatataagaaaattttaggtggtaaccaaacacttatttagcatattttatgtgcaaggctctctgtgctaagtagtatcaaaaaccatatcttatttaagtagatctcatttgtttgttaggaaggtgatggtgataagaccaaaacttctcttagagcagaattttactactacctttgtattatatgcctgggaccgtgggaatacctgtaggatttcttgaaagtctaaaaagcttacttgaaaagaatttattattatttttgtttatgtacccaaaacttggagtataaatgcttgatttatgcaaacaaaatatcttgagtttttaactggtatatggttttgattgtgtgcatgtatgtctacattgggctgtatatgtattaaaatcaagaggtatatttgggtaactgaaacctggaaaaaatggccctgggaacaagttgtaaaggttcaactattttgatcctttgtctttctggcatgtgttagtgcaaggatatagtcagtgtaatcacgatccaaaataatcaggcgtttaagtggccaaatcaagaaactcttagttccatctgggatggggcctgaggggattggggttgggggctgcctactttgaatagccttttatgcggagtgtgtggcttctccctagacctgatgaagattcccattcacaaagagagtggcttggacacatacgtgcttttgtcagtttctttaacaaattcaagattctggatagcagaaccttgtggtttgggataccagcatgctgaactgtattcttccacattccctcccacattaggaaaagattcaaggctgacaggaggtgctcactaaataaccaaaggcagaaaattaactataagttacatcctctttttttcttttcttttttgagacagagtcttgctctgtcgcccaggctggagtgcagtggcacgatcttggctcactgcaagctctgcctcccgggttcaagaaattctcctgcctcagcctcctgagtagctgggattacagcgtgcgccaccgtgcccggctaatttttgtatttttagcagagatgtggtttcaccatgttggtcaggcgggcctcgaattcttgaccttgtgatctgcccacctcgacctcccaaagtgctgggattacagacgtgagccaccgcgcctggccagttacatctttttatgaggagaagagactggggcaagaattttgttgaattatatctgtcttcaaagctattaaatcaaaggacatttcaaacataaggcttttgaattttgcttttgaattttttccccctgaaaatatcttttgtttattgcaagagattttatttcaggatttactttaattcaggtggctggattgagtgtatactgaaactgctcttatttttttatttcaatttaaaaaaacacatgcagtttgataataatatgttcttgattttctcttttaggttgattttgaactggagtcattttctgaaaggaaagaagaggagaaggaagaattgatggaatggtggaaaatgatgtcagaaactttaaatttttaaaaaggcttctagttagctgctttaaatctatctatataatgtagtatgatgtaatgtggtcttttttttagattttgtgcagttaatacttaacattgatttattttttaatcatttaaatattaatcaactttccttaaaataaatagcctcttaggtaaaaatataagaacttgatatatttcattctcttatatagtattcattttcctacctatattacacaaaaaagtatagaaaagatttaagtaattttgccatcctaggcttaaatgcaatattcctggtattatttacaatgcagaattttttgagtaattctagctttcaaaaattagtgaagttcttttactgtaattggtgacaatgtcacataatgaatgctattgaaaaggttaacagatacagctcggagttgtgagcactctactgcaagacttaaatagttcagtataaattgtcgtttttttcttgtgctgactaactataagcatgatcttgttaatgcatttttgatgggaagaaaaggtacatgtttacaaagaggttttatgaaaagaataaaaattgacttcttgcttgtacatataggagcaatactattatattatgtagtccgttaacactacttaaaagtttagggttttctcttggttgtagagtggcccagaattgcattctgaatgaataaaggttaaaaaaaaatcccc

SEQ ID NO: 225 - DNA, 3295 bp, Homo sapiens
ggctccgacttggactccctgctccgctgctgccgcttcggccccgcacgcagccagccgccagccgcccgcccggcccagctcccgccgcggccccttgccgcggtccctctcctggtcccctcccggttggtccgggggtgcgcagggggcagggcgggcgcccaggggaagctcgagggacgcgcgcgcgaaggctcctttgtggacttcacggccgccaacatctgggcgcagcgcgggccaccgctggccgtctcgccgccgcgtcgccttggggacccgagggggctcagccccaaggacggagacttcgattcgggaccaggtaggaaggaggagcgcggcgtggggaggggtctcgctcagtcccgggagcttttcccggtttcccctccccttcccgggtcattcccggcagggaggtgacgaggtaggggcagagcggatggaagccggagatcccaggttcccggaatactccggctggggccttcgggcttctcctgtcccctccctacccccgtgcctcgggtttctccctccgtccacaccgcccggggctactggactgagcggcgcccaggcagtcccgggggcccttctcctgctccccacccggccacactcctggagacctaacttccgcgcgcgagtttcccacgctgcgcccttgcagtgcgcgcctgggaaggggctgcccggggccaccctgccggcaggggcgggagccgtgcgggctccgtgaggcgcctggatcggagcgcgggcccaggagagggcccccggggcagtgggtgccccagtcgctcggcgaaggcaggggagccggggcgggccgggcgcgctggagggttccgggcactcaacgcgctcgcgccttcctctccgcagccccccgggatgcggtagcggccgctgtgcggaggccgcgaagcagctgcagccgccgccgcgcagatccacgctggctccgtgcgccatggtcacccacagcaagtttcccgccgccgggatgagccgccccctggacaccagcctgcgcctcaagaccttcagctccaagagcgagtaccagctggtggtgaacgcagtgcgcaagctgcaggagagcggcttctactggagcgcagtgaccggcggcgaggcgaacctgctgctcagtgccgagcccgccggcacctttctgatccgcgacagctcggaccagcgccacttcttcacgctcagcgtcaagacccagtctgggaccaagaacctgcgcatccagtgtgaggggggcagcttctctctgcagagcgatccccggagcacgcagcccgtgccccgcttcgactgcgtgctcaagctggtgcaccactacatgccgccccctggagccccctccttcccctcgccacctactgaaccctcctccgaggtgcccgagcagccgtctgcccagccactccctgggagtccccccagaagagcctattacatctactccgggggcgagaagatccccctggtgttgagccggcccctctcctccaacgtggccactcttcagcatctctgtcggaagaccgtcaacggccacctggactcctatgagaaagtcacccagctgccggggcccattcgggagttcctggaccagtacgatgccccgctttaaggggtaaagggcgcaaagggcatgggtcgggagaggggacgcaggcccctctcctccgtggcacatggcacaagcacaagaagccaaccaggagagagtcctgtagctctggggggaaagagggcggacaggcccctccctctgccctctccctgcagaatgtggcaggcggacctggaatgtgttggagggaagggggagtaccacctgagtctccagcttctccggaggagccagctgtcctggtgggacgatagcaaccacaagtggattctccttcaattcctcagcttcccctctgcctccaaacaggggacacttcgggaatgctgaactaatgagaactgccagggaatcttcaaactttccaacggaacttgtttgctctttgatttggtttaaacctgagctggttgtggagcctgggaaaggtggaagagagagaggtcctgagggccccagggctgcgggctggcgaaggaaatggtcacaccccccgcccaccccaggcgaggatcctggtgacatgctcctctccctggctccggggagaagggcttggggtgacctgaagggaaccatcctggtaccccacatcctctcctccgggacagtcaccgaaaacacaggttccaaagtctacctggtgcctgagagcccagggcccttcctccgttttaagggggaagcaacatttggaggggatggatgggctggtcagctggtctccttttcctactcatactataccttcctgtacctgggtggatggagcgggaggatggaggagacgggacatctttcacctcaggctcctggtagagaagacaggggattctactctgtgcctcctgactatgtctggctaagagattcgccttaaatgctccctgtcccatggagagggacccagcataggaaagccacatactcagcctggatgggtggagaggctgagggactcactggagggcaccaagccagcccacagccagggaagtggggagggggggcggaaacccatgcctcccagctgagcactgggaatgtcagcccagtaagtattggccagtcaggcgcctcgtggtcagagcagagccaccaggtcccactgccccgagccctgcacagccctccctcctgcctgggtgggggaggctggaggtcattggagaggctggactgctgccaccccgggtgctcccgctctgccatagcactgatcagtgacaatttacaggaatgtagcagcgatggaattacctggaacagttttttgtttttgtttttgtttttgtttttgtgggggggggcaactaaacaaacacaaagtattctgtgtcaggtattgggctggacagggcagttgtgtgttggggtggtttttttctctatttttttgtttgtttcttgttttttaataatgtttacaatctgcctcaatcactctgtcttttataaagattccacctccagtcctctctcctcccccctactcaggcccttgaggctattaggagatgcttgaagaactcaacaaaatcccaatccaagtcaaactttgcacatatttatatttatattcagaaaagaaacatttcagtaatttataataaagagcactattttttaatg

SEQ ID NO: 226 - DNA, 5102 bp, Homo sapiens
cccccgcccccctccgggctggaccgcggatggtacgttccgcacgtgagctgggtgctggtctggccggcgacgcgcgtgccctgtggccaaacactgcctggagtgagagcaaactaccagcgcagtggggccggcgcgagtgtgcgtgtgtgtgcgtgtgtgtgtgcgagcgcggtggaggggggggaccaactgcttcacactttcaacactgcactgaagagggagagcgagagagagactggagacgcacagatccccccaaggtctcccaagcctaccgtcccacagattattgtacagagccccaaaaatcgaaacagaggaaacgaacagcagttgaacatggacgaaggaattcctcatttgcaagagagacagttactggaacatagagattttatagggtaaggtgcacgcacccttgcgaatatctgtctaggctttggtttgatttttttcttctccagaaagtggtatggagctggcgagggcagagcccctccccgaatgggtgcctgatgctgatttctgttttgcagactggactattcctctttgtatatgtgtaaacccaaaaggagcatgaaacgagacgacaccaaggtaagtgtaagttcccgatattcctcataacctgcatgggtagttaattagagccattgatttcacagtgaagctctgcccgcaaatatattccagcccctgagcttccccaactgtgaattttaagtggcttgctgggtactctcagggggatattaaacatcatacctgaatttaaattgcattgcagaacagtccagaggaaagaggtttcttgggtgtagtttatcacatagtatgttttatggtgggggggcggggggggcagacgagggtaatatccaataagtgaatgtttcgcttactgttttctcttttccatgactctcatatattaaggatacctacaaattaccgcacagattaatagaaaagaaaagaagagaccgaattaatgaatgcattgctcagctgaaagatttactgcctgaacatctgaaattgacagtaagatgcacattttcattctttgctgctctccaagggcgtgttaatagtctggtgcgactcccagaaaatataagaataaatgtaaatataagttcctgacttaaaacttgtgctataccgtacagagtttcccgcaaactggagtaggtgctcccagctgaaggcaagaaatcatttataacctgtcttgtggaaagctcaagaagtaaaagaacagtacttctttcaaagtgtttgcttaaattgctgtgctgaatggacagccaattaagccaaatgtgtgtttttaagtaaccaagtgcccgtttcttttttgcaccactgcagactctgggacatctggagaaagctgtagtcttggaattaactttgaaacacttaaaagctttaaccgccttaaccgagcaacagcatcagaagataattgctttacagaatggtaagtcagttcagggaggccagcctaccctgatgaagcggggcagcccacaggggagcagtgtcaggactccctcacccgcaccccatctctttccgtgggctcatgggttccctctcatttgttaaattgcttatactttcccttcattggaacgagcccatttcccgaagcatcctagaggctttcagcagaactcggaggaatcaggatttaaagtggcggttgcacccgctccactttggttttcagctgggaggagagcgccctctccccgctccgcacctccgccaccccgcttctctcgtcaactggtggattatatcacttgaatactggggaaaaaccgagatcactttagtcgatgcagggcccacgtgataagcagatgttttaacgtgggtatgtttcttcttgcctccactcctccgtcccccacccccatcccttcctcatcctaggggagcgatctctgaaatcgcccattcagtccgacttggatgcgttccactcgggatttcaaacatgcgccaaagaagtcttgcaatacctctcccggtttgagagctggacacccagggagccgcggtgtgtccagctgatcaaccacttgcacgccgtggccacccagttcttgcccaccccgcagctgttgactcaacaggtccctctgagcaaaggcaccggcgctccctcggccgccgggtccgcggccgccccctgcctggagcgcgcggggcagaagctggagcccctcgcctactgcgtgcccgtcatccagcggactcagcccagcgccgagctcgccgccgagaacgacacggacaccgacagcggctacggcggcgaagccgaggcccggccggaccgcgagaaaggcaaaggcgcgggggcgagccgcgtcaccatcaagcaggagcctcccggggaggactcgccggcgcccaagaggatgaagctggattcccgcggcggcggcagcggcggcggcccggggggcggcgcggcggcggcggcagccgcgcttctggggcccgaccctgccgccgcggccgcgctgctgagacccgacgccgccctgctcagctcgctggtggcgttcggcggaggcggaggcgcgcccttcccgcagcccgcggccgccgcggcccccttctgcctgcccttctgcttcctctcgccttctgcagctgccgcctacgtgcagcccttcctggacaagagcggcctggagaagtatctgtacccggcggcggctgccgccccgttcccgctgctataccccggcatccccgccccggcggcagccgcggcagccgccgccgccgctgccgccgccgccgccgcgttcccctgcctgtcctcggtgttgtcgccccctcccgagaaggcgggcgccgccgccgcgaccctcctgccgcacgaggtggcgccccttggggcgccgcacccccagcacccgcacggccgcacccacctgcccttcgccgggccccgcgagccggggaacccggagagctctgctcaggaagatccctcgcagccaggaaaggaagctccctgaatccttgcgtcccgaaggacggaggttcaagcagagtgagaagttaaaatacccttaaggaggttcaagcagagtgagaagttaaaatacccttaaggtctttaagggaggaagtgtaatagatgcacgacaggcataaacaagaacaacaaaacaggtgttatgtgtacattcggagttcctgttttgctcatcccgcaccaccccaccctccacacactaacatccctttcttccccccaccagctgtaaaagatcctatgcgaaagacactggctcttttttttaatcccccaaataaattttgcccccttttaggccatgttccattatctcttaaaattggaacctaattcgagaggaagtaagaagggtctgttctgtggctgagctaggtgaaccccggggtaggggaaagatgttaacacctttgacgtctttggagttgacatggaacagcaggtagttgttatgtagagctagttctcaaagctgccctgcctgttttaggaggcgttccacaaacagattgaggctcttttagaattgaatttactcttcagtattttctaatgttcagctttctaaaaggcatatatttttcaaagaagtgaggatgcagtttctcacgttgcaacctattctgaagtggtttaaatggtatctcttagtaacttgcactcgttaaagaaacacggagctgggccatcgtcagaactaagtcagggaaggagatggatgagaaggccagaatcattcctagtacatttgctaacactttattgagaaattgaccatgaattaatggactcatcttaatttcttctaagtccatatatagatagatatctatctgtacagatttctatttatccatagataggtatctatacatacacatctcaagtgcatctattcccactctcattaatccatcatgttcctaaatttttgtaatcttactgtaaaaaaaagtgcactgaacttcaaaacaaaacaaaaaacaacaacaacaaaaaacaagtccaaactgatatatcctatattctgttaaaattcaaaagtgaacgaaagcatttaactggccagttttgattgcaaatgctgtaaagatatagaatgaagtcctgtgaggccttcctatctccaagtctatgtattttctggagaccaaaccagataccagataatcacaaagaaagcttttttaataaggcttaaaccaagaccttgtctagatatttttagtttgttgccaaggtagcactgtgagaaatctcacttggatgttatgtaaggggtgagacacaacagtctgactatgagtgaggaaaatatctgggtcttttcgtcagtttggtgcatttgctgctgctgttgctactgtttgcctcaaacgctgtgtttaaacaacgttaaactcttagcctacaaggtggctcttatgtacatagttgttaatacatccaattaatgatgtctgacatgctatttttgtagggagaaaatatgtgctaatgatattttgagttaaaatatcttttggggaggatttgctgaaaagttgcacttttgttacaatgcttatgcttggtacaagcttatgctgtcttaaattattttaaaaaaataaatactgtctgtgagaaaccagctggtttagaaaagtttagtatgtgacgataaactagaaattacctttatattctagtattttcagcactccataaattctattacctaaatattgccacactattttgtgatttaaaaattcttactaaggaataaaaactttaatatacgatatgatattgtctaataattaaaaaagacataatggatgctcaattagttttaagatatctataactatagggatacaaatcactacagttctcagatttacagcttttttttgtcattggcttgatgtcacacatttccaatctcttgcaagcctccaggctctggctttgtctacctgctcgttcccaatgtatcttaatgaaaagtgcaaaagaaaaacctaccaattaa

SEQ ID NO: 227 - DNA, 5475 bp, Homo sapiens
cttttgaatgacactaaagcatgtagcaggcctatagaatgagcatactgtcaaaaggcattaagtggaaaaccctccctgctctggaggcggggattggttctacaaagcctcctgtcatgccagtggccaactagagaagttggagctttttcgttgtttttttttttttccctcctgtgacatgtgctttagttgcagtggaaaggaaatgtgtcatctgtggtttggttttaaaagtggaaaactagctgcacatatccttttttactgcagatttactttaaggctcatattctccaagtctattctgctttaaaaagaagacaagaaaagaagtggtttatcaaaatcacgttataatcagattttgaccaagcattttgtaaggtaggtcatatatatacggcttttcttatgccttttcacttctaacgtctgacagattagtgttcgaggaaatgctatcaaagtgtgtaagaatctcactaacaaactagaattgtgactgaaaatgtatactttttttttctgtcctgttacataaattttaagttagaaatgaaaaaatttgccatcgccatggagttttaaattaggattacgaaggatctaagtttggtttcctcaagtaaactggaaatgttttgttatttttcaaaagttaaaaaataaatttctcattactaatgcttggacattacaaattctactgaaaataaattctactgaaaatgatcagatataagaaaacttctgataacacaacctggcctccaaggcataaactggagtaaaaacagtcctcaattctcaggcatttgtaagggcaagagaaagtctcattttgtcatacagtttgtttatttgggcactgcagtacatctggctgaagacaatcaacagcaggcctattatctgttccgtggtaagcactgttaaaatgtgtaccaatactatgatgtatactacactgttaatgaactaatgtgaaaagaataatctactttaaatcattctagcatctaatacagaagtccagtctagtataaaaagatggaaattacttgctaatccaatttcaagtatttctttttgtggaagaatcatgaaatatccaaagatttatgtcactaaacttaaaaattaaagctgaacactattatacaaaagccagtgacttgggcctttaattgtctactaaaggtcataatctaaaaagtaatcttaatcctggaatatttaatagtttttcctccctactattaatatgaaatatagtctccagttagcattgtttattacatgctacttttgtttgcataactcaacgtatcacatttcttattttcaatttctgtattttaatagtatacaaatgtcagccaatgacatataacaaccatttcttataaaaccttgatgttcaaaagcctgactagcagtggcatccatgttgcttaggagttggtttggaaacaaagactttcaggccctacctatactagctaggtaagaatctgccttttttttttttttttaaataaaaggactcctaagtacatttgagaagaatttctatagcatacgtagggttcttaaccaggcaatttcatttagtaaatctcaggagaacaatatagttttgcttttagttcattcaaataaatgctaacaataaaatactcctttcaaaagtagctcaagacaaactggtatattattataagataccttaataatgattataaatctttcctgctgggttagcagtacatggaactgttaaattctaagatatgccatttctatttaaatcaatcatttggtagatttaaaaaatgtataatataacttgtctcctttttgtactagtttccagcaagctcagggccaaagcggaaattcaacattttcaattatctgttgagatgcttataacctgccacttcatcccaaatcatcaagatcctgatgctctatttctattttattacacatttttttttacaattatgtcaaaatcagaaaaaatgctaggtataaatgatgctttaaaagaaaacccagcaacttttgttgaacttttaagtctactcagaggaaatttgctgtttttttttttttttcttcagatttttaggttgagaaaactggtatgcctttgccttcagaaagacacagtcagtccagggaaatataaatgaaaagagacaaccaccacagtaaaattgcgttcacaaatacacttacaaatgtatttctaagtaccagctttattctaagcttcaagatgaacacccaagaaaaaaaaagaacaccttgaatttctatttgaagttcagtttcttttggttgctaccaaacttcccctctttccaccaaaaaaatttgcatttatttcatacatgaagcaagaagctcaaggccacatttcttctgtaaagattggtgacaggttagagggtgggtagtttctgtaagaatgatccttaatttttttttttttttaaagaaggaatcagaaaagtaaaagcagaactaactgactcaaagcagaagtctagcacgcttcaaaggaagaaaactatataaagccatgatagtccacttaaaatgattaatatttatttgtaatgctaacttctagcatctaaaagtgttaatagaaattaaaatgcttcttcatacatagctgaatagaaaagaaatttagttgagaaggaattcagggtagcgaatattaggcataagcttgtagtttacttgtaacatctcaacactatcttttaactacaattaccaaaactaggatccattattctttcacaaactaacaaattatattgctatcccaacagattgccaagcatgcccacggacatggaacacacaggacattacctacatcttgcctttctgatgacaacagttttttctttgtctcctggaacaaaagcaaactatacccgtctgtgggctaacagtacttcttcctgggattcagttattcaaaacaagacaggcagaaaccaaaatgaaaacattaacacaaaccctataactcctgaagtagattataaaggtaattctacaaacatgcctgaaacatctcacatcgtagctttaacttctaaatctgaacaggagctttatataccttctgtcgtcagcaacagtccttcaacagtacagagcattgaaaacacaagcaaaagtcatggtgaaattttcaaaaaggatgtctgtgcggaaaacaacaacaacatggctatgctaatttgcttaattataattgcagtgctttttcttatctgtacctttctatttctatcaactgtggttttggcaaacaaagtctcttctctcagacgatcaaaacaagtaggcaagcgtcagcctagaagcaatggcgattttctggcaagcggtctatggcccgctgaatcagacacttggaaaagaacaaaacagctcacaggacccaacctagtgatgcaatctactggagtgctcacagctacaagggaaagaaaagatgaagaaggaactgaaaaacttactaacaaacagataggttagtgaagaaaaatgcaaagtagcaatgagaaggcttatggagtaaaaatgaagtcagttggtatttaatcccaaagtgttgttctgattatctaaaatttgacatggtagaccttgcaatttagaatcaagcaggtgagacagggagaagtatgcctgcttaattatttaaactgtgtacttttgttttgacactgaatattttaaaaagcaaataataaaataactaagcatttgaggaaaattttaaggataaattgaggaaactgattaatagagatagcaagggataattaaataaatattccctatgtagcaacagtggttagatgatctttgtctgaatgtaattaaactttgaatagttttagtgtgtccttaaagccaagtatatgctttaacatcaaatggaagtcaaattcctaatgcatagatagagagagctaaactgtgtaatttaatggtatcttccttgctggatgtggcagaatccacaccagcttatcaaccaacacagctaattttagaatagatcctttatctttccatatggcacacgtaagaaagtgtttttctactattaatattaaattaaaacctttacttttgtataataaattaaaactcagaataaacctgtgaccacgtatatttgcattcactttattactttagagaacacattgtaaagatcaataagaaatagagcacaactaaaataaataagatttatagccacaccaataggctaagtgtaaacgcaaagtatgtttcactgtttatgattaataatattcatcttttctataaatactacttactggaacattaacaacaagtaccaaaggttgattaatttttggacttcaaggatgccaagtagcctaatgatttattaggggtgtgtgtgtgtgtgtgtgtgtgtgtgtgtgtgtgttcaaatctggaaaactgcatacttcaggttataatttaacctttaaagaaactggcttcaagtaaaataatgacttacatttaagttgagaacccccccatcttcaattaaatatattacaaaaattggtttgagagactttccaaatatctactgaaattaacacagggctaagatcaggccacatttcaaaaatctcatcccttactgggcatttatttcgggcaatatagtaaccattttaaaaatattttttatatgttttttcccaagtatgactacaatcttactctcccttctaagctagtgattcttaccctggctgcatgtcagaatcacctgaagagtttttaaaaaacaccaatgcctaattcccatgtcttccttctgatgcaactggaatggggtgaactctaagcattggtaatttttacgtaactctcaaggtgataactgctcttggtcatcaaattcaaacgtctagctattattaaaatgagaggaaaaaaataaagcatcatttttattatcaatttattagcaatttgtaaaaaacaaatctattctctaaacgagaaatcataacaatattattccagataaagttaagtgttaacaaagtaaaaaggaaagcatgagaatattcatgccagtcatggtgactgaaatcaggttatcttttgaggggaaaaataacccagattagaaatgaaactgggcagacttcccattctgtgcaaaaattgaaaatttgagattgtgcaccagtacatccaggagtaacacaaagcactccttgaatcaagggtcataaataaacacgtgtcagagaaaattaaaagaaattaatatcatcataaaaataggaaattactttcatattcaacatactggtcaaacattttctcaccagagagcttctaccacaaggatatttaaaagaatatttaaaattcacc

SEQ ID NO: 228 - DNA, 28912 bp, Homo sapiens
aatgatgaaagagtgcaagctctcacttccccttcctgtacagggcaggttgtgcagctggaggcagagcagtcctctctggggagcctgaagcaaacatggatcaagaaactgtaggcaatgttgtcctgttggccatcgtcaccctcatcagcgtggtccagaatggtaaggaaagcccttcactcagggaagaacagaaggggagattttctttgatggttgtttggaagtcaggcttaaacaattgtgtctgtgtgtgcgcatgcacaaacacttttaccttatctttattttcttctttttatttgaatgtatagggttgtgtgtatttctgtgtaaatttggggttttcctcctcttagtctttcacttttgtggtgattaccagtcccatttttagagccagggctgcaacttgaaggttttgctaaaaccctcaccgaagtgtctatgatcagcattttaactattaattaatgtggccaggcaaggggtggaaggtgagaagactagaaagggaacatgatatacacatttactcagatactgggcttttctaacatctgcagtgcaattgaagttaccagtcatctgcagtctaaaaagaaagtgattttgggaggtgcgtagaaaaaatcatcttattatttttcctctatattacttttttctttttttctcctgaagaaacttttttttttggtgataccttctttttctctagcacgtataattttggaagcatttttcatatgcagtgtatacttcagaaagagagagagagagaggaaaattgtcctgttcagcgtttgcatttccattattcctgctattagttaaaaacaacaacaacaacaaaaaacaagcaggatacctagatctggaaaagggagaattgtgtagagctgtcttcctaaagttctgagttagggctgcctcagaccactttcataactatctccagtggctttgtgttttatatttattaagatagagaaaaaaagagtaattactaagggcagctgctgtagctttatggtgattactgaacattgacatgctgtcacgtttttggaactttgagtatttaatcactttgggatattctattttcccccatcttgagtgtggacagatgctggtgatgtagccttctgggcacagagcaagcctccccctcagcctctgcaccagaaaggctcagcttcacacactccaagtatgttttctacaagaactacactttgtggctttctgacccaaacatttttatactaaattacacacaacaaagttgtagctcagagagggaacaaatggcttatttaggccaccattttcttgagccattatgatttcacacagggctcccttggccctgtaaattggcaaggattccattattcaacccgcatacatgtacagagaccctgctctggcccagatagtattctgggtacaggcggatagagcaggaaacaaaacagctacagtgatggacaggtcagcctgcagcaatgcctgcagtctctgcaaaggtagctgtatgggtgggcaggtggctagcacttattcagctctggaaggatctcccctctggcctctcccctgacacccatcaataaaactgaggagcatcggtggacaggggaccttgtgccccctccctgcctgtgcagttggggctgaacccagctacgaagtttgagctcactctctccagctccctctcaattcagagctgaactgtgggaagcttcagagctctctgtttcaaggacaggttctcctcacctctcctaatggaggtgcaccagggaactggccctgctctgcccagggctttctcctggactttgccatcatggtctagcaaaccctgttcagattgaggtgagtggtgagatttcgaattctttttgacagataggattaagtcttcttctgtgggacaagtgggaggtagaggtaagattaaagatggccaaatgtctgagtcctgacagccacaatatggagatctagactttttacagaccacagggcacaggggcctcactaacagagttcccggaagtgatgagtgtgctgggggcttcctggttgaagagacactagaatggaccagctgggagctaattttttgggctggagtgtgatggcctgcacatcactgcctctgtccctccattgtcacagctgccccttaggagccagctgaggcaatttgtggtcagagtgactttgcacagttgtcctgcctgtgttcaggaagggagtttctgtggtccctttgaaaccacagaagagcccctcgtatagctctcaatggagggggcaaaacattcaaataactcaggagataacacaactatttgtttttaactgtgagtttttaggcaatcacaaagatccagatgtatgtccaagcctctctttgcaattctaattaacctcaatgttgcaaccatagacctaccttacagagttcaaaaaaatatgcaaaaaccctgcctttcttcttcctcataccccaaaatgccattctgaacatttcctgttagttaaaaaaagatttccatggtgttaccaggcactgtacacagtctgtgtcccaagacaaggaggtacagttccacatgcgcccatgactgggttgggctctgcactctctctatactttgagagcctgattttctgtgattgggcagagctggcccacctggtgcaatgtcctcctctgcctttcaaacatgttttagtcatcaagatcttcaaatttgtaaccctttccagcttgatccagcagaatgcagatttggaaaaacagaacgagtttaaaatacatgattctaagaaacctggaccagaactatcaaaacttggtttcccagagaatatagcaaatgggctcattggccaatactatgacattggcttttgagaaaagaaaggctttattgcaaggctggccagcaaggagacaggagttgggctcaaatctgtctccccagtttggggcttagggcaagttttaattacacagacgcatttcttatgagtagcaggcagagagcctccaacttcttctgcctaggtaccagcagcttagacatgatgcaaacctgggaagcacatactgtatttggagaaagtgattgggaagaaatgtgagctgaggggaggggctcagtgcccctgagctacacttagtgatggcagaggaaggatgtcctcccgcaggaggctgttccacatctgctctggttgtagggggagctggcaggcattagcagcggcctctttcccccaagagaggcagcctcctccaagttttggcgacattatggccctgcaatcataagggtttgtgagcatagtgctaaggagggaaatggagctgctgttactagttccaccccaacacacacacacacactcacaagaaacctcacaagcaccgtattggaagactttgccatccaacctgggatttgacaggctctagaagcagaatcatagactcatgaagttcccccaaagcaggaatcttccttacagtaacccccaaccacccccctccaccgcctccaccggctgcttcttcctgaacactgcagtgtttggaaaactcacaaacttccaagcttgcctttcctattgttgcatggattgaaagcttgcgttgtgtgaagaatggcgcttcctgctgtgcttagttttatctcatataatctttgcaccatttaatccttgcactcacccactcatgcaactgcctttgcagagactggaggggccgctgtaggctgacctttccttcactgtacctattttgttccctgctttattcccctgcacccaggacactgcctggcacaaagacaggtctttataagtgtatgcaagtgaataaagatatatatattattattgttatttttgagacagtttcactctgtcacccaggctggagtgcagtagcgcaatctcagctgactgcaacctctgcctcccaggctcaagtgattctcatgtctcagcctcctgagtagctaggactacaagcatgtgccaccacgcccagctaatttttgtatttttagtaaggacagggtttcaccatgttggccaggttggcctccaactcctgacctcaagtcatcctcctgcctcgacctcccaaagtgctgggattacaggcatgaaaccagcctagaaatacatactattatttattcttgttttacagataagcaaagtgagtcatggagaatttggttgaaagtcccaaggtcaggagtcgtgaagctgggattaaaacctaatcatctgactttagagagtagacacttgctccatgcatattgcctccaattcattcattcaagcactccctgctcaagaagttctttcttatgttgagctgaaatctgcagccctatgcgttttacccagcagtcctggtgctgttccctaaaatcacttagactgtgcctgctctttctgtgtttacagtgtcagctgtaatatccccctcttcggcctaacgtttctgaagtcccttgccactgggtctcctctcctcttcctgtgttctttctaagaacacctatgcagataggtgtcttctgtacagggaagctgttcctgagatccgggcatcgactctgttagaataatctacgtatgagttatttttttgagaactatgtgtcattgctgactcatattaactctgtggttaactaaaatctcaagatctctttatgtttgttgagaaacttatttaacttctctggccctccgtttccttcactgagcagtggagtgattgataacctccacctgtggttgctgaaggtcttgcacaagatgatatagttaaagtagctagcagtgcccacgtacggcggatgcctcacaacggtttgcagccatctctctatctgtgtctttgtctctctctcacactggttttggcttactgttagcagctagccgagataagtgtgtttatggtctttgcatgtattgtttctgtagcatactggaggattacaagaggttggggagtgagggggcggtgaggagtagacaaaggcagccaactcttccaagtttagcttagaaggaaggagcggtaaaccctagttgaatgttggactgaagcaggtttgtttttgttttgtttaaaggatagggaagatctgtgcgtgtttccaggataaagaaaaggagagaatatgatattaaagattctggaagtgggagaaggagcaatgaaatacagacttgaagtcagtggcatggacagggtcaagatcacagttagaggatgcagccttagagaaaaggaaggggctcggttctctgagcaaggagggaaagaagagaggcagatgcagagaagtacggcacatcgtgctgctggttgtagaaataacctctgacttttaataaagtcatccctcggtatccctgggggattagttctatgacctccctcggatgccaaaattcgtggatgctcaagtccctgatataaaatggcatagtatttgcatttaacctacacacatcctccatatcctttttttttttttttttttttttttttttttttttgtgagatggagtcttgctctgtcgccctggctggagtacagtggctcgatcttggctcactgcaagctccgcctcccgggttcatgccattctcctgcctcagcctacaggtgcctgccaccacgcccagctaattttttttttgtattttttagtagagacagggtttcaccatgttagccaggatggtctcgacacatcctccatatactttaagtaacctctagataatctctagattacttgttttgtcttttttttttttttttctttttgagatggagtttcactcttgtcacccaggctggagtgcaatggtgcaatctcagttcactgcaacctccgcctcctgggttcaagcaattctcctgtctcagcctcctgtgtagctaggattacaggcccctccccacccccaccccccaacaactggctaatttttgtatttttagtagagatggggtgtcaccacgttggcctggctggtcttgaactcctgacctcaggtgatctacccgcttcagcctcccaaagtgatgggattataggcatgagccactgtgtgtggcctagattacttataatacctgatagaatgtaaatgctatgtaaacagttgttatactgtattgttaaaagacagtaacaagaaaaaaaatctgtacatgttcagtccagacaaatggttttctgttttttttttttttttttaatatttttggtcagtggttggttgactccaggaatgcagaacccgcagatatagaaggttgattatgcgttcagaggcagggaataccatcttgggttccagaaagaaaatgatcagcattttctgtcatactctggtaaaaacagatcttttgaatggacaggtgtattaaaccctgtggagctggctgggcctggcggctcacgcctgtaatcccagcactttgggaggctgaggcaggtggatcacgaggtcaggagttcgagaccagcctggccaatatggtgaaaccccaactctactaaaaatacaaaaattagccgggcgtgatgacgcatgcctgtagtcccagctactcgggaggctgaggcagaagaatcgcttgaaccctggaggtggaggttgcagtgagccgagatcacgccactgcactccagcctgggcaacagagtgagactccgtatctaaaaaaaaaaaacaaaaacctgtggagctgatgaaatcctgcagggagcttcacggtgacagcaagaggagaaacacatccccatatgccccgcagagtttgaagtcccggctgcacctctccccagcagcaggttgactctggaaagttgcagcgttcttacctacagagtgggaacagtactacccattgcacagagtgggtgcaaagctctgtgacggaatacatggcaagtgcccaccacattgcctgggatgaggtgggcccttcctttacgtaagagagccctacagatacactcaaagtgggcacattcctacagaaggagtgttatttgtgtagaaaagaaaaacatgaaaggcttttattcctatacacaataaagcacccctttaatgtctttttgaggaggataatatgaaattgatgaaaaggaaccctgtggttggatccctgacaatcacatgtatcccttttttcactcttgaaaaaggagtaaaggaataaaatagaaggggagagggggcagagagaccttcaccgccccccccccaccccccatcatccaatctatagtcaaaccctccagactgtgtctccttggcatctctgacacccccaccgccaccaccccagtcaattcctatcttatccccctatcctggatctgattctgctaagttcctgccacactaaagacagggtggctttctgatgacaacattcctctgcttaaacctgtcagtaattccttgttgctctcagacggaactaagttctgaatttcttcacacggctctcagcaaggtcacagtcaccctgctaggccccaggggcaaatctcaatggtcatcttcttgaagacctggctcagttatttctttctcattgaggctcacgaccccaccttcttgcatgcctcaaacggccccttaccatgctcttctttcgcccatagctcagcacaccatatcattttaatttatgtattttgcttaatgtggatgatctgtctcctcctctgctgtcctcaccagagcatcagttcctcaaaccaaggctctttgttttgttcttggatgcaagctaaatgtctggcatgtggcaaatggtcatagatacatgtcattgaaagaatgattcatcacctccctctttggccttgtctgtggttctaccaaatcccattccctccccagtgccctccattccccctccttggctgaacattctgaaccacagacagttctttaccctgaacctttgcatattttgttctcttagcttagagcggcccctctccctccgtctgcttggctaatttctacttgttcttcagattttatcttagatgtcattccctcaaggaatccttctgtgactcaacatggaattaagttgcctcctttgaccctgaaagcaccatgtactcaatctcatcttggcatgactcactttgctgtgtggaatgtctgctttccttgtttgtctattcctttagactgtaagatcctagaaagtgggggccgtgccttgctcatgactgtgtttctaacaccaaacacagtgttcagtagagagcagctgctgagtacgtttctgctaaatgacagttgatggaggacatttagggttgcttggaggtcaagtcaaggaggcatttaacattctagtaaaacaaggaagtaacaggctcctgaacatgcccacaatgaaccagatgcaaaccttttcccttggcaggattctttgcccataaagtggagcacgaaagcaggacccagaatgggaggagcttccagaggaccggaacacttgcctttgagcgggtctacactgccaagtgagtcctaaccctgatgttgctaataagtgggggcatgggcaggggggcctccttctaggagtgatgaccacccttaataccacatgtctgtctgagccaagtttctgagcgccagggaggtgaggaaggttggacttcaccagagaggctttgtggacaccctttatcatcttagtgagtgctagtgtcaaaacaaagggagtggggatatggggcacattggtggagggaggtgtgatctctgcagcttcagaaagatctgaaagagtcatttggttagagaagttgacctatttcctgtggggttagaccagggttgctactgtgaacaccagccatgactcaccagtcaccttcagaagccacaggcaggacatgctgacgacagccttcaactcacccaccccttgctcccctgcgggtggaagtctggaggtgacaccactgcattttctaacacgggggctccttgagcaactagaacaagaacagaaagaatggggacattagcaggtgctttccccctctctcattcttttctttgaataaaaaggttgtttgaaaacacctgagcggctcctaaagatgggtgcaatctattcgggatgcaaatccgaatgaatgttattcaaatgctcctctcttctttatgcagagtgtatttcaaggctcagccagtggcaggcatgctggggactatggactacggactaggggcctgtcacagaggaaggcctcatgctagagagctaagggaggagctggccttcagttccatcccaggagcaactttgatgttcccagagatccttccaaagggggagtcatggtcacccaagaaaaatgtattcagaatgccaagaatggtgcaaactcaggacaaagattcacactgcagggttggagtccctgggcttgctgctggcaccatgggagggagggtccccttcaggggtaccgttggtttcctgtgaattaaactggcttcaagggatctcgactgaacaggcctatatcacactcactgatatactctctcttcagtccttctcctcatctaggtatttttaattgtttcagtgaggtgtaggcatgaggggattggagggggcatctcctccattgcagtttttcattggctgctttgctccctcagctccgaaatcgctgggccactctcgaacgcattagtacggtagtcacaggttgattgcctggccccttgccctctgtgggcattttccctttcagacagcccctgagtactcacagtgctgctacagtgggccacctagatctccctctttctccatgctcccacgtgctctgggctccactcccttctcccaagcacttctgtccagggctattccagcagtctgacctcaaggaaatcctttgctaaactgattatagagaggtttctattttaacatttaggtcttccatgtattaattctcagaatcaatttaagatgtttaaaggtgtgatttaagacattttaaaaccatttggaggagagtacagaaattatgtcacttgctgtcagcctctttgcaccatctgcagagaaagatactagagtcccgccttggacacatccacatgcaagaggtgcaaagaaggtgtctttgatgaggcaaggtcaaaacttctccccagacgaaatccaaagaaagcattcctactatgctatatcagtttggaaagaaaaacttctgccaggtgactgcattctcactggtcacattgtgttcctatggactcctcagctcaaccaatttggagaagttatggtgcaatttcaccatatctggttagaagttaagtttccaatttgctggcaatgaagaagaaatggagcaggccaggctgtgtagtttctgccacgtgcccccgggagtgaacagctctgtttgtaagaagccatggtgcttagacctgggctcgctagttgccagcctccaaattgcagaagtgccctttggttggtggctatgctgtgtcacttgggaaggtcgtttggaagttccacagtcgttgtggggtgccagagattaaaaagcgtaagaggagagtggaaagtgattgttgctgcttgggcatccccaccgtgtgggtgctgcagcccagctctcaaaacccatgggtctgtacactcaacctccatgagagggaaggagaaggatgagggaggggagagatagccatggaaaggtaggaactaagcaggcagggtggagagttttctgtaagacaaaaactgtctggacactgctgcggttctgttacaaagaccacttcctccctgggccagcaacatatctgtgtgcctgtctgggttgtaaaaagggtcaaagatcaatgcagcaggcagctacatgctggcaaaagccagaggcagctggtctgtttgcctgtgccaggaaaccactgggaatggggttgtgtgttattctaggagaaagtcgtcccagcagcagcttctccaggggcatccaagagcactgaaaagggttgcaagatgacccatgaggctgcaggaagaaaagaacatgcatttaatcttgctatctgaaaagtaagacatgaagctttcctcatttttaatatacacatggacagtagtatgtgtatatagtttatatgcaaatatacttgttataaggttgcatgctcaaaatttttggttcatggggtgtgggatcataaatgtttagggaccatggctatcaaggaaaaacagcatgaaggataaatgatactggtggattaaaaagacagatgcatgtatttttagcataaaacacaactgctgactgatacagatagctcaagattctggggcagctgctgaacagatacactagccagtgtggctcatcggctcagacttggccttaattaatgggctgtccctccacccatctcccatgagggcagagctgagccagggtttgagagctaaaaggaattggacctggactctgttcacgtgtatattttaattctaattaattcattcttttgaaagacagagtcacactctgttgcctaggctggagtgcagtggcacgatcttggctcactgcaacctcggcctcccaggttcaagttattctcctgcttcagcctcctgagtagctgggattataggcacatgcccccatgcctgactaatttttgtatttttagtagagacggggtttcaccatgtcaggctggtcttgaactcctgacctcaggttatccacccgccttggcccctcaaagtgttggaattacaggtgtgagccaccgtgcctggcctgttcacatgtataaaacacagtttaatgtcctattcccagccaatgagcatggctagagcagccttggtcaaagtttggtttttggagaaaaatccttgttagctgacctaagattcctctttgtgagtgtaagtaagcacaggttgcagagaggagaagggtctctggagaggtgtaattttctaaatggattacaagttcatggacttttaacaggtgttacaggggataacaagttctttatagacagacttttgaggacgtttaagggtattctgattcttggttttctaagaggggaatgtattatttaactacagacacccctaccgcccactttttgcagagtgtatcaaaacatgtttttggaataccaccctcatgtcgcttctccctgcatctcttatctcttggtgtccattctagactcactttctttctgttttttatttttatttttttttgagatggagcttcactctgtcaccaggctggagtgcagtggtgcaatcttggctgactgcaacctctgccttccgggcttaagcaatttttgtgcctcagcctcctgagtagctgggattacagcatgcaccaccatgtccggctaatttttgtatctttagtagagacagggtttcactatgctggccagcctggtctcaaactccttacctcaggtgatctgcccgcctcggcctcccagagtgctcagattacagacgtgagccactggtgcctggcctagactcactttcaagtggcatagacttgtaaaattatttaaaggtgataggtctacaatgatcctgtcaattagtattgacactattattaataaactgttattaattatatttacttactttaaattaatccaaactaattaacggaacactaaagagtttctatgttttattcccagaggtggagaaaaatgaaagggaatatagcaacgaattcttttctccataaaaacatgaatagtgcagcacatcaagttgaacataccacagcaaattgttgcaagatctgctgagtagctcctatttagacctcaaggaatgagactcaaaatgggttcatcagttctgttttgcagaaaaaatagcgcaaaatttctcaaaagaaaatccagaataataataatttgtcaataggaaagacatttccactgggggttaagaaggaagacattggaacaatgatagccaccacttattgaatgcttactgtgagccaggtggcacttcaccttgtttcattctcacaacagtctagggaagtaattactaatgtctccatccacctcttgtagatgagcaaactgaggctcattgaggctaggaaatgcacccacactcacatagcccataagaggcagccatggcattgggcccagaccatgtgaacttcaaagactacacgagcagccactgggcagctgtcatggctaaagccacttgaattcagcccagcagcaaccccctctccaggaggggcacataagcttgcagctttgggtagaagctgcacttgaagtcctggatggcgagagggactggcttgagccagagccaggaacaaggctctgagaatattctggaaatccacaggaggaacccattttcttacagctgggagaatttcattcaactccaggctgaccatgttttattaggaacgaaggtgacttgaactaatagtcaggaatggttgaatacggacccaatgtcaaatcactaggcagttcacatttctaatgagcaaatcccttagacaattaagaatttttttccttttgcataacccagacaaaatcgctacttaaaaacaaaccaaagacccgaaacatgagaaagagaaggaagcaggggaaatctttggtactaataagtttttaaacaataagagcaccagatattttaccccatcagacacagaatgttattcgaataaccaaaaaaggaattttttctctaagtttcttgaactggaaaatgaatcatattttctcagtcctgaggctgcaattttgtgcctctagtaacatataagaatagatgtgatgccagtgcccagtagctgctgcaattgttacttggggacctgtttattcactaagcacttcaccccagtgataaatttgtaggggcctcctgccctttggagctcctaccgtgtccattagatcagtggaaattctgggattcagagcactttgcaaggtcagcaggggtctgctctttctgtcctgttcctggtttttggttgtgcctggattccagggtaggtttctcatctgttaccttcatagacttctccagaaaaggatcttttgaccatcagaggaccacgaagattccattggtgaggcgcagataacctgatctctctgggttctctgcagggcacagatgaagggctggccattcccaagttctcagtggtaccactgaggcatgagaccctaatggtttgcatgagcagtttgaaaattgcatctttgtttttacctatataatcacatgaaacccgtggttctcaaacgtcagcaggcatcagcatcacatggagggcttgttaaaacagatttctgggccccaacacagagttttaaattctgaaggcctgaggtgggtgtgaacatttgcatttctaacatgttctcgatgctgctgccgcctctggtcccgagagcatgcctggagaactgccaccttcgaccatggactgtgagaattcacatggacctcagaattataatcagtctctcagttttacagataaggaaactaaatccagagagattgttttgccaatggtgaacagctggttaaagtcaggatggagactttaatcctagtcaagtgacctttcctctgtatttatttccctccctttttatgcctctcaagtctagttacactgtttttcatggatgggcatatttattgtcctgatctggactgcagacttctcaggaggacacctatgatttaatttagtatagttgaagagttaacagacatggctttggagacagactgattatggtgtgaatcccggctttgccactccctagctggatgaccctgagcaagttattcagcttctccaagcctgagttccttattggaaacatgagagcaattgtgataggcagaataatggccccctcaccaatcatgcccacatcctaatcctaggaacctgtgaatatgttatgttacatggcaaggggaaattcaggcagctagccagttggccttaaaataaagagattatcctggatgatctgggtaggacctgatgtaaccacaagggtctttttaatgtggaagaaggaggcataagagtagatgtcagagtcattcaaaataagaaagatttgatgggccatccctgactttcaggttggaaggaggttctgagtcaaggaatacaggtgacctctagaagctggagaaggcaaggaaatggtttctcccctagaagttccagaaggattgcagccctgctaatatcttgactttatagccctttgagatttattttggatttctgacatcctgaaccatagtaaaagggtgttttttgtttttttgagacagagtcttgctctgttgcctgggctggagtgcagtggtgtgatcttggctcgctgcaacctccgcctcccaggttcaagtgattctcctgcctcagcctcctgagtagctgggattacaggtgcttgccaccacacctggctattttttgtgtttttagtagagacagggtttcaccatgttggccaggctggtcttgaactcctgaccttgtgatctgcctgcctcagcctcccaaattgctgggattacaaggcgtgttgttttaagccactcagtttgtggccacttgttacagcagcaagaggaaactcatacagttatcatgtgaactcacaggaatatggtgagttaaaaagagaggaagggtgcaaaacatccacggtagagtgagaactctccagggagtgaggactgtgcccagcatacagtgatcaccctcttagtaagctaagtttctgagcaccagcttttttgagttgactttgttgtctttaacatttgaagatcacccttctttgctcagcctggcttgcagacctgggctgatttgtggatctgatagaaaagtttccttagttgggctcttctccccgaccacccccatgccagtgtggccacatcctctgtctgcattgctcactcttcaattccaagaagcgcaggggcaccgccaggaacaggaaccctgccagaggaatacatcaagaaaccaagtctcccttacgcatcaccgtaggaacagagttaatggattatgaacatgtgtttgctttataccattgtttgtttcccaggtggcagctggctgccccatcttattgggtagatgtaagtggaattacgaatgggatttatgtttcatgcacgatggtgattattaacttcaactttcaggtaattttcagaccacattgcactaacttggtctctgattgtttttctccttgtttgtttattctgcagccagaactgtgtagatgcgtaccccactttcctcgctgtgctctggtctgcggggctactttgcagccaaggtaactcagacttccctttgttcattctccttctataaagtgcatctcaaggaggttcaaagggcaggctttttgttgaaaggactttgcctgacctctggctcccatctgtgaagccctggagaggtgagagccctcgggaggccgtgtttcaggcatgctctgcacccgtgcagagcgcgtgtgataatgcattgctaatgcttgctccctggtggctggctgagagctgctgtgctgacaagggtggtttaaggctaaatgtgactcagaatccttaagcagtgttagttcagatacaagggcattataaatgagagtgcctgagggatctattttgggaccgctgtcacttggctcttctgctaataagcttccagtgtggtggccctccttcaggcatgtttccactgagccacgggctggatgccacatccccggccttcccacagttatcagcagcccacaggcttgacttgagcaagttggaaagacaaatcaacttccagagttgatttaacattgagtggaaatcagtcatacttttggtcccctttcggggccacgcctggcactgtgcctggtggcagatcggcatgaactggccagcttctgtggccctggagggcacaggcagaaaggccacactcagtcccatgatgaactgtttaagacttattgttgtctccccgctctgtaaagtagatagagtggattttatgtcccttattacctttcaggatactttgactcagggagataaagtaacttgggtacagctactcagctggtgaagaacacaggcagaatgagtgcctgggtcttttgacttaaaattctggatttttcacaaagatcctcttactttattcatttacataataaatatatattgaagagctactctgtgccaagccctgtgcctagatatacagtgataaataaagagtagcttctagaggtcacctggcggtgaggcacaggccagctggcaagatggaccacagaagtcagtgaatgaagacaatgacaagggtgggaagcgccatatgggaagagaaccaagttcagtgatagagagcagaggtgaggcggcagcagaaaccacttaagggacaccacgtggcactccttctgtgctgagaaggctgtcagtaagctcaccatttatttcctattttctctcctgagttaaataggaaacatgtctcgcattacttgaaaaatcaagtcaaactatgctcttactaggagttatggttctttttatgtcttagatgatgcttgatctagatgaatgcggacttgctgtagctagataaatacaatgggagtttgaaggtgtttcgtagccctggaaataggtatttcctgtcaaaacaagctttgtcattgccagcagacaaaagcatcagtaaccttggttgataatcgtcatttcttaggaataaagtagactgtagaattttttttagcagaaaggaaacccaaagataattctagtgcaaatccctcactttatagagcagaagctcaagtcccagaggaacaagtggcttgaacgaacatcagaattttaggggctggatttgtaccctcctggtgccagcagcccacttccctgcaggaggcactcaccttccttgcacaggggtatgagtgtggccattttccacccataatctctgttagctcatgttcaattgggttcccattgaaagaaaaatggaccagtaagttggagcagaatcattcagatggtataacataaggaaaaactttgcccaaggcaaatcgtgattgtgacagctttgtgatttttagagaatagcatgggccaggcacagtggctcatgcctgtaatcccagcactttgggaggccgaggcaggcaggtcacttgaggttgggagttcgacaacagcctgaccaacatggagaaaccctgtctctactaaaaatacaaaattagctgggcgtggtggtgcatgcctgtaatgccagctactcgggaggctgaggcaggagaatcacttaaacctgggaggcggaggttgcggtgaaccaagatagcaccattgcactccagcctgggcaacaagagtgaaactccgtctcaaaaagagttcacagtttctcttttgctttgattttcttatctgccggataacaatagtattttggaaggcaggaggaattgtggaaagaaatgggttttggggagtggctgattggaggcaaatccaaggacactcattgctggtgtgtgactccaggcagttactcagcttttccaagcctcagtttccttattgtaaaacaggaccatggtctagctagtagcattcctatggtgagtgaaataatatgtataaagctcctgacacagtgcttggcatatatcagattgagccatgtaaaactgccaatatctggctatttatgacctacaaaaatagcatttcatatgattccacctaacatctgaagcgcaataaatgttattattgataatgcaggtggtggtgataaagttttgaaatcagaaagacctggcttcaaattccacgccttcactggcctgacttattttcattcatttgacaaatattattttgaacacccctatgtgccaggcactatgccaggctcagagatgatctaggaaaaagacagatgtcctcatctgtcttaggctcttgtggcctaagcctaaatttcctcgtctgtcaaatggtgacagtaacacactccttaccagagagctgggaggattggagactcaagttcccaaaacgccaggagcactgcggcaggtgaaaagtattccctcaatggcggaagtgtttaaattgcttttatatctgtagctctagataacactagttccagcttagttaactcccagctccaagccttcaggacttcatagagttattggggtgctgctcttggcagtttcccaaaaagctagaatgcagagggaatctccttcccaaaaagctagaatgcagagggaatctccttcccaaaaggctagaacgcagagggaatctccttcccaaaaggctagaacgcagagggaatctccttcccaaaaggctagaatgcagagggaatgtccttctcttctaaatggtagctgttagttcaagaaaggttaaacattgtgctgtggggaggctcaggggtgaagggtgtacttttaagagaaccagtttcagagctgggtttggggtttaagccctaccctctgcccccttttacgagctgacagccttatgcaagcctggttgaccacctgaacccacgtttccacatctggaaatagaaatgtgggtactagttatgttgaaaggactcaggttagatgatagatatgcaaataccttggaaaccaggagtgtccagtcttttgggttccctgagccacactggaagaagagttgtcttgggccacacatagaatacactaaccctatcaatagctgatgagctaaagaaaaaacgttgcaaaaaaaatctcatatttttaagaaagtttatgaatttgtgttgggctgtattcaaagccatcctgggccacgtgcgacccgcaggctccgggttggacaagtttgttgtaaacaatgccatgatgccggcataaggtcgttaccagtattaggaaggttctcaggtttcctctagcccttgggctcttttcctgaagtgcgtgtgtcttctgctagattttgtgaccaatgttgattgcctaattgggctaacagcatgttttggtggctacgaaactgacacaggtgttttcatttctccacttagttcctgctgcgtttgctggactgatgtacttgtttgtgaggcaaaagtactttgtcggttacctaggagagagaacgcagaggtaggtaactgggactactaaagaactgtggagcgattcctgatttttgagcaggaagagtgacaattcaaaacagtatttgactagattcacggctccgtagcatccccttgggtgggagggggaaggctgactaggacctctgattcttctttccctgagctttgaaggctctgaaaatacagctggggggacttgcccagttttcttattaagcaattcctccgcatggtgctggctttcaaagggtgcttcagtgctgtttgctgcacgtgccttgcagccccacaccctgcactcccgccctgcagagtctggcgctggaatgacattttaggtctgggttcccaggcctcctgagagtgaaatgtttcattgtttgtctagagaaatgagaactaaagcttgcaccttgtgataagttgtcctgaggaacatatctttcagggaccagaagaaagaatgttgggaaaataagatgcagtaagatgcagacatgacagcagggtgcagcggctcacgcctataatcccagcactttgggaggctgaggtgggtggatcacctgaggtcaggagtttgagaccagcctggccaacatggtgaaaccccgtctctactaaaaaatatacaaaacattagccaggcatggtggtgggcgcctgtaatcccagctactccataggctgaggctggagaatcgcttgaacccaggaggcagaggttgcagtgagccgagattgcgccactgcactccagcctgggcaacaaaagcaaaactccatctcaaaaaaaaaaaaaaaaaaaaaaaaaaagatgcagacacgagactgtgaaactgactagcatcaccattgcattgtttatagatgttgccagacagaaagccccaaagcagcacagtaccttcctgacatctggactaggaaatctagattttagtaaaatacatgctaatacttacagaagaaatgtcggcgttagagtatgccgtcagttccttagagattgcaattcctaatgcactagtatggtttcaggtgccaggaacacgttctgtgaggctgctgccccaggtgctgaccccagccttccacaccattttccttccttgtgttcacagccgctctgtcttttacaatagcacccctctctagtggctaatgggctctatgattagatagcatccttcagtagtgataaaggcagtgacatcctagggaggtcagcgggtgaaagcgctatatctggaaaacctgagagcctgtgaagctcaaggacttgacggggttagaccgtgagccgggctgcagctggaaaaagaatgactgttctttcagcagatccttccctgtgccatctctttcttcattcctctctagtggcattcttatttatcctctaaaaccacaattccattatctctcctattcttatcaacactgccctaaatgatattctttattctcttttgccctggaaaacctctatcatgccttttcccatgtgattacctcgttaagagtgggggtggaatgtctagcaatgaaataagagggtcttctcttttgcctggctccctatgcagccctatcttaccccctgcaaagtcccagggatgtggctcagtcactgctcctctcttcatctgtcaccacttgcttgagatcctacagctgctttaattccgagaccatctgcagaacatgacaaaatttgtccacctacccacatgtccttttaactttaaaggctttactaactgattcctattagggaatgaacagaggtggcaaaaataaacaataggagattgatttacaagaaatctttaaaatagtagatttcttcggacctcattgaaatataaatggcctgccttcttgtgtccctccctggtctccctctttaggtgataagaagaagatcctgccagccccataacccgccatctgcgcgggttctagacccccttctcctcccctctggccgtggtaggcattactgatgaatcatggtgctctttcttccagagaccaaacctggcctcggaatccttcttaacacagatactgcttaacacaaccactctgagcagctgtcataagtagaagtaatagatactagaagaaatgtctaagcctaatctagaccaaaatacggcctgatatagatgcaagccagaggggctttatggttaaatgcaaggagattttcaaccctgccgtctagaagctacttgctgagatcttcttcagttgggcccatctcctccccaggcctctcttctgttcctgggctatgtcacacttggactctgcagacacctaatgctcttgggacctgctttagttcttgacctcaccaaccgaggaggaattgctagatgagatccttcccccggaatttctctcttgaaccccagatggtccgttgcccctttccagaagttgctccagccctgtccgcttaggaagttcagtgtcatccttgatccagtgggtagggaagacattccataatgaatgccccagtctgagcttcttccttcaggcttcaggctgccctgcgaggattttgcagctccctttttaatgccctctagaagtttctggctcttattttcagcccttcatcctactctctctgaccccttcctctatcctgtttagttcacctgtagcagttactacccagcagtgaaggatgaatcttggtttcgtttcttttctcttcttttcttttttctcttctcttttccccttcccttcccttccctcccttcacatcacctcatctcacctcaccttacatagtcttgctctgtcacccaaactggagtgcagtggcctgatcttggctcactgcaacctccacctcttcccaggttcaagtgattcttatacctcagcctcttgagtagctgagactacaggtgtgcactaccacacccagctaattttttgtatttttagtagagatagggtttagctatgttggccaggctggtctcgaactgctgaactcaagcaatctgccatccccggcctcccaaagtactgggagtataggcataagccacccatgatgcccagcctgaatcttggtttcttccccattcatttaagctattacctgggcctgaactcaatggcacctggcaccaactggcaactgactcttggtcttttattacctaccttccctagcaggcactgggttgctccctcttcctatcccatggagtcctgtcctctgttggggctcctactgatcctcttggcaatatgaagttctcagctcaatggtgggtgggcaatgactgccaactcttgaggccaatgaactcaggttaccccactcctcctcctcctgagttgctcactcactcctcattcactcaacattgattcagtagatatttgctacctgctctgtgccaggtaccaggtcagttgctgaaggagtaacagtgaacatgacggagtctttgtccccaaggagacccaaggtgtctcctagagccaggggcacattgcaagaccaaatatattcaacttaccaaaataatcatagacctagttctcaaaaagcaagaagactgattcctcgttgtcatttctcctcctcagcatcaatgttttagagtctgtgggcccctccaagtgtggagtatggtgttacttcaccagagtttgaggagaaacattcttcttttggaaggccggggagcatagatggatatcaaggctgctgtttctaaaagcgaaacccaccaaacaacagtattagaatcatctgtggtgcttattaaagatacagattcctgggccccatcccagacttatgaatcagaatctctgccagaggaagcctgagaatttgcattctcagatgattctgcattctcagataacacattctttaggtgattcttacacacactggagtttgggaatcgctgaaggctgttcacttctcttttctgagaaatgattcattcatttcagaaatatttgcagaggtccttatttattggagatttgtgggtgggcagaggagaaatatcttgtcctcacagagcttacaatttttattttctttagaggtcaccaggcttaaaatgacacttccctaaattctgaaaagaacagatttttaaaacaagaagggactgtaatgttttctgttcctacctcgtattttgttcacattaagaacctggggtgggaagtggaggagggggggtgactggcggggggccacagagagctgagctggggtggtctcgaactcctgaactcaagcaatctgccagcctcagtctcccaaagtgctgggattataggcatgagccacccacgatgcctgggtggaactcagggctctggatgcctgggcgcccccatctcccacactacggcgcctcatcctagaagtggttagcacctttgagatgggaattatttagcaggatgcttttgtgttttcatgtaagttttatgctgcctgtggagggcacagctgtttcaaaactaataaccaaatcctggtctccgaagtctgaaggcatcctttgccctgcagtgcaaagcacgggattctggcctcacacaggcaggtctgaactcctgtgttgcctcttgctggctgtgggacctgaggcaaatcatgcaacctctcttttctgtttgcctagatggaaaataggtttacaatacgcccccataggatggctgtgagaattaaaggaagtcatgggtgtacaatacctggccccgaaagatgcttaataatttaattctgaccttcctcactcatttaggattatgtaccaacttttagaaacaatgaaagattagtgagtcttctgtggttggtataaaaaaaaaatagaaacatgaaagagatgtcctccttgttcaagggctaatgaccctggtgtgcgctgtctaggcccccaaggtcttccttccctgctcacagcatttcaggttctccgcagctttgctgagcctgggtcaggttcggtatctgcccaccatgctcacttgccacagctgtggccccatttccaaacttcagagacttaaaggtgcagctaatgatgtgcccggcctggggtcacattccctgagccctgcagacaagggagcaggaggctgagctcttatcttccacaccctgtgcacagcctgggaagagttaaagcaccctagtcctatgctgcgagggccacatgccctgagaccttggaaaaaatcctacctgaattgaagagcatcactatttcatcaggaggcgctgccatttcatttttcacttcggttttatcttgagtgtaaaacagcttcgcaaatcactttttcttgtttctgtaatgagcatatggtggcctcattcgtgtgataaatctgagccaccacgatatttgacttttcacaatttaatttatctgaaccctctattctctggctaaaaaatatcccttacttggacttctttattttattttcaattcccttaccagcactagcaggggactctgtactcatctgctggcgctgccataacaaagcactgcagcctggggggctcaaaccacagaatttattctctcacagtcctagaggctagaagtccaagatcaaagtgtgggcagggtcggtttctcctgcagcctctctccttggcttatagagtgccaccttctacctgtgtcttcacatcatcacctcactgagcatgtctgtgtccaaatctccccttcttataagaccccagtcatactggatgaggatccacccatatgagttcattttaccttaattatctctttaaacaccctgtctccaaatacagtcccattctgaggaactgagagtaaagattcaacatatgaattttggaagggacctaattcagcccacaacaccctcttttgggatgtttattttcccccttaaggagctagttaggatgtcttatctcatgaacatgactgtgaacaggaaaacagggagagaatgaagctggccaaggaacagggctggtgtcagctagcagtgcttttctgatgtgagtgggtcccacagggagcttgttaaaatgcagattctgattcattaggttccagagggacctgagatttcccatttctgacaagtttccagtgtgggggctgatgctgctggtccacggaccatactttgagtagcaaggagcttgatacataatggctgagtgactttcagactcctgctgtagaaaaattatgagttggctgggcgtggtggctcacgcctgtaatcccagcactttgggaggccgaggtgggcagatcacctgaggtcaggagttcgagaccagcctggccaacatggtgaaacaccatctctaccaaaaatacaaaaattagccaggtgtggtggcaggtgcctgtaatcccagctactcaggaggctgaggcaggagaatcgcttgaacccgggaggcagaggttgcagtgatctgagatcgtgccactgcactccagctgggcaatagagcttgactcagtctcaaaaaaaaaaaaagaaaagaaaaagaaaaattatgagttatattatcagcatatggggtgcctttcaaattgataaaatttctaatattaaacctgtggatgccaaatgctgctctctgattatggcaggaaacggcacttggcagtacgaagttagctgttgggctgagctggctcatcttgttgtgcggtcctgattgcctaaagatgccttcccaggatctttactaacaatcctcctgagtcatttggactttcccaacctgttatcacctctcagatgggccagccatggaggcagtcagaggagggctctgcagagggagggcagaaacagggtggcctctgcatgccattaggaggtcacatctcactgggggatgcagtttaggatttagtgccttggagagaaggatagagtatattaaaacatgtctccgctaggcatggtggtttacgcctataatcccagcactttgggaggccgaggtgagtggattgcctgagctcaggagttcaagaccagcctggctaacatgacgaaacctcatctctactaaaatacaaaaagttagctgggagtggtggcgtgcgcctgtagttgcagctacttgggaggctgaggcatgagaatcacttaagcccagaagactgaggttgcagtgagccgagattgcaccactgcactccagcttgggctacagagtgagactctatctcaaaaacaaagaaacaaacaacaacaataacaacaaaaaccaagtctctccctccactcaaaaatgcaagggcctgtctcccattgctgggtgcccaggtctcatgaatgtagatatgaattattccagtcagcctcaggagaatagaatgagccctcagatgccgaagcacctttcagattccaccggttttatcggctcatttaaacttcacttctaacacagtcctgcattacacacgtgtctgtcgttatgggcagctgcagagagggtcttaatggtcctaatgctcagtgaggatgcccaatggtcaacagaacctgccatcttcaggccatcaaggagctctggagttaaggaaatcatgagagcacagaggggcgggtacagcagagccctcgtggtaatgggttttgaggtctaggctctcttcacttgggtttgaaataagttcaatgactagtaatagctgagacacttctacccttcaaatgaagtaaatgggaaaatggagcattgttgagtccagggagctataatttaaaccccatatatctaaaaggggtaacatttttgtgtgtgtgaaattggtgtcattcgcactgcatctacagttttctttttccttctcttccagcacccctggctacatatttgggaaacgcatcatactcttcctgttcctcatgtccgttgctggcatattcaactattacctcatcttctttttcggaagtgactttgaaaactacataaagacgatctccaccaccatctcccctctacttctcattccctaactctctgctgaatatggggttggtgttctcatctaatcaatacctacaagtcatcataattcagctcttgagagcattctgctcttctttagatggctgtaaatctattggccatctgggcttcacagcttgagttaaccttgcttttccgggaacaaaatgatgtcatgtcagctccgccccttgaacatgaccgtggccccaaatttgctattcccatgcattttgtttgtttcttcacttatcctgttctctgaagatgttttgtgaccaggtttgtgttttcttaaaataaaatgcagagacatgtttt

SEQ ID NO: 229 - DNA, 1974 bp, Homo sapiens
aattctaccccccttggtgccaacagatgaggttcacaatctcttccacaaaacatgcagttaaatatctgaggatattcagggacttggatttggtggcaggagatcaacataaaccaagacaaggaagaagtcaaagaaatgaatcaagtagattctctgggatataaggtagggggattggggggttggatagtgcagagtatggtactggcctaaggcactgaggatcatccttttcccacacccaccagagaaggcttaggctcccgagtcaacagggcattcaccgcctggggcgcctgagtcatcaggacactgccaggagacacagaaccctagatgccctgcagaatccttcctgttacggtccccctccctgaaacatccttcattgcaatatttccaggaaaggaagggggctggctcggaggaagagaggtggggaggtgatcagggttcacagaggagggaactgaatgacatcccaggattacataaactgtcagaggcagccgaagagttcacaagtgtgaagcctggaagccggcgggtgccgctgtgtaggaaagaagctaaagcacttccagagcctgtccggagctcagaggttcggaagacttatcgaccatggtgagtgtagggtcttggggtcgaacgcgtgccactcgggagccacaggggttggatggggcctcctagacctctgctctctccccaggagcgcgcgtcctgcttgttgctgctgctgctgccgctggtgcacgtctctgcgaccacgccagaaccttgtgagctggacgatgaagatttccgctgcgtctgcaacttctccgaacctcagcccgactggtccgaagccttccagtgtgtgtctgcagtagaggtggagatccatgccggcggtctcaacctagagccgtttctaaagcgcgtcgatgcggacgccgacccgcggcagtatgctgacacggtcaaggctctccgcgtgcggcggctcacagtgggagccgcacaggttcctgctcagctactggtaggcgccctgcgtgtgctagcgtactcccgcctcaaggaactgacgctcgaggacctaaagataaccggcaccatgcctccgctgcctctggaagccacaggacttgcactttccagcttgcgcctacgcaacgtgtcgtgggcgacagggcgttcttggctcgccgagctgcagcagtggctcaagccaggcctcaaggtactgagcattgcccaagcacactcgcctgccttttcctgcgaacaggttcgcgccttcccggcccttaccagcctagacctgtctgacaatcctggactgggcgaacgcggactgatggcggctctctgtccccacaagttcccggccatccagaatctagcgctgcgcaacacaggaatggagacgcccacaggcgtgtgcgccgcactggcggcggcaggtgtgcagccccacagcctagacctcagccacaactcgctgcgcgccaccgtaaaccctagcgctccgagatgcatgtggtccagcgccctgaactccctcaatctgtcgttcgctgggctggaacaggtgcctaaaggactgccagccaagctcagagtgctcgatctcagctgcaacagactgaacagggcgccgcagcctgacgagctgcccgaggtggataacctgacactggacgggaatcccttcctggtccctggaactgccctcccccacgagggctcaatgaactccggcgtggtcccagcctgtgcacgttcgaccctgtcggtgggggtgtcgggaaccctggtgctgctccaaggggcccggggctttgcctaagatccaagacagaataatgaatggactcaaactgccttggcttcaggggagtcccgtcaggacgttgaggacttttcgaccaattcaaccctttgccccacctttattaaaatcttaaacaacgggtc

SEQ ID NO: 230 - DNA, 10746 bp, Homo sapiens
attgtggtgccttgtagctgtcccgggagccctcagcagcagttggagctggtgcacaggaaggatgaggaagaccaggctctgggggctgctgtggatgctctttgtctcaggtaagacaaggaagaggactgagcaggggaggcgtttggtccaggatctcggggagcccttttctgttgaagcttcagagcacagggccatccaagatagagccaaccagtagttatggcagaccgtgctgctctacccagaattgggagaacatgcagtgtctgcacacaaaagtaaaagaaggagagagtcagggaaaaaagatgtctgtgcatgtcgatgttgttagagacatgcaaagcctagtatgggaataatgatagagtagatctcatcatggcatgatctacaataagtttatttgatgttgaaatttttttcttatattccatcatgatgtgtttgatgttgacaatctgttaaacccaaaagacagaattgatttaacaaatatttcccaggggtctactatgggacagcaaatatactactgctgaggacacagacgtgaccagaagaggctggtgctcattttggtggaggtgatcatcccagctctccatggcacgctggggttggagggcacagttgctgaggctcagcagagccggcgcatgccccagctctttcttgtgtctcctcttacgatccgcacagctcacatctgcacccaaaccagaagcatgcgggctttattcactcctcctcctaatccttatgaataacaggaggaaagtgtcaatatgagttaaaagcgaggcttgccttgggaaggcatgaaaaatcagggagaggtatcctcctgggctctctactttgagcaaagtcatggacaactgccttgaagagcctgtgctcagacattgctctgggtcttcttggagctggggtgataatctagatgggcagaagggagttagctcctcatggacaagtgcatttccttgtgtttgattcatgtttttctgaaggagaactgggagatggcagagggctgaaggttatgtacctgtgtgagagaaaaccagtggtatatatttcattgtgccctgtggggataggttaggggttaacctcaatgctccttgcaactggatacttattcacacttgggccaggacttctctaatccctatcagactgtgttggaccatgtagctcagtgctttaggtggaaccagagtccttgggtttgaatcctggctctagtacttaactatggtgagactttgggcaaatcacttaatctgtctgtgcctcagtttccttatctataaaatggggagaataatggtgtcaactttttactttataaagattaaataagatagtctttaaaaacccttagcacataatacttaataggtagtatttgctacccttttaattaacatattcaaaggaattcccttcttgcaattgtgcacagacagctcagcagccttcatttcttattgtctccttccttctgtgagagacaggcaagtttgcaaactcagtcacctgtaactcccaccttccctggggagctggcaaataaaagagatttatctgtaacattaacttcagaggttagggcttcagtggtggcaacttgaggatggagtctgtgtgtcttccaaagagcccagcacagtgcctatgatagagaagtctcccagccagtctgatgagtgagtgaacaaatgagggaaccaggcttggtttcagacaacactcagcctctggtcaacagtctcttggaggcacattcctgactggagtgtgtgggagttgcccaagaggtctgtttccgaggtttccctagaaactggagtctgctcccagaagaactggctttcaagactgatttcacctttaaactccttgtgagtccctgagttgagtcttcctaaggtcaggcagatctgttggcctatcctggggtgggcatgccagggggctccatgaaagggtaagcacttgtcatttttcaccaggcctgcaaggacctaagtgtgtggtattaataacagcagtactagtgttaccgtgacccacacagtagacccagcagcactgtctagcctgttatttggtgctccatgggggaaggtaccccaggcctgagtgggtaagctacagtctctcagcaaacttagagagccctgtgtgtccagctgaaaacacggaccttggtcttctcacttccgctctgcttggcctcccatcagcaaggctcccttggacaaggccagatgagcatccccaattctagatggttaacccagttcggactccaagaatgtgatggaaactattgtcactgtaacccaggggttctcaaacatggcactattgacatttggggtgggatgattctttgttgtgggggctgtcctgtgcactgtagattgcttagcctggtatccattagatgttagtagcatccacccctctccctggttataacaaccaaaaatgtctagatattgtccagtgtttcagggagagttgtggcggggagcaaaaattgctccccagtggagaaccactgctgtgactccgtgacatcaaaaataggagggggcatttcttggctcaggtaactgggaagtacaaggggtgctcctttggagcacagctgagtccatgactcagataacgtgggtttttttctctctttctttctctcccctccactatccccctcttccttcctcccactcactttctgcctgtttagccattctcgggcagcctattcctacgtggtagaaagtttcacataataaagtttcacatctcattgacctgtgaatcccagcaagaagcatttccattaatggctacagcagtctcagggaggactctgattggtccagctcagccatgtgctccttcctaaaccaatcagcctggcagggagatggggtactttgtgtatgtgtgtgtgtgtgtgtgtgtttttttttttaacagagtcttgccctgtggcccaggctggagtgcagtgttgtgatcttggctcactgtaacctccacctcccgggttcaagtgattctcccacctcagcctcccatgtatctgggactacaggtgtgcaccaccatgcctggctaatttttttgtatttttagtagaggcaaggtttcaccatgttggccaggctggtctcgaactcccgacctcaggtgatctgacctcctcatcctcccaaagtgtgggattacatgcgtgagccactgtgcctggccccgagatggggtacttggattggcaaatcctgtgtcctgtgcccatccttgagaatgtgggctgccccaacagtagagccacacaggatcgttcccttggaaaggggtgctctgctacccaaggaagggaaaaaggagtgccaggcagtcagatatccatgcccatcatgccctccagacggcttcctcactgtttgtccaaaggtcttttgagctgatctccttgccctgacttagatgaagttcctcaaggtgtccttggagccactctctgctagcaccgtgtctttgcgttcactttttatgtcatacgcccttgtaatcgatccctcccaccatgctgcagccactcgtggtcttagtacaatatcccatgttctgtctccaggcaggcagtttcttcctctcaaagtcagtcttcctcttctgatcatttatgaaatttgatcctcatgcaccatatgcagtctcttatagtaaaaaacctactcacagtggaaagatctgaggtctagtgctggcttgcagggcaagttgtattttctctggaggcctcaagaacctcatctgaaatatgggtggttggacaagaaaaacagggggctcctctcctttttccccactcagagagagaaaaataattcctcacagaacccattctctttccctgcttatagaactccgagctgcaactaaattaactgaggaaaagtatgaactgaaagaggggcagaccctggatgtgaaatgtgactacacgctagagaagtttgccagcagccagaaagcttggcagataataagggacggagagatgcccaagaccctggcatgcacagagaggccttcaaagaattcccatccagtccaagtggggaggatcatactagaagactaccatgatcatggtttactgcgcgtccgaatggtcaaccttcaagtggaagattctggactgtatcagtgtgtgatctaccagcctcccaaggagcctcacatgctgttcgatcgcatccgcttggtggtgaccaagggtgagtggcctgggacttggggggaaagaagggccaggtgaggaaaggggcagtggtggtagcatcagcagagctggggttcaggattcccagcagtctgtcttcctcccaggacctctttatctctcatctaaggtccagtagtaagtagaaccttccatgcatgagattctccttggatagcacagcctaattttgggtgctgtggtaggaattggggtacaattaaggtgagtggtagatttgggataatttagtcccattctttgttctccacttagaagtcatgtcctgactccccctcccaaggatgcgtttggtggcatgcctgtgtgcttctgaagcagcccctctcacatctttctgtgggcacagaccacctggggatcttatttcaaatgcacactccaactgaatgggtacaggggtctgcatctctattgatctcccaggtgatgccaatgctgatggtccatggctcccattttgggggagcaagtctccagagctcattttgtgtccccttgtacacaactctactcactggataggagaggggggtttacttatctgtaccctattcatttcagaactgcttgagggaagcacctgtgccttcctgggctctgcacccctagcaaataatgtagtttctgacacaaagtaggccctcaggagatgttgcattaaggaatgaattatggaagacagaggaaagggaagcaggctcaagttcccagcacctggggaattctaagcctgaggaagacaaggtgcacacacaatatattaataaaagataacttttaaagcaatatgccataagccaggtgaacgaaaggcagagtgaatcaagtaagcctggaattattcttggagaaggttggggcacaagaattggtgaagaacagaaggcaagttcatttccaacagtacgaatgacaaaaaattcctttcttcttctctctttctgctctccctcacttcctgccctttttttcttctttccttttttcgatttctgactcaggttgactccacagtatttctttggctttagcaaaggaaaactttgcatttgggccatgctcatttccctcctcagcttcatttaccgtaccacctacccgtccatcaactcatccacattttcatccatacatccatacatccattcacccacccatccacccattcatcatccatctgtccatccatccatccaatgtgtcttcttgcaggtttttcagggacccctggctccaatgagaattctacccagaatgtgtataagattcctcctaccaccactaaggccttgtgcccactctataccagccccagaactgtgacccaagctccacccaagtcaactgccgatgtctccactcctgactctgaaatcaaccttacaaatgtgacagatatcatcaggtatagtttccaggtccctgggcccctggtttggacactgagccctttgtttcccagtctgtgtgctgagaggatgtgaaagtgagggaaaggggagggtggggcaggagaagacttgagtcacattagtctgggtagaaatgtccaggggaagaaggaagtggtgatggagaataggggaggctctcagccaggctgtccttctccccagttcaccttctttgtttccttgcaacctgagtattaaagagagggaaatggcatcttccccaagttccagtggagctcatccaaccccaggggcctgatgggcagtgggaaagcactctgagtgaggggccctggatctagtgttggcctgactaactgaatgtgactttgggtgagtcaggaaccctctctggctttagcttctttgacaattcagtaggcatggtagaaacccaaagctggaagacattgtccacctaataactctcagcaggagctggagctggggctaaatgcagtattggtttttgccttattgttttttaaataacattgttgcatgtgcccaattatagataaatagaatcagaatttttgcagatgaggtccctctcagtatttttaataagatgtttaggagatttctaatgtgtaggcaaacttaagaaccactaacttagcaatttcacacctctttacagttattaaatgttgatttatattagaatgtgtttatcattaaatactgaattatcaggatggaaatacttttccacatcaccactagtctaacatgtcttttttctcatattctcttctagtctttattcatgtttatacatattttaatatggcagtaagtctaattatacatgtttttattcttttccttgctgaaattattctttgatgctgctacctaaatttcataaatataatttcaatgagtgcatatttttctatcaattgggaaagccataacttacataaccattggcctgttcttagacattgatatagtgttgataactctgagataaacatattcttgcagatatatttttcttcttttaaataattaactcgaaatttccatgagataatttaaacactgatatcattttgtatacaaatagcatctaccaatggtcttccaaaagattggaaacaatttgcagtgtgatccattaagcataaataaagcagtgtcatggcaggcttacagacacggatttagtcttttaaatcattaaatagtgtgagttaaatcacattcctgctaaaacaaatgtgaactggtgcctgctctaatttctctatgagtgtagactccacctccatatgggtagtggcagtgcctttttccccattatgttgtttggggaacaaagtgctcattaaacttctgtggaataaatcaaacgaatgatctactaagagtcaatttttttttttcctctactttcattttgcaatacataagttaagagaacataatctttgcccatattcttacttttaccggaaggagggccttaagtgtaagctgtccaggttctgggccttttaatcaaagtattggagaagacgcacaaagtaacaaaggaatgaagcagtgaaagcaggaatttatttaagcgagaaagcgctccccagggtagaagtggccccacgcaagtggctcaagggccaagttacaaagttttctgggttttaagtactccacgtgaagttcctcccagttaccccttatctggatgaagcatttggtttgtggctaactaaaggctaaggtgaattggcgccctctgtgggtaaagggatggtcgtctctgcttggctcagggccaatctaagacactctccctttccagctgagacgtggtggaagggggagggctgtagggagagtagcctttgattctttgctgctggggcatggggagatggggtttttccttttgttttagctttagaaagtttatgttaattggccttaggttccctgaccccagccccaggagttttccttttgatccagctatgggaagtcagcacgaatccatcctagatttcttgcccctagaccttggtgttgctccatgattcagcatgaattggtcttacgttcctgcctccagaccctattctcctgccttgctgctagagactgcatctctcttttatctgttaactttatctatcatctaatatgaactatcctttcagccaaaatccagtctggaaagtggaatccacactagctgtttgaaaagaagaagctttttttctttttcttttctttttttttttgagacacggtctcactctgtcaatcaggctggagtggagtggcacgatcatggctcactgtagcctcaacctcctcccacctttgcctcccaagtagctgggaccacaggtgcataccaccaggacagctaatactttttattatttttgtagagatgggggtctccctgtgttgcccaggctgatctcgaattcttgggatcaagtgatcctcccacctcggcctcccaaagtgctgggattacaagtgtgagccaccacatccagccatgaaacgaaggaatttaatgcagggaattgtttgcccaggtgatggaagagctgagacgctatcctggggatggagaggcactgcagaggtagccactatcaccctatctctaggtagtttccccagaagcaagctgtaaagtcttgttaaaatgttttaggactaggtgttgtggctcacacatataatcccagcactttggcaggctgaggtgggagaatcacttgagcccaggaatttgagattagcttgggcaacatagcaagactccgtctttacaaaaaaataataaaaaaattagcagggcatggtggcatgcacccatggtcccagctactcgggaggctgaggcaggaggatcacttgagcctgggagatcaaggcttcagtgagctgtgatcaagccactgtactccagcctgggcaacagagcaagatcctgctctctttctctctaaaaaaaaaaaaaaaaaaaaaagacaaaaagaaaaatgttttaggaagtgatttctggcaaagccattgaggaagtgggaccaggaagggaaggaagccaagcaagcgtgtcataaccaaggggtatctcacaggataactctggctcagtcttgttaaggagctctggggactcctgggtcacatttggagttgtccctataaggggcagtaactgagcaagggcagctctaaccaaggccaagcacatgaattcctggcccttcagggggttggtagcttgtgtgcagcctcgaaaaaaatgcagatggtggcctgttgggagtggacatgccccaggagttcagcataggaaaatggtaaagcactcagagtggataatgcagagcactggcaggagagacttggggaggaggtgcagtgagcagagcccggaagccaggacattcaggttgcagcactggaatcggggcagatgctgaggatgctgagtgcgccaccatgtgaggggtgagagagatgctggctccctgccccttgctgcctgtctctctgccccatccctgcccccgtctctgccccctgtcccccaccagttgctgaactcgaccagtcaggcttgggaatgtagtcccctgtgctacaagtcagggcccttgaatgggggtggatttcaggcaaataggcagttttctgctttctagctcctttacgccgtttccctctttgctagtttgtgcatgtggttttaagttttgtataggtgggtgtgttgattttaaatcaattgctttgctttattccttaatgtgtttgattctatttcctggtgacttttcttggattgttttttttttattttatttaaatgtttagtccgggggaagatttattctgctacatgctataaactgtagaaaagcctacaccgttaccatgttgctgtccagatactgcaagactatttactaaatgatcctcctgcctctccaagtagctgggaccatgggtgcatgctaccacgtccggcttatccactggacctctgatttccttagacattatgttcctgcatagcactggctctgcatctggcctttgtgttccattgccatctgtctgtccctgtgtcttaccatgccacatccttgtgctctcatctgcttgcatgtctgctgatggaactggccaagtgccctcactcctttgcatctttttattatgatacctattgatgtttacccagaaaccttagaatcatttcgccaaaatctataaaattcatgatgagattttcactacgggtggattcttctcggtttataggtgaggaaaccgagctaaagaggtgagatgaccatcccagtaggcagggtacggtactgagaatagagagcgggtttcctggccagagtcctctctccctaccacatcacagggaggaggatgggctgatcagcccgactgtctccctccagtgcctctcctggacagggacctatactctccactgaattgtttctaatcagtagtttttggcaatgagacagactgaaaagcacagggtcaggcagtgcgggaaaggtggagcaaggatctaagcagaggagagtgggacatgaaggcattttctagagggaacatgtgcgtgtgggagagactttgccagcagtagcgttcagcctcttgtctcccgcagggttccggtgttcaacattgtcattctcctggctggtggattcctgagtaagagcctggtcttctctgtcctgtttgctgtcacgctgaggtcatttgtaccctaggcccacgaacccacgagaatgtcctctgacttccagccacatccatctggcagttgtgccaagggaggagggaggaggtaaaaggcagggagttaataacatgaattaaatctgtaatcaccggctatttctaaagtcagcgtctcacctt

SEQ ID NO: 231 - DNA, 100198 bp, Homo sapiens
cgttattggctgcgggaagaacctcgccgggacctaacccgaagctccgccccctcgcggttaccctggatacccgtcaggctcgggctgcagagaaggtctttggaaactgttgctcagattacaggcgctgggttattccaggagtgcagggtggtggaggacccttgttattgaccccctgcttggttgcaccctcagatagtacccatgagcttcactgttcagcctcggggcccaggcgcttcctggaatctctccttggccggggttaaaatgcagttcccgctcaaaatgcttataggtgcgcgcgttgtgaactccgatttagtagtttccgggaatgcgcggggtctgtctttgctgtccatagttattggttgttttcccagtaataagtgttgattgtttgtttgtttgcttcttttttaagtagatctttctcctgcccaggtccggggttgagtgctgtgcgctcttacactccattttaatgtgtctccataacgttctatttaaggaaggaaactttcaaatagaaattgagaactgcagcacgtttcctaacgggcggaacagctgccggaaacgtcttttggtcactagttctggtcacaaatgaatttcaacagcattgagtccctggtcctatccccgcggcctcccgtccgctgttggacactggctccttaaagtgacgctttactgttctgagtcccataggaggatcagggcaagtggcttcagagatgcagccctcactgcttaacgtcctagttattgtccttgaaacccgagccatctcaccgctcgcccccaaccctgggctctggctgtttaaaagctggagaggaagtgaaagcgtcaagtacagtaagtgacaccctccgcctccgtgtatacataacaaaagctcaggaaacgtgcgggttctaggatatacgagcaaccccaagcactccctcctcctccccacagccacagtggactggaagtaccttttcccagtgcacacgtagggaccattttgacttatactttttcacctagcttgctctgttgtcctcccatcacaacctctgctaatcagcaattctgcatctcctaggtgccttccttatagattctttatgtttctgtcccacgaacgataggatctaattttagttgaggatgactgtttaaaaaatgtttcgataaaccataatggtgatggtgggttttgaaaaacgggaaaataaattgggccaaaagctgagtgggaatgaggatagagagcgaggtgagctcctagtcagggcaagagtagagaggttggagatcctgaggggagggcagctgaataaggcggtacgggctttgtggatcgcggctctaagggtataccagaaccgcacaacagtactttaaggaaaccagcccaatagtggacctaacaccccaataatgggaactggcgactcgaaacacacggtttcagtatccccaggcgccttaacaataagcagcgggttacagaggaaatcgagtctctccgtggcgcttccaggctgaggacccagcgcctaccggccgagcaccccctagggcagaggggcgagggagacccgcgggaaggggcagcaagccgcctgattgacagcccgaaatctgatcttgtgaaagagacgcggagccaatgggaggcagcgatccatcagtttggattggaggcccctggaggagaagtagaggaaaaaccaccgaattgagctctgtcagaggcgctttcggcttccaagggggaagtgctgggctataattaatgtttttattaaatttggagggaagtttttgcagcctttcgcctagcgtggccttcaggtgggtctttccaacaactttttatgtctctccagataattgcatggttgtgggtcgcaaaaactatcctgatgaaagaggtgtctccgtctctttagtcccgttaggtgcaaagcaagtctcgttgatcgccattgctagttttgcacacgtttgcgaatcagagctgcccggggtacaccgaccgcgcagggaaacatcgagagtgtaaataaatacatcgcctcttgttcggatttttgctactaccgaaaatatgtaaattgtgaactctgttggctctctttggatccaggtgaaggaggcggtgtagggagggttatttttgtgaatgggactgtcggagggtaattagctatgcaaattcaagagcttcattcatgatttttttttaagcctaaaagccatcttgttcccctctaggttgatagaagtccagatcctgaggaaatctccagctaaatgctcaaaatataaaatactgagctgagatttgcgaagagcagcagcatggatggattttatgaccagcaagtgccttacatggtcaccaatgtgagtgatcagtttgaaagttgctgtttataaacttgactccgtcgggggtggggagagggagaaaatgagaagggagggggcacgggggttgggattgcagatacttatctgctttgttgccactgtagggcgactctgcttctagaagcccagtcttcaaaatgagcttacctttcagtgatttggataaggcatagttttgtttttaagacccctttttctgattaaagtgcccaacatgagtggaagaggagatggagggcagcagcagctgctgcactcaaagtttttggctgggtttgtctgccacattgaaaagaatgaagttgagacaaatgctgacactttttgtttatatggggtgtttttgtttcttttttttttctcattttctcttttttttttttttcatttctctactctttttgctttttttttttgtgggggtggggtggggaggaggggctgtccaagagagaataaaacccactgttttaatctagcattgaaccagcctaaaaacaactttaagtgtaaatgcttcaggttgttttgatgctgagataccatgaatatatgattgataaatagtaatgtgctaagatcggcactgggaagcaactctccctgcctgcttaacataagctttcactgtcaaataagtgagaaaatgaatattagagttgatactatggacttctatttttctattcagagaagatccattagacttatgtatgcatgtctgtgtgtgtgtgtgtgcgcgcgcgtgtgcgtgtgtgtgatctgaggtttacattcttttaaaggattttatctttccctttgtagagtcagcgtgggagaaattgtaacgagaaaccaacaaatgtcaggaaaagaaaattcattaacagagatctggctcatgattcagaaggtgaggtttgattttgggctgaatccccatttttttacctacactctccaccctgctaaaagaaaaggagcacttcagtcttatcttaaaaataataaactttgaaattactgaatctaactaagactttaacttggaacgatttacataatgcggcagtttgcatgggagactattttatggtcctatcacaaagtaatgaaagaaggaaataaaaacttctcaatgacaaccttcttttaatcattgttttgtgtttaaatacctttgtccatggggcatataactcaccccattcactaagataacaatttaaaaatatccaatacagtgggacaaattcagcagctatgtacactgcttacttttttctttctcctttattacaagttaaacagtattagtgattgtttggtttcccacctcctttacactaaaaccatctactattaacagaattttcaagggtgattttgatgactaaattgtgaggtcataataccttgtttatcgaccataatgtgttcactgaatcatacttaaggcctccttaataattataatactatttgggaaattagtttgcagattctttttatgaactgttgctaggatgtcagtatgttacaaattattttagccatatgaggacattcataataaacttaatatacttagatttaattatcaaagtttagttggcaattttaattagatatactgaattctgaaacttcctcaaatcttcataccatttaaatacctccctctctccctccctaacatgaccatatagtttagaacttgatgagaacctggtgccaaagaattatctttctgacttttataaacctattaatgtagaaattttcctctaaaaacttgtatttgaagtggtttcttttagtttcgaggtattgaagttgaaaacataatactttgacagttgtaccatgtaccattatatattttatgtaagattcagaagatataaataaaatgcttttcagtctttctaatcttccccctactactattttagcaagagttaaatatatttaaggaagatttcagtgaacagacacatattcacctcagcctttttgtgaattctggtatccctgagcttatttattaagctgtttgttaaaaagaagaaaagatgattgactttattctttagttgactaaaataatttcttaaagagttgcttaataggcatgaaaagtaggcagtattattgagatatttaagttatgcctcttttttttatttttatgttgactgcgtctcttgaaattaaatttatatttaataccaatttcatgacaaatatttccatttaatgaagattaaagatttgcaaatcttatgtttatgtctttgacttgttttttagaactctttcaagatctaagtcaattacaggaaacatggcttgcagaaggtaaggcaaaatttgctttaaaaggggggaaagcaactctagaaggagaaagaaaagaagtcctgaacttgctgtcttaatattcagcccaattaattgagctctaaaagagccacctcatgtgtcatgcatacattagagcctctgatgagtttgtctttggggactctggggctgtactacccagtgtcatcacaaattaccaggagaaattgcttccagctcacaatcacatctgcttttggcaagaactaatgcaccaagacttcaagttctaagcctctgttcagattttaattgcaattgatcaggtttatattattgtacctccagagacctcctagagccagaacccggctggcttgctgtttcctttagagcagcgcatatcattatttggtgttctggtggaggacttttctgatggcagaaattagtttctctgggttcatcaggacgggatgcttcaagatttaagtgcaagtgtcttctttccaccttgttcacaacacagaacgttaggtgtgtatctaatgcttaggaaatctatgggtttaaaataaatgggagatatgaggattttaaaaatgttttccatgtgttactattcatgttatgtttgctgaaattgacctttgctattttgtcagttttattaggatttatttaatagagcaaggatacatttaaaggcattactttcattttgaattattttttgttaaaattttgtggtgcaatctgttatatcttttatcgtatgcaactttataggaaaatgagattgcttcataaagctttatacaacttcaaaaatgcctaatgttgagggacttctgttggcattcataatttgaaatttttcttttggatttggcatacaaatgtgaaacattaattttatggtgtggtttgtgggaaatacaaagagaaaaattatagatatttaagcattgagtgtataacagtattatttgtgtgttcacattatatgggaaacatgcaaattttggaacagattttaagatggttaaaaaggagagagtgggtctctttaaatggaacccaggtgttactgtagctactttgaggcagactgacgtgttttatcggtggtcttgaatgcagttgatcaagttgctgttagcatgtaaaataagtttctttgttttgctgatagtctagttctccaaagagctttttcaatctttatcaatctttaaagttaaatagctttcctaatagtcctttgaaaggatgattgtatttatatgttaatgaaggtaagacttactgaaagttttggctatatttaaggatcattttgctagtctgtgtaaatgaaacttactgcaatacattactttttattgcaacataagtcatattcagatacaagtttttcaaggaaaatttgcatggagattcttgtattaacttatgcctattagttttgcaaagtcaaaggttgtgagaacattacctttatgagagaatttatttgcttctccaaaataacttaaaatatctattttaattgttctggaaggtttgttggttcttagatgtttaaatctcattgattccaagtcagtgcacttgctggcagattttgaatgtgcatagcaactctgttcctggaattttaaaatgtggaatctgtgacagactcttaccattttataatcagtttcagtactttttttttaacttttgacttacttgttttgtgtcttgtagctcagataagtgattgcaataatttatccaaatttatcttttaaaactctgcagagaatagtctttctccgggattattaacatacctgtaaatcaaacctgaagatttagcactacaaaaaataatcctagaaaatgatcagtgtatttggaagaacatggacctttacttagaaaagaattataatttcaattaagttcaggaattaatcatgagtgttttatatgaattcccaggtggactactatttacaaactatggataagatttcattttagaataatttaagcgttttcaaaacagtttacgttaatttatctaatcacgatgtaagtaaaaagttgttaacgtgatgtttaaaacctaatagtgagaaaagagatctttttaacttcttgtttctagactccactttttttttgttttgagaaattaaatatattattttgcactgatattttaacttgacttatcccacctcttgaacggtattagctaagaagagatccccaaattaccctagtttatttgtagtgagatgtgtccatttatgtctttctggacatccagaaattaaaacattgccaaattggcagaccatgaaccgtttacatatttcttttcataatgctccatagccaagaaagtgaccatggaattttaagacatcttgacccttttaaaaaagatcattggcagttaatcaagtttctcgcatgagttagaattccactgggaagttaaacaggtctaaaaaccttattagacataagagtcaagttagttgtcatatgtcatatgataattgtgtttttgaaaaattataaaagtcctcaaatatttgtgaaatgatatcttagcatgtttagtttttttttttctgtaagactattcataaattttaccccaaatgcaacatatggattagtcatgggtaattattatggattataaaatttcttttatttctaaggggaagttggaatagataaggcaggactgtttgagggttgggatgggaccagtattttcagttcagtaaagtcctctgtaaaaatatacttgcattctaccaagaaagttaattcccatacagagatttaaatatgttggtggagaatataactttacattaatatcatttcccaagaaataacactgcaatttaaaggttttttttttaacatctaaacacagtttaaaacaattatcttattctgaagaaaactgcaaagttaatgttttcagtaaccacagtagttaaaaaaaaaaaaagtcagggaatatgccaattttaaaatgttgccatagtcactttatgttataattttactatgtgcaattctttattgattctttgtcttttaaattagactgctactgacagaaaggcaattgcaattatttgatcccatgaaataatgagtttaaatatcaattctatcaacatcatggtgatgtcttattcttaacaacctgaaagtcatagttaaaatggaacctcttgtgtatccagaacaaaaatagaaagatgtaaaaaattaagacaggattgtattcttccaaatttgcttcttaaagctcacctactaacacaacttaaagggaaataataattttcagtatatatctgatgtaaatgtgtagctgctctcttgactgttattttgtttccggtctagatgttctttcaggttcactttcatcaacaatattctctgtcttcagggtaaaatgttttccagtggttttgtattgagtcaagtttagtgctgcctccacacttcgagtaggagttttatctgcaagaacaacctttctacagcaaagcttattacatcatacgaataagggttttttccttttggttttatgtgaccttcaaacaacagtcaggtcaacttaaaagcagagatgtcattactttcccctcaattcgctttaatggctgatggtaaatttatattcaaaatcataagtaatatgtgctattgttacttactatgtgtaatgtcatccacaatatacagtagtcataatacactcatttttatttttcagaaatcctacttttttttaatggaacataaaattggttatgtgctcatgaattattttcccccacttggtgcaataaggattaaaggctttaaaaacgacattattttatgtggtttacataaaacatgaatttagaattaagcattgaattacagaactccatataatctcttataattgaacaacaataatttcatgtgtgtgtgggcggggagaggatgggctatcacccctctttttgatgtgctagaaaataatctaaaatatgagagaaagacttcccatttgagtttgacttaaagacagcagataaagtatattttatttctaaacattcattggaattgcataaatgttttttcatccatgttttatttacaaaatagaaattttttttaaaaatagaaaaataggatttggtgtagtatagtgtagtttttccagaggatcctaataaataaaatattgctaagcttttctatttcagttataggaaatgtgcagtttgttacattttgtagtataactttattccctttgatttgtgtataatgttataataaaaaataataatagagtcagacctctgtagcattagagaaaatatttggctagaaacaacggctagttggctctgagcttcccttaagttttcaagttactgcaggtcagttttagttaggaattgaagctgatttgacacaacgactaaaactttactgttacagtaagaatatagaaatatggaaataatgccttgatcaagtattaaaggtgttttgtcattggaaagttgcctcctttttgtatgtttaaatatgtttatacttctgcataattaatgcttttacatttgtacaatcattttaatgttaaaagtggatgtggtataaaaccaagcttagtggactcatgattattttgttccatggcctgtagcttcaatttaggattaaacagcataccactgtaggaaggtggatttttctttttttacttcttatttgaaataaaatttaaatttctcatgagaaatttgtttctaactctttgattcaaagagaaatgctacaaagttcagcaaacaatctacagtattcttatgataaaaatagttggataatagaaaagaaaaataaggcatttccgtaatggtttttcttttccctttcttgaaaccttctttgcatctttctgtcttttccttttttcttccttagttttatacatgcaagtttctgtaacaagttactctgtaaagcaggatgcatgtatgtatttgtgtgtgtgtatatatatatatgtatgtatgtatgtatgtatgtatgtatgtaactttgtaaacgtcatttatttaaatgtgttcctttaatggatctgagctctgagacagagcaataaaattggtgtgtttatattgcaagtccaagtttacttgctttagctccctggaagggtgtgacatgaaaagattgtggttgggccacatggctcatatgctggactgtgtttttgtgaatggaggcagaactccagttctgcctgcttgtcttgaggaattgctgaggagatcagctgtctcattcacgggcagaaagaatgactcatacatcttccgccttgtttggctccaggtcattgttacagtggatagaactggttttaattaaatattaaccccttttatacttgacgtttgttttatttgtaattcttccactttttccttagctttaaaaaaaaacccaacaggcacatagtttgtaagaataggagggttttcgcttccctgcagccaaccttggaaactttttcatcgcttactttttcttaagtaatgattattatttcatttgaaagttaaaaataagcataacataaaggcaagctatatttaaaattacccatctctaaggcaatattagttaagaaaagtattaaaattaaaaaggagaattggtgagtttgtgacatataggtcatgattaatatttttatgaatttctttctgataatatgcattgatacgtagcaaaaagacagaaaacagtaaaacaactttggataataatctaggtaaaacaaatagctgagagtgcagatactgcccttttaaagccgacatcctgagacttgatggcaactggtctattaacgtgcaatgaactgatagagccgctccagctattaccaataaaatccacatgcttaatctccttgaaagcattttattggtcttttggtatatactttctccccttctcctttcctcctcttccccttcgtctttaattacatagtgtggggaaacattttcattccccaaaggtgattatatccagcacagtttataatagatagtagtggaaaaaacattgcttttttaggctgacctctattgttaattttcaactttggagttggtatggcttgctgcaagttttcaggcagctgcagtttgctccttcacagtattcccctgaattgaagaaaaaaggaaatgtatgatacaagtgtggcaatactttgtcatattttccttgcctagatccaacttgtgtttttagttaactgctttccgtttactctaacttgaaattagaggtatacttaagcctttgtctatttaagtagcatgctgcttcgtttggtctattcagtttcttaagattagcttctgtgaaaatgtgagtcatatgttttttgttaaaattctgtaatatgttcaggaataagtgtgaagtatttattcagtatgttaaggagttagaacagaaataggaattcttattcttactctttacagattgttatcgtgcagctattttctgtatatttgcgaggtataacttctagattattctactcctaaaatttggcccttttttcctcacacatattccagcacacatcacacacccatcagtgagtctgtgctgctcttgcagtgacatatattaggaagttgcaaatctgcttacgatgctacaaaaacaaacaaaagacctttagaacattcataccatcatattcagttacaagtatacttttgttactcaccagctatttttaacttttcctgtaaagggatattatatttttattagattcttataaatgttggctttttaaaagcccagtaattgttgtggttgatatatttgcatctcaatagttatatctgtttagctgttaattctgagggaaaaccaaaacaatgatataatgggaaaaatgtgcaggatttgaatctgtgtacttgctgttatttattaaatatatatttaaaacacttgtaatttttttgatatgaagacttacttgaaagcacacccttcgccttgtaatttatgaatcttttagaacatttttttctgcagtgtcaaaaaaatatgttgtgttaatagctgagagaatgctaatgtacagattttagctgtttcgttgcctctctagtagacttcattagaagtaaagatattaaactgagcgttgtaatgacatgtacttttttgtggatgacttgaaagacaagggttggtgggtagaggactggaaagaagaaaataaggaacatttcttgagtagctggcattgcgtttagactgtttcatttaatcctcaccaaaaaactgtattttcactagtaaactgataagtaaaattcagttctaagaggttcagaaacttaaccaaagttgcacaactagcatgtcacagaattaagatttgcagtttgctaactttgaagttgttacccacagtatcagatattggagcaatatgaagagaaaaaaattctccttgcaatataggctgatcaaataggtatcagttaaaacttgaaaaaattattaatttgtttgattttgtttggtagcgggggtagagtgcattggtaataaggttaattattggtgtacagaagagagttgttagaaaacagttgaatgtcaaactgcatacgtttttataacaggcacaattatcagattcttatgctcttcataatataacgtaaattttattcagccaaatgtctgtttttaaagaataatattaaactaataaaaagaaactttaattctgtatattgtattcttttttatataaaatttttttaaaatgtagaattcctttttatgtagatttttttcttaagccattcagttaccaacctgaagcattttcaaaagagactgtttattttaataagcattcctcatgcagaataggctcatttaagaaagttaattaacgtctatttaaatatgacttggctggataaaaaagtttcagtattacgtaacactaatgaagtaatactacctagtcaaatgacagctaaagttaattaggatgataattcattatatttttatcaaattaaaagtaacctaacttctattttttgggcgtgtgtgtgtgtgtgtgtgtttgcatgtatttatgtgtgtttgtgaaagcttattactaatattcagtttggaataggttacttcgatgtctaaatcaactgtgatgaaaacattttagaagtgaaaaatgcacttgtgttttgattgctgccaaatgcattaagtccttgctattcagtatttttccttgactaaaaataggaacgtcttttgacatgaggactgacgaactagtgatattctttttgttaatgcctagtagttgccaggaaaatattttgaatgaaaagatgacatttgtgttattgtttgttattttgttaatgtgaatataatctttgaaatataatactttattatatatgagccaaatcaaggaccattcttccatttaaaaacctttgtagcatactttggcaaaattcagtgcaagcatcttaaaatatggtgtattttgcaggacagagaacataccagcagacgtttctaaaaaagcagagagacgtgtgtgataactgcacatcacttaaaataattgtgtggttaatttaagtgggctgcttacacactggcagtgggtgaattgaaatagcttttgctctattcttgaaaaaaaactgcaggaaatggaaattctatagctttctttattttgcatctcttttatttccatctggcaggtgaaattcggagggaatacacctgccatcatcctatttctgacatatatatggttcctaggtgacatcaatgatccccttccatttctcctcctaagtagtgttgtcaataccattttaaataggagctcattggcaaataatcataggtttgatctcagcccaagaagatcttacttgacagattttacttgacattccttatgcttttggcagtttctctcttaattttttttaattttctttttcttcttcagctcaggtacctgacaatgatgagcagtttgtaccagactatcaggctgaaagttgtaagtatagtatgactcatctcttgtatttttctgtctttctggtttccttctttcttctttctctttggttggttttcacgtccagtgtcttgtcttacattgtaccagcacctttttaacttacagccataagatgatttgatttgttaggttgtgacatcagcagaaactctgttttgagcagaatgcttgaattctgtatatcggaagagaactccaaatagtaggcaaggaagactgagttgattgaaagatggtcttgttcttcatattggtaaatatctttgggaggaaatagcatgtgatccatgaacatgcacatgtttacttccagtttgccaatatgcttacagagaaatgcctggatgctgatgggaggtagagttaaaaactacttgagattagttattgtataatttataaaagattctggaccaaacattcattggcttattgtagtattgtacattcatgaattgtcacctgcttttatttaatttttagcctgaaattttctgcttcctggttgcagtagcacaaatggaagcagccattggcttctctcagggttcttccttctgcgttcctttccctaagccttgctcctgggtctgtcagagaatgcgcaaggagtgatgcatggagtactcactgtcccttaattgcagagtgagcgttttgcctgtacaaacgtggttgccttggggtttactgctgatatttataatctgccattctaccagctaactgctgctactgaccaaaggagcaaatactaaggaaaagggtataaatgccatcttaattatgaaactggcctaatgcatttttgttctgttggtgacatctaaatttgttttattttttctaatacagatacctgcattacttcaagtaacagatgttgtgggcagtgttttcagcatttatgtttgatatgttaaatttctcaggcgtagagggttgtgcaaggttttgtccagattctctaacatgttacatgtttcaactcagcttggttataaagaaattactgtggtaaaatatacataccacaaaatttaccatttcaactatttttaagtttgtagttcaatggcactaagtacattcacattgttgtacaaccttcaccactattcaacttcagaacttttttgtatcccaagctgaagttctgtacctgtaaaacaataactcccatttctctgccctcagtccctggtaaccactgttgtattagctttatttttgatccgagaagaaaactgtataatgctgtttgatgtctaaatacaggtaattgacataggctttcaagaaacttactcagcaactatatagaccttaattagacacccttagaaacactcccagaaggatgatggctaatacaagtcctccccttcttgattaaagtatgggaagagaatgtcatattgccaacatttcccttcctatgggcaattgaattcttctttctaaaagctaaacacgtcgtctgagtaaaagaattaatctcgttgatattttacatccaaagtaattggtaacaattccaatactataccaattgtcagggtaaaatgaaccacctataggtaattttttactccttttcttatttgacctcttttcagcttttcttattgaatatttagtctctttgaactcttttctgaaggtcacactggcgtgattttcttcctttatttttttttgttttttacacccttgaccactccttcttactcaactcatcttccttccctcctctttgtggacctcttctttccctagggttctgtcccgaaacctttcctttttttttttcttttcttttctttttttttttttttttgagacagagtctcaccctgttgcccaggctctagtgcagtggtgcaatcttggctcactgcaagctccacctcccgggttcacaccattctcctgcctcagccattctcctgcctcagcctcccgagtagctgggactacaggcatccgccatcactcccagctaattttttgtctttttagtagagttggggtttcactgtgttggccaggatggtctcgatctcctgacctcgtgatccgcccgccttggcctcccaaagtgctgggatcacaggtgtgagcccctttcctcttattttacatgcaccatgccagcactgtcccatagaactttctgtgatggaaatgactacacctgtgccacctgatacagtgtccactaaccacattggccattgagcacacgaaatgtggttagtgggactgaggaaatgaatttttaactttatttaattttgattattttaaatttagacatgtctggatactggctactggctactgtattggtcagcacagctttgaacagcgatgtcttccacattgttgtctccagcctggttcttccctccgaagctgtccattggacatcctcacctgatccctgctagtgtccctgtgcagattagaaaaaggcaacacctctggacttgctcccttagcccttggctgtgcattgcacaaaacaccatctacacgccaactccaatctttaacgcaacactccacagacaatttacactcagcaagtccaacagtgaaatcatgatttttcctgaccaacgttgctcttttacttctgttgcctttctaagttactggcatcaccatccaaactgaaatcctgatatttatccttagagacctcggttctttacaataaacctcaaattgctaaccaagttgttgatcctagctttcaaaaatatcttaatttcatggcctctccttcatccctatttcattgttttagttcacacacctacattctgccttgactgaacttctgagtcagccttttggttggttttcttgtcttttgattttccctctttgcaagccaccctgtgcaatagcattaacacacagctatttggccttgttacttttcttcttaaactgtctgcaggacagagtcctatttctttagctgtacggaaaattcttctacaaccgaagccttgactgtcctttcggtttaaactcttgctactccagtgccctgacttttcctttcctctgtactttagcccttctaatttttcagttatctgggcagattgagctgttttaaatctctttgcccttgcatgtgttcattttgctttaaaacttttcatttttgttttgcaatctggtgaacctcctatttcagactcagcttagatttcacctcactgaagtctttctcagccttttcttgccaccctgaccccacagagttagctggactccacagcatcttgtatattatatttattgtattatagtattttagatacatttgtgtctttgacaagattgtgaacttcttgagggtacaagaaacacgtcacattcagcatggcttacatgttataggagaacaataagtaaaattatcattgcattcatgatcaccttcttagtgcttatttcctcctaagcatcttcagagtcttaattcgtttcttaaggtagaaacatgatatgccttaaaactgcacgtatagtctcattctgggaaaacttgccgaaactatgaaagtttaaccaaatattttcagaattgtgaaggtttattttactttaattagagaatatttacagtttaacaaatatggctttgggacatgtaaataagacacacaataattttaaaaaacccataaacagaggcaaaaataagtctgaaatcgcctaatttaaaaaaaaaagtggaaggatatgttatttcaggttttcacagacatgaaggactattgtttagatcataataaccagctaattttattcttcaccgaagaaaggacaagagggaaatgatttaaaaagaagaatagggcatttgtattagatactaaagaggatttctggatgcagaagtttatcaaatattggaattgagaggttagatggtctccaaaatgcctttaagcagatgtttgattctcgtgcgtctgggtatgcttagtgggggcagagggatctatctctagaaagagaaagaaactgcatcccctctgtgtggcctgtctgtaaattctatggggatatttttaaaaatgtgagtaatcaggtttccttgcatacctcaatgaaatcagatgcttctgccttagcttttactgctttagtcctttggtaaatgaaggttaagagagtgaagagcaaaattttgctcaatactggattatagaacatgcatttgactgtaacatgtttaaatgcatgtagaataatagagatcagagcatccaaaaattgtgaaaatgagattaaatcacaacacttgagaactttctaaaaatttccctgagcattgtttgttgctgtttacaaaatattttaattggaaatgtggaatccagtgatggtatattatagattgctaacctttgaaggatgctaactttgaagcaagtataggcattaaaaataagtgaaaacagagcctgggcatggtggctcatgcctataatcctggcactttggaaggctgaagtggagaattgcttgagctcgggagttggagaccagcctgggcaacataatgagaccctgtatctatcagaaaataaaaataaaaaccaagtgaaaacaagttcctacaagtgcatgccaggaaatcgatgaaggctaagagaaacaataacatgcttttaacaaattgtttattccttagcaataaatcttttcatatctcagacactctgttggaaaaaatagaattacgttaggatgtgcttaatccagaagaaatagaagtgtatcttctcaaaaaggacaaattaaggagtatttcaaacagaggtgaaccttatgtttctgaagtggatatacatttgtatttaaacagaattttcctaaattgtttactttaagtttaattacatcaataatgttatattttcaatcttattttattctgagacagggtctcacttggttgccctggctagagtgcagtggcatgattttggctcactgcaaactctgcctccttagttcagcagtctaccctacttcagcctcccaagtagctgggactacaggcacgcaccaccatgcccggccaatttttgtattttatagagagatggggttttgcccaggctggtcttgaactcctgggcttaagtgatctgctcaagtcggcctcctgaagtgctaggattgcaggcatgagccatcatacccagccttaaatcatatattttaaatttagttatatcattttttttttctttttgagacagagtctcgctgtatcatccaggctggagtgcagtggcacgatctcggctcactgcaactcctgcctcccggattcaagtgtctcttgcctcagcctcctaggtagctgggattacaggcatgcgctaccatgcctggataatttttgtatttttagtggagacggagtttcactattgttgtccaggctagtctcaaactcctgacttcaagtgatccgcccgccttagcttcccaaagtgctgggattacaggtgtgagccactgtgcctggccgttatatcattcatctttgaaaatctaccacctttcattttgttcttcgtaacaaagttatgtgttatttttagaactagtttgtttccatttggttacattagttcatttcagtcttttctctgtagtgattcacatgatagtgactttcacatttacattttatcttcttccagagcatttccaggagtgtgcataagtcccagggttatgcaaaattcccaacagaatagatccttgtaactctactgctttgtcttacactcagtaaaacacactggaatgcaagtccattggaaaaaatgttattaaagaaataacaataaccctgactcttcactatttacaaaagtaaatcttttgcaaacttctgtactttatcagatatctgtaatacaatactagaggaccatacaaaaatcatccagacagacccttgtgtggggactcaactgtttaaaaccactaatattattacatggatggcactttaagtaaatgaaaatcataactacactttgtttctttaagaatttctggttttaagaatagcatttgggtcgggcacattggctcacgcctgtagtcccagcactttgggaggccgaggcaggcggatcacctaaggtcaggagttcgagactagcctggctaacatggcgaaaccccgtctctactaaaactacaaaattatctgggtgtggtgtcgcatgcctgtaatcccagctactcaggaggctgaggcaggagaattgcttgaacctgggaggtagaggttgccgtgagccaagatcgtgccatcgcactccagcctgggtgacagagtaagattctgtctcaaaaaataaataaataaaataaaataaataaaagaaagaatagcatttgacttttttttttcaatgaagtggaaaaaagaaatacttagattactgttacaaatctgcttctaaaaaaactgaagtcagtcaggtctgtgtagaccctgactgaataatttgtgttaacacgtacctgtccaggatcagaaaaattccatttgtggtttgttttcataatttcctgcctttttactaagttaccttcctacatcttgtttctttcaacacatacagtgagtactttataaagttgattttttattactaattttgaaaactttcttgcccgattaagtttttttgatatgattggtcaggaaaacttcatcttctttcgtttttctgactgcttttaccaaaatgagagcacacactgaaagagaaatggcatttttttggatttaagaacatgagttttttggtttgttttcaatttcaaaaagatttaaaactttttttgaggcatatttaaacatgttaccaaatagactcaaactatccatttcaagcatgactagttgcataccttctcgcccaagttagtattcctgagagttatacgatagctacctcttgatggttctgagtttcttttgggtatgctttttgtagttgctgctttgtgtgtgtgtgtgtgtgtgtgtgtgtgtgtgtgtgtgtgtgtgtgtgtgtgtgtgtgtgtgttttgagatggggtctcgctctgtcgcccaggctggagtgcagtggcgtgacctcagctcactgcaagctccgcctcccgggttcacgccattctcctgcctcggcctcccggctagctgggaccacaggcgcccgccaccacgccaggctaatttttttttttgtatttttagtagagacggggtttcactgtgttagccagtatggtctccatctcctgtcctcgtgattctcctgcctcggcctcccaaagtgctgggattacaggcgtgagccactgcgcctggcccagtttaaatattttgtcaaagcagtttatgtacagagtaggaaaaagtgcaaataaaattattccccgttcctgcaacccacaactcacagtcctctctagaagcaactgccttttagttgtcctacatactaaataatatgcttgtactgcaacttcttgttttattagttttagattttacctgttgtcctatgaagatagaaaaacattttggataggttttaattactttaatgccggtaatcagctgtctgattctacttcagtccgtattcagacctgggcatgaataaaaatcatttgggaagcttgtgcaaatgcagcttcctgtttcctatcctgtgagagcttgacattacaggcctagaactaggcttctgtatctctaaggaactgttaggtgattctgatgcaggcctttcgtggagtgcaaggttagatattttctcatatacttaattgtaaaataaagacagcagtatcagtcttttgcaattaagttgtaagatgaaccttgccattcatacccatataaaatttgttatgtgatagaggcaatcagtttctggaaaatattatttaagtaatatattgtcatcttatttttaaaatatactagggaatcaaaaagcgaaggctatataaaaatgatattttaaatatattcttattttatcatctttgctagaattatatatattttcctcttccaaagattattctctattttagctgtgagaaagtcattgctgattgtagatttcttttatactggaaccaattctagtttagaaggaacttcccaatgctgattagagagagccaaggcattgatgacccaccctgttctaggtgtgtctagtaggaattcttgtcattagatgttctactgttccactggtgcagatgtgttccatgtctgtcacaaagcccagcagccccctttccagtaaagcgaaaattttagtttggtacttgattgttttacaaggaatacattttttaaatcaaaatgaaaatccaatgaaaagtactctccatcttgcaagtaggctctcttgcaagaatttttattttagataccctcccaggaatccatcaagtccagtaaaagaaataaaatctaaatcatagaccttgggtatgtctcttaacctttacttacttatctgtaagttgacagggaaacaaatcttttaggcccagagccacattatgattttgtgccagaaggaaaagagaaaggatactagctaaatctggtgaatgcatgcttgacttgaaaagtgggttttagaaaaaaacgtaattcatgggggaataatgtaagtagaatttgctatgaaggacactttcccttataggaagtaggtgtactttcttttattggtatacttataattttctcactgtaagtatacggaatataagtattggacaggtgcagccaatacttatattctgtatacttacagtgagaaaattacattagtcttgattttagtaaagtatgctctagtagatacttttcactatttttggttttaccagtttattcttgttaaggtacatagggcaggcttaccgcccagatgaaaaccaaaaactaaaattcaaaactctacaaaactggtgcttgctcttccaaagatgaaagctaaaaatatatatattaacccaagtctttagctttttctttcctatttttcttctttaattttgtccttaatataacaatatattgtagaaattgacttttgaaatgtgctcaaaggaagttatgtcagcaaatattttttacttaccctccctataattagtcacaagttattttgaagaaagtgatctataccttctttggttgaacttgacctcatattaaataattattttgttatacaatgaatggacttgatagaaatataagccaaacaatatttattggaaaaatctaggtaaaggatgtcagtggaaaatatttgcagaaccaaatattatactttttgtccccatatttttaataaatacacatacatctatatattctgatatgtaaaaaagtaaacacaacaattattagtatttgaaactaaaataaagcagtcatgaaaataaatatatttgggggctaccacctcatagaatatgtaagtttcatgaaataagatataaagaagaaataacctgagctaaactagtacatgtggaccttcacatcgtaattgtatgcttagtgtttgttatgggtttttattggtatcatttttccactttttttaaatcataataaacatgtatttaagatgcacaatgcatatttgcttctgtctgttactgaattttttcctaatgagagttggtgctgtatcttactaggtaaaaattttggttagatgctattgtttttttaaatctaaagcactatttgcatttgacagtagctaagggtaatgttaactcaagaactccattattggcaatatatcaggaatggctagattaaaaatactgtttaaacaatgtctgattaagctttaagatcagaaaagtacctttgtgcaatggttttgtatgtaatcttttgaatcttttgtaaatctagagtttagcaaagaagtttttttggtttgttttgctgtgggtatgacattattaaactattcagagatttgtttcatagttactcctagttattgcctatatagtcctgttttgactagtttttaggtcctgttgaagaggcttgagttgtgatggaccctttaattatcttttattgtagcagaatcttgtattcacatttctgtttgcaaaattggaatgattatattttgcaaatgagatccgtatccattactgttattttttatgatttttaaatatgaataataaatcttaatgtataacagttcttattttacctatgagagtttagtttaattaatttatttattgggtacatatgctacacagttgtagtctgtacaggtgttacgtaggtttataagactctagatgtttattcattcaacaaatgtgttttgagtccctattatatgacaggctttgtcctagtcactggagatacagtggtgaaaaaagtcagaaaaatatctgctatcatggagcttatgttcttactgcatataattgataaatgaagttgtatttatcacatattgagtaatgtgaaattatatgagtgatgtgaaatctatgcataatcactgtgtattcagactctgatctattacatattgaagaaaatgtgcttaggtttcatgtaattttaggtttttttgtttgtttgtttgtttttgtttttgagacagggtctcactctgtcgcccagtctggagtgcagtggcatgatctcagctcactgcagcctcagtctcctgggctcaagtgacctcaatctcctgggctcagatgactctcccatctcagcctgagaccataggcatgcaccaccatccccagctaatttttgtatttttttgtagagatggggttttgccatgttgcccatgctggtcttgaactcctgagaccaagcaatcctcccgccttggccccctactgtgctgggattacaggtgtgagccaccacacccggacttaattttatacttattttaacaaaatgtactctgtccaaaggcaaggccactggattccctagtggatgatggctatcagtgtctgtcttaacaccttgttgacctatgctaaaattcatgttataggggactgacaagaatatctttggacttttaaaaaatgaggtactctactgttaagtattactatttacagagtattgtcctattcattgagatcatatttgttctttaagattcagatcagatgttatttttcccttgattatcttagtcagaattaacaaattttatgtgccaatacatactttacatagatcctaattttaatcctattttcattggcttgtagaggatggttcatgcccggtttatgtgtatgattcacatgtttgaggtattcattgaatactgaattgaatgaatagtttcttgggtatttagaatcttattttttaaaaaacgtattcatgcacaggtggcttgaattgtttgaaaacgagtgccaatatctgcttttatttccctctgttttatttttctttgagggctaatggaaagctgtttgcatttatgtaacattagagctaaatctcagttatcagattagggcactctaataaatattattagatactcctatctcaccacacatttctcaataatctctattaggacaaatactctgaaataacttgatattattcctgttttacatgaagagaaacccagggcataaaataatcaaatagctaaggcatgtgatgactgaaattacacagctgagaatcccatctcatggttgcttagtctatgcagatcttccctccctgatagccaatactcagactacacgtacaagcttcaaaactgtttctattctgaaaaaaaaaaatctgcgtggctaacaaagaatgtgtttcactaatagtttttgaaaattattctcatcaaggtatgatagatgaagagagaccaagagcaccttccaatagaggtttgtctcaagaaagatgttctgtgaactcatctgagcgaatagctgtgagaaaaatagatgggaggacatggtgttcgggaactattccagtccttgtctaggctgcagtgtgtgcgcttctctgcctcaaatattttctcttatttaccagaattcaagagatgtttatgataacactgtgtatttatgcgttgtttatgcacaggttttggccccagaatgtttcagacatggtgtatttttctcactggaggagaacagccgtttgggaatggaggcagtagtagtagtagcagcagcggcggaggtattagtagtagtagtaggagtattactaatgttcatggaattcccattatagtagtaaatattcatagaaatttcaaagctgcagcttgagacgataaagattaatgatatcaacacctttaatttaaagatgaaaaactgaaacccaaaaagattatcaggctcttcatgattttaaaagaaagattgtacacccttagctgtgtgttgggaaaatagcaaataagaaaaagtatgaacctggatgctttcactcattagtgatttttttctttatcagattcactataagatacttattccagtatcttattccagatactggaataagaaatacttttctcacccattttgttattcagaagggtatttttaaattctgctacatcactagcacaaatgtatatttgttggatgaaggaatgacttcaattcaatatttttatgccaggttttgtctcgtttatcaatgttaatgtatctatgcataattcttagcttagtattatgtcgatttttcacattaagtatgatcgtgatctataaaccaataccaagttctggataaattttgattagaaatatgtgcccccctttttccatttatcccccagaacttttcaacactgaatttagtcctaaaccataagatgtttttcttagaattatttccagctgcagagttaccagcaaaagttgttgtcaaatactatcaaggccaccgaacatggttaaaaatggctcatccctataaagatgtatgggtagtattgaagcaaacctctcagtagtgttagcttttcctctgaaatggtggtcctgctgtgaagtgaacttttactgctgtttggggttgtttttctccatcctcatgaacacaacagccttattatgttgatttgatttgattccctagtccttggcactggggccagaatgtcaggtgatgcagttgtctcaactcacgggtctgtagggaaagccaaatagctggatgtcattgctgtgtttctctggatgtttttgccatctgaaatctccatgttcctgtattctttcaggaaaatcaatccctgttttcctttgtgaaagctctattttcattcatagttttattgcagattaaaggctgttgcattagaaagttatcagctaatcaataaacgtcagtcatcccattttgtgataaagctgtcccattgatcaaagtggaaatgtgggcttttggcttttacatagcaatttctgaagttcggataatgtgcttatggaatatatagacctatcctcttatttataggtcttatgtagagatggacatatgaatttatgtgtacgtaatgtacatataagcaggctaatatatacaaacatctgaattttatgtaaaatataacattcttttcttagaattttggttaaattctaagaaaatgagaagtcatcagtaaacttctctctctatatatacgtataggtgtgtgtgtgcatgaagtttttttttttttgccaagattggtattaaaatgttttcaaaaaccttaatgcaaaatttcaatggttgtgaatatagtaaaacacacatgaattttgtgattacaaaattggaaaaatatgctcttattttcatattatttataatagttaagggaatagcagttttagactctttaggtttggcatctttattttggtaacatgcagcttgtcctgttggttaaattcttaccgtggctttttttcataacgaaaaataagttatgttcacaaatattcatagtgccaggcattgtgctaggtgctgtgaactgaaagatgaatacaatactagcaataatactaatcatttatatttgttcagcattttagatttcataggccattttcacatcctgtatctcatttgattctcacagttaccttgggatatagacagagtagacaaagctcatacagttttagtgtggttcctatataaggaactacattcataggtgttgaatggcagaaccaaaactcaccttgtaacattttcccttgtatgcattccagtaaaatgtacaaagttgttattcattgatttgccatgactatacaagtgaattaaagacgtaaaataagtgtttttgccacatccgtgtatacatatatatattcgtatgcttgtgtaatacaataaaagaaaaatggaaaatttatcaaaaatgatttttattcttcatggaattattctaatttataacataatgcacaaactaatacgtatatggaaagcaagggtggagtgggcaatccctgaagttccctgtttgtctatgaaaatctttatgcttgtgctttggattgtagaaatgtggttaagttctatgtatacataggtcttcagcttcaggaatcctgaatgtttgcttaacaaaataatgatgctctcaaaagagaattttaaaattggtttggactctatttggcaacacataattaggccaggaacatttgctaatgtgctgaaattaattgaatatcacattttgcgtcttgtctgatactacttttttatattatttcatgctgctgatagtgttgatgttgaagacactaaagccatatgatataaacgtgatgagatttatctatgggactgagtacattgtactgtataagagtaggacattggacctaggcctcttgagttcaagtctctactatttactagctgtgtgaccttgtacaagcaatttaagatcattgtgcctcagtttcctcttgcataaaaatgggataaatattatctcccctagggtgactaaatgagtatttatatatatacacacacacacgtgtgtgtgtgtgtgtgtgtgtacataacattgtatatgtttatgtgaaatatctaagtaatatatttggcacatggaacatactatataagcttttattctgtatatacaaaaatatatagatatatgaaatacacaaaacataacattcataatatatcacacgtgcattcatttctgatcaacttaactttttgtgtttttcttcatactcataaataatgtctacacctaccaacatgtgggctttatctactgtatctacacatactgtaaatagttgtaacaacttgaccttttgctgttgatcacactaagtagttcagtgtatatctgtaatgatactgttagaagaaactaagaagtgttgtttgttcaaatctactttgaccataggaattcaaaaacaaaaagtgttgcactggaaacattctgatacttgtaatacagaccctactataggatcagttagcatcttatgtgtaagattatgggttatgaattctggccaatcaaggacaccctaatttgtgggtctaacaaaattgcttctatcctcaatgtttttttttatttcaaagttgatgtattcattgaaagggaaaaaaagtgttgatttttcaattaagatgcaacctttacaatgtaaagcaataataattatagtgttcgctcagcctgaagaaaaaatttcactacttaaatagcaataatcaagatgagaactacattagaagggtgctaattttatgatcattgctatttaaataataaaaatgaatccacaggacccttgctgtaacactatttgcaatgaagtggtattcagctttaaaatggtcctcttgaagcccatttaaaattaatgggctgcttaaattgtgaatgaccaaagatcaccttataaaatagctacttttccaatcaatcaattattaggctatggctgggcttctacaggaccagatgtatttgacccaaagtatttcacaaatattagtgcaatcattcttatataataacagatttttctttttcttttttttcttttttttttgagatgaggtcttgctctgttttccaggctggagtgcagtggggcaatcatggctcactgcagcctcaaccacccgcgctcaagcgatctcccaactcagcctcttgagtagctgggactccggtgtgcgctaccatgcccagctatttttaaattgttattattatttgtagaaaggaggtattgctgtgttacctagcggtcttgaacttgtggacccaagtgatccttcctcacaaagtgttggcattgtaggcattagccaccactcccagcatatgataacagattcttatattttcagcccccaaggaaaatcaataacaacaacaaaacaaatcagaatttgagtttcatcaattggattctgcatgctaaatataagaaaaataggttctagtttttctctctccaaaaagaattactagcatcagagaatttggcactgaggtaaaatcttaaagtagctataagctcacatggcaacatgtgagctttggagtaggtttaaatctaagttttatagatttacaaattttataaatttataaattttatagatttatagattggagtaggtttaaatctgggtttaaatctaagttttataatttgctatttttgtgattttgaactaattaacttctttaagctgtgtaagtaaaaggggaaaataaatgggtgaatgtaatgattaaatgaggtatcttgtctgaagaatttggcacatagatgagtattgaataactcagtagctctgtagaagtcaggcagtatcaatatctacttaatttatgtactgtttttagggcagaggactttataagctatagtaacagtaatgaagattcagaatagcaatgttgataatataattaaaggaatttaagatgattgcatttgattaatttagccatgaaagagttggtttgtgatgtcattactgctgccacatactggtagcatatcttccctagacagatgtaattattcattatagattgttctctaagaggtgaacaccgtcttcctttccattgtcctccactagcaactcaaaaagaagaaatactttagatgtagcagcaaatacattacagatctgtgaaagagcctgctctttattttatgtggtaggttgtctatgcacagtactccaagtatttaacttaagaaagataaataatctatgtatggctcccaatttaaaaaaaaaaaggttccagagaatagatctttttttttttttttttttttttttttgagacagaatctcactctgttgcccaggctggagggcagtggtgttatcttggctcactgtaacctctgcctcccaggttccagccattctcctgcctcagcctcccgagtaggtgggattagaggcatgtgccaccactctggctactttttgtatttttagtagagacagggtttcacgatgcaggccaggctggtctcgaactcctgacctcaaatgatccacctgcctcggccttgcaaagtgctgggattacaggtgtgagccactgtgcccggccagaacaaaccatttttaagcaatcattttgagactcattccattttagacattatatgaattacttgcagagttataatgccaggataaagatagataggtacttaagtatctatttatatgggatataattcttatgcatgaaaatatttaaaaaacatgattcctgccttctaaaagcatactgtgaagtatggaagaaggggaagcatatgctgggactagttaaggtacagtagagtgggaagttaaaatagcacctaagagtgcaggctttggagtcctactagttaggctcagtgccccatctactacttcctattgataaccaggtaaccgtggtatgtcaattaatctcttagtacttccatttccttatctttcaaaggggctttgaagagtgaggatactatagatgtgtaaggaggataaaatagagcattcataattattaatattattactattattgtattaacgattaaaaaaatactacctgactacaaattaaatgagtggtccttacagatactaaattctatagtttttttttttttttaagcaagatcaacacagattggagtacttgagaaagacttcatgaagaaaatgaagcctgacttacaacagaatgagaaatctactcaatgaaatattagaaatgacaggaacctggagataattcacccaatatctctgtgtttgttggataataatagctaatacttgtgtaatgctcacgatgtgctagttcctcttctaaacactttataaatatcttaatgcagccaatcttcataacatccttatttagtagaaactattatctctttcttttggtgagaaaatcgaggcacagagtagttaggtggattgtcctgtgtcacacagcagccaagttgtagatctcgctccagagtttatactcttaaccacgatgctacactgtcttgtagctagagctgtgtgccaaaactaagattgtcgggagcaaaacagtttgcccatagtaacaaacagtgcccaagtagtgacagaactggaacgatcttccttggcacctaatttttaatacatgtgtgcttactacataatcgactgggcttctcaagatttgtatgatttacccagtgatgaggggagggcctattaagttgggacaagaccaggtattaattgctctgtccatcagagagaatggtagcagtgtttgaatatagacatacacactggatagcaatgggaatgaagtttgataggtcattttgtgggctagcaaaagtcagatgtattcaaggtttatctgaacaacaacaaatgggccaacctggaaatttctgagaatgaaaatgtcgtgttattggggaggagaaagtggaaagaaaaaagcaaagggtataatgtatttttgtaaatggattttagtatataggcacacttctagttaaccatatttaaaacaaatacatgctaaacaatgcatatataccagaaattttatgtcagtggaatcaaatgtagtaattcaaagaaatagtcactggctaagaatttatgtatgccttgtatggtaagaggagaagcaggctttatctgacttaacttttatccctatgcacaccttcattttacaaagcttctatttacttcaaaggggtgaggaggagaatgcaaaccaggcctatcacggttgtgatcataggattgttttgcaggtggtatccatgtgtttctccaaagttcatcttttctatttgcacacttggaaggaaagcagagcgctctttcatcttcatacttttctagttttttggaactatcaattacaaaggagtgctgtataaatcttctttgtgtgtttaagtgctaatataagctgctgaatatatcagctggctacagtatttgatacaccttacacctggagttacagcagacgctttggcagagctcattgttctaaagaactagattataatgcagaaaataaaataagacagaaatattaaaaaattcattccatatgcaagtttccaccattgtattgtgttggtagacaaccaatgctatttgttgtcattgtttaccatcctctttgatcaccaagttatggaaaaatgattatccctataattgatttgtgatctagagcaaacattgtaatacctgttcattcaaatgggcttgatgccaccatctaagcatctcaaaaggttacatttaaataggtgccttaggcctgtaatcccagcactttgggaggctgaggcgggcaaatcacgaggtcaggagatcgagaccatcctggctaacacggtgaaaccccgtcactactaaaaaatacaaaaaattagctgggcatggtggcggccgcctgtagtcccagctacttgggaggctgaggcaggagaatggcgtaaacctgggaggcggaacttggagtgagctgagatcgcgccactgcactccagcctgggcgacagagcgagactccttctcaaaaaaaataaaaataaaaaataaataaataaataaataggtgacttaggtttacgtagcagtaaatatagtttgacgttttaaaaaaaggcagttaaacattagaacacttgagtatttggatatacctcctcatttaataatagccaccttaataatcacatcttaatttttttgacattttgcaatttttcttggagtcttttaaaaattttattaatccacagaaattagtaactgatatttacttaaatgaaatttatgtgacaataaaatcaaacgcagagtttgtttcctatgtagtgcctctgtatactgtatattatgtataacataaagacttgcattgtgcaaggattagtatgatttgatatgtattttgatgtttctacaaaatgctctgcccaagatagaagtaaaaagatttgtaatgttcaagtattattgcttccatgctgagattttctatttccaataacacctgtacaccactgctacctagttacgctctacattttatgcttaatgtagtaatctaatttccccttatttgcagttagcaagtcaaagtaaaaaatatacattggaatgttgccatgacactattgctatggaggcaaatttagtaacaggtgaactatcttggttcccatcagacaaggcttggttcctgaaggatggaaatgatcttattatatggagttctctcctgtaatatagccttaagggtacactcctggaatagtgtaatagggagactctagagccgataaaaaaaaaaatcctgtgaactagcagctgggaggttgtatcaacaactctataaagtgtaacaagaatttaacgaacatttaagaaggccttctggattattataaatagggtgaaaattaagaacatttcttaggttacaagtgtatgtaattagtgaatacttgtataatacttgattttatattttcggctattgtaatatttctttatcactagatcatatcaactaagtcaaatgtaattgtaatttggtataaatatgacttaatataaactgcatgcggggtattggtattgaaatcagatttaacaagctgcatatctatgattacagcacttctcagtaactgttcattttaaagactgtgcaggtggacaagagtaatctcttaaactccttatgaaatactgtaatttggcttggttcatttgtgattcagaactcccaaatggatcccgatgaaaaattagagatgtgttcttgtagaaaaaaatgagtgttttaagaaatcacaaaaattactcataatatgctaatataattcaaaaattcttcattccaataatagttttcttgggagtacatcctctaggtatggaaatgtgatctgtgcattcactgatccaatacatttagttcctacaatacttgcaaagtatttaaagaggtattcaaattagtttcttacataggtgtcttacacagtgtctcctcactgtgtatttcatggccaccgttaagtctctccaaggctttcttgcttggctttccttgtcagcatttggcttgtttgcttcttgttgtattggcaatggctgggtttgtgtcagcagagactcttagagttcattattctgatgtagctcttgtgctgtaaatgtttttaagttaatatttattttattgttaagaaattaaaaaaggacttgactgctttaaaaaaaagtggccctgcccaatcacagtctttacttttgtatgtcatacatctccccttattttgaggggggattcttaatctcatacagttaaatgaaaaattttcaagttgggtgaaatactttcggtagaagcttttctgtaagagtggcagttcctcatggaaactccttcaatatacattgaattaaatatcagaagggatttttaaagaacattttcaaatttattttggggtaaaaattataaaaatgttgtgccaaattagtagttggttcaaataaaatgtttttgcaagatttaccccagccagtattaacagctgtaacaattgagaccaggtgacagaaaatttcgttttaagaaggtgtttattgtcaggaaaattgtgaagtttcctttgtaattactctatctttgttattttggcagcctgtaaagttttattggcatttactgaaaggtactttttttggccctagccagctggctttctttttttgggcaaactttcctagctctggtattcagaacatattttcagctttgattgtctaccaatggggttgttttgaacaaggagccaagtgactagtgatgtctgaattgatctcaatcatgtcttcagtagggtgacatcagaatgctgcaggtgtacttcaagcattgagggttgtttccagcatgtcattttggtgctaaaatagtcaatttaagaccattcaaactacagatcctttttacatacagactggaagaaaagtatgtgaaatgatgtatcaaaagtgaggattcaataactcaaaagagaataaaatttttcaaacaatataggatcaccaaactgagattgaaagatcctttccaggagctaaatattaaacaggtaatgcacaaacatttgaagaatggaacgataatagtatttccctagattcatgagtatgttgtatagatgtggagttttagtcgtcttggtgttggccttctccactttgtaagccatgtaccattgctcttacctctgggcttatttgaagaattgtttagatcatgctaatccgtgtgagatgaattctaaatttagaattatactgctctggttctgaagcccacagtaataaattcatttaagcaagtatttgcatcactgattacttattttattgcctttaaaatactgctggagaaaatgattttattttatttcatgttaatacatttattggactacttgttgttagtgagtaatacttacaaatcttagaaatgcctttttagtagttattatttcaaagccatgacaggcatattagtatttggtagtcttctatggcaatgcaatattaattttgttttgtatgttactatggcgcattgataaaataactaatgtaaaatcttaaggtggagctcctgtgtttgtgatttaataaaaaaggaaaattaaagatcatatttatcatttacttctgaataagccatcttgagatgctacatcttcatccactatcgtctgtttatgatctgctttcttttttgtagcactggatttcaaggaatatatttaccactttgttctaaactatttgttagagatctatacagattgcctacagaggacagcactgtggaatttgttctggcatcctggtggaggtgtgggggatgcagggtagaaggaagcccacctttttctttcttttttttttttttttaacatgttcttatgggaagaacctgtcttcatagtcactcagtagccaggacaaagcacctctggtgtctgcacattctgcaggcccatctgccgtagcattcctcagtacttcatcctggcctgagaaacacccggaagtgctgggatcttccagctcctactcagctacgaataataacaaacacttcccagtctcttctaaatatgtattgtccattatttgaaacaaactacagaattactaggcagagaagagatttttatttttggaactttgcagggcttaaagagtgtccctattacagcaaagtgggacaatttctgtagaagaggtgtttcaatattcataaaggtcataattaggtaatttattaagtatagcaaattttgagaggtgtggatttggatgggtatcttgattcaggcacttcatttcaatttattagatctgtttctcaaatagctccagcttgttcaggttttattcctgccagttggatatgaagtactgtatgtttgggctccctgtacagaatttgtttccaaaaaaatagtgtcgtgctgctttccatctactggaccagtaggggtaggacgatctgatttgaagccagtgcaaaatgcaaaactgattagatttggattgttcatacattaggccttcctttccctgttcttatcctttttccagatggaagaaccagtttcctcccagggcactttctcctggcaattagactgtgaagatgaggatcatttagtaccactactgctgaagtaccattatattaagtttgggctttaaaatttagaggaatgaatcaacatattctgtatttggtctctttattttgcaattaatgacgcttgtgatgcttttaaaattaggaatctaactttgtctttcagttctaccttttctttattaatatactaacatcttactttcccacatttcctactgaaatgtgggaggtccctgtcccactgaaatgtgggaggtcccctactgaaaagtggggggtccccgtagtcaaattttaaagcatcaagtgttttaaaatgttaaccgtattacatgtacctctttctaacgtgcattatgtaccctccctcccttcttaaatatagtacttacacccaattttgctttttcatggtgattaagggttgccattatgaacattggttgccaccctttgctaaaatgcagcaaatgccctcagttattattgaggcttgtagagctctgtgtgtgcccttattagtaaatggctttagaatgttatgcccttggaattcttgtaccagacctttgccattttcctcttctctcttacatcagtaagtaagcaggcacttacacgcaggcattacattttagagctataaaaaagatgacttggcctaatggcttcagcttgcagattaggaatggaaggccagggaggttgcacagttagtccatgattatgcagctagctggggtaggaactgggtagagattactcgactcctaatccagtgttctttcttccaggccacacctttcgctttttccttctgtcgggataccttgtcctaactgacgttttccatgtttatttatttatttatttattttgctcttagtgtgtagttgactgatagagaaattggaaacaagattaaatagaaaaagtagtgaagtaacatctgatggcttgaagctctgtttctacgagtcagtgtacatccttgagtctgtttgtcttctgtataaggaagtggttggactaatactagtagtaacaaacatttactgagtacttgccacatgtcagctactatcaagttctcattatgtgttacgtcattaaattcttacacagatcccatgaggaagttctgtggggtttgtgactttacaatatttgatgttataattaataattttgatattacaatatttgatattacaaaaggggaaactgagtaacacaaaggttacctagcttaccagaagtccttcagttagtaagtggcaaagccaagatttagtctccatgttcgtaaccagtcagcttttatgtgaccgggtcatctatatgttctcttttggctgtaacacttgatgattctgggtttgaataataacaccaacaattaacatcattaaggactcaatacacactttatacgtagtgtggctcccttagtcctatcggaaactctatgaggcaggtgctgttattatcccattttatagatgagaaaaccgaagtacagagaggttaagtggattgcccagtcttatagttaataagtggcagtggcaagatttggaactaggcagatttaagtgcctgctagctttgccactatgtcttattgcccgtgagcaggtacttgagtatttaactcatgagtgtgacataagttttataatatttatttttgccaattagagatgatgtgtatgtgtgtgtgagagagagagaacatgcacatgcacatttacttgtacatatgatgatttcttatctatgtgttaaatagggggtaggcaggctgataagtgagtgaagtgaacttagcccaagtggtatggggaatggagtggtggggactgtgggactgtggcatataggaaagcacaggtcctggccaaaggggcagctgagagtggctcagccaactcctgacctgtttttcaagcaggaaattggacccagtattgctcgatattgtgtgtgtgtgtgtgtgtgtgtgtgtgtgtgtgtgtgtgtgttcctagagaagccagcagtttggatttctaaaccagaagattttgaagctgatttttaaatgatcacagttaattggttatttgcaaccactctgaaacaaagaaatgttgtcaacctctgagttagatcatcagggctgggggaaagtgaccttctgaaagtgagagttggccacatcttggtatccccactactttttgaaaagatgaaagatggaccccaatctggaatacttacccattctcttctattaagatgttatggtattctccaatgtagagacagttgaatttttaagtctgcttttgagaaacagctgccttatgaggctgcagcattcatccgaaggccaccagtctgtcctcaggtctagtttccaagtctgtagacacctgatcacttccggggctttttcaaactgtatctccttcatttaggtacaccctggcaagactactcagggatccctgcaagagagtgtgaagttactgttactggtaggagtttgggatctctctctctctctctcatacacacacacactcacaaaagtttgatgctcccttctgtgaaatgagtttcgagactcagcacttatttttgaactgcccaggaagatccttgcacgtgctaaggatctacttcaggaagcaaggtgggggcatattgatgactgcttgccttcccccataaaggtagctccactctcatctgttttgcacattgggcttccaattgtgattcctttagtacaaaggtctccgaagctaaaacaaacactggctcaatcctgaaaccttaatcatatctaatgtctgcttcagtttaaaaaccctgatgttcctaaaaagggatgagagttcacataacttttcccctgtgttgccgaaataacttccaggggcagactgggtatctgatctctgcagactgacaatactcctttaaaacttggtggcatttttgttttaatggctgctctccttaaagaatattatttaagaaaaaaatacatatcaacttgctgtgctatggtctaaattcctgtctcggaaatattataggtgaatgtatttccagatgctgcaaataatggaaaatcatgaaaactcgaatcagggtccctgtccttaaatgtgtttcagtttgcattttgatagcagtttagaaatgttatcgcttgttttgtcacagacataattcacatctttcttcaggcactgtaaacaagagaaatggtttaatggccccataaaggcactctgctgatggctgagattaggccctttagtaatggatattggtgtgtgtatgtgtgagtggtatatgtacacagtgggggtggggagggcttggaagaggtaaatgtactagaaagaatctttgagagcctcagatgcagctgaaaatgccttctgcttctgtgtgtcttagaagatggattcacaaagcatgtgacaccattgtctttatttatactcaagccttcccctttgcttctagaatttaactgagcactaattgaggtcattgcgatccatttattacctgaaattgaagtgatattaacttaaagtgaatgcttttcatctactgagtgtattcctaactacatatatttgtataaaaggctgtgtgcatttttcatgccatgcttgtatctggtcttaaatatatctaatttatgtataccatttacttctcccctcccttttacagagatttttttttttaaatcactgctatagccaagtgaaatttttttttacaagcactttagtatccacactatgatttgttttgactttttcagttatattttttagacaggtgcaaaaaattctccatgttatacatcatcaccctgatctaagtaaattccttgaaatttctcaaagcacataaatttgtagttttagtctcaattttgtgtcatttttttaatcagctagtttgtgtatattgctgtaaaattggctacacaaggctgcacatttttggttttgagagacagagtaaaccaagagttaagagattaaaattaagtgtcctttgttgactagttgagctgtctctgtcactagcaggtgtcactttccatccagccactttggtgttttccttctcctttttttattatagactatattctggaacaggaatcagcaaacttttctctgtaaagagtcagatagtaaatatttcacgctttgtgggccatatggtttctgttacaactactccatttggccattgtagctcaaagtagccctagactagaccgaaatgaatgggtgggagagtgttctactaacgcttcatttacaaaaacaggtggaaggccggatgtggcccatgagctgtaatttgccagcctctgttctagaacagcatacagaagactattctaaaacatgatttttgaacagaccagaaaacgcaacctcaaaataaagagactgtcttcaaggctcttcctccaaaactatggattttatttctgtttagagaagaattaaaaatatgacgtgtttctcttcccagggtaattgtttgctactcacagaaactgataaccctatttcactcttaagacaagagttgggaggaaagcagagtgaaaggtcagagccaagacaacttatcactgtatttactttcgctgtccacatatagaaggagacctttccatcattgtgacattttggttatcagagtataagggaagcttcaactgttgaatagcaacattcttccttcagtggaatatgagtggtgtgaatttttaaatgcctttggtcacagtaataaattgaaagaaggcagattgcctaaaagcaaacgtgaatactctgagaagtgtttttatttagatacacgtgccaagaatatagtactaaggtcatacatacagatacatgtatctgacacacgtgaattagtcaaacttaaagaatactgcctaatgtctttattagggaatttttaaaacaccaaataaagctctaattggacttccatgagctcttgataataaggactgtgtcttactatttatcttcattccatagctccatattccttcaccctctcaggacctgccgtagtgtctggggcatggtagatgaattaacaaatgaattaatgaattaattgctgaagaaatgaatgaataaaaatctcatataatgtgatagtggtgctcatgcatgaaggaaataatgagtgtctgtgtataaatcaatttgaattatatactcaagagttcaacaattacaaccttaagattgagcccagggctctaattcttaatgtgttatgacttagtgttagatctttagtcagacatggtgcttagcttctttgtgcctttttaaaagatctgttaaatgggaattattatatatgttcctgtcttaactgatgagaatcaaatagagtatgggacaattctttgaaaatggttaaatattatgtgtgtttgagtttgttttttttttttttttgtatagttagtgttttctattaggattacaattagtattttctattagaattccaaactcaaccagtttgttaagtcaacacttaaacatattatctttgtttaatttacaagacatcatccatcatcttcactgtaaaaatataaacaaaaacatacatcattcatagatttcattgttcattctctggatttacattaaccagtcagttgtaacaaacattatctgttttcaatgtaaggatacaaataatgccccaatgttatgattgtttgggaagttattctcctatgagcaaatcttaaattcatattctcagccaggtgtggtggctcacgcctataatcccagcactttgggaggccgaggcggtctggagtttgagaccagcctggccaacatggtgaaaccccgtctctactaaaaatacaaaaaaattagctgagcatggtggcacacacctgtaatcccagctacttgggaggctgaggccggagaatcacttgaacccgcgaggcaggggttgcggtgagctgagattgtgccactgcactccagcctgggagacagagtgagactctgtctcaaaataaataaatgaatgaataaataaataaaataagtaaataaataaattcatattctccccttatatttcaagtgttcaaatgtgattttacattatgtatctaccctcaaccaaagctgtagttgtataccagcattgttgcttttagaaagctcagggcatttctatcctctggtagaataataatgacaagattgtgccctctttctaaaatataggtagaaaaaattgaaagcaatgatgtgtcatagttcatagttctaaaatgaaaacagttactagttaagcaaacacttcatgaggaataccataaccccaagtaaacttctgaattaagaagtggttaagtttattttggaagtgcattttttaaagtcttggtattttggagctcttaaatttaaccattagaagaactcaagtgatcattagtcagccttaagatgtggttttaaaggtcaagcttccatcaaagaaaaaatgcaagacacatctcttgagtgttctttctgcctttcctcccaaaaatttgattgtccggaggagttgtggatcataaaagtttccatggaaaatgtgtttgaagaatgccagaggaagactgcagattttctagataaattatctgacctgtctgaagtcagggataaaaaatataatatcattttgaaccaccactttgcaaatgaaatgaaggagtcaactcacttgatttggtacacttgaagaaggaaagattcactttaattaaaactacaaacaacgcagatgcctgtaactctgttccagactcagcaaggatggtactgtaagagaaatgaaaagtacctagcagcctcggcagcaggctggagccgtgttcaacgaaagtaatttaattagtgttgatcatgactccagatgatggtgatttgataaggaataatttagtacttaacagccttttacatgcaccaactccatgtgggaaggtaaagcaaattgcacaaaatgaatgtgctgctttcgcttgtgcctgtgccaatgaactggaaaaccgcctgttagcagactcagattctcagccctgtgatgaaatacccaacacgttttcaactcagccctctctaatgggagtctctacactactcttatttaagaataaataagagaagtcatttttgtgacatagaatctccaggaagcaggaaagttaaaataaggaaaataatgtagcctacggcttttgtgctgtaagtcgaagatttttaggttggctttctcttttttcctcacatgcagcaattcaaaaaaaaaattttttttgccaactcagattcattggattacttatttggcttatgattagaaaaaaaaaaaatcagtttcaagggcccatagtgactgaggcccacataggttgaacctgttatggagagagttggggatctcaaaactactggagcgggagaacttgtaagaatccttgagcgttggcatctaaggaaaaggaagatgttgctggatttttaaaaaaaactcttttcaactactggacctatttgaatgcggcatacatcagatcacagtggattcaaatttgctcaattatgagcatcacctaaaaagttttataagattcagaatcctgatacaacccagctctaatgaatggaatttctgggagtggtgtattaattttctcgagctgctgtaacaaagtatcacaaactgggttgctttgtgaaatttgtttcacagttctggaggctggaaatccaagatgaaggatgtcagcagggatcggagggctgtgagagggaatctattccctgcctcttccctagcttctggtagtttcctgggaacctctggcattccttggctggtagaggcctcactcttacctatgccctcattttcacgtagcagtctccctgtgtgcatgtctctttatccagattcccccttttataaggatactagtcatattggattagtgctcaccttaatgatcttatgttaatttaatcttccaaataagagattctggtgttgaaatttcaacatgtaaattttgatgggacacaatccaaccaataacaaacgaggtctgagaatctgtgtttctccagcagctccctagataatttgatgatgtgccagatttggggctcctgtgttcagggatcagcttgcctctgataaccctttgagaatccttatgccctgcagtagactgaatgtttgtgtccccgtctcaccacccccgccccagcaaattcggatattgaaacttactccccagtgtgatggtatttggaagtgaggactttgggaagtgattaggttatgaagatggagccaatgggattagtgcccctattcccttactaaagagatcgcagggagctcacttgtgatttctgctatgtgaagttgcagcgagaagatggctatctgtgaaccaggaagtgagcttttaccaaacacttaatctgctggtgacttgatgctggatttcccagcttccagaactgtgagcaataaatacctgttgtttataaaccatacggtctatggtatttttgttacagcagcctaaacagactaagacatgccctttcttctaaggtcacttcgggaaactcactgggccaatctgaaagcagtagagcactaaatagcatttccactagcatggatcatgccttttgcttctaggtccatgctaatggacattttgatagaaggctgttgttatgctagcagccattcctgatggcaccccaaacatgccattcctctccaccctccatttcctacccatctggaataatttctcctgtgaagttgaagcacattttcagatgtctcagctgggtcagaaggccatacatgttcaagtaacttaattagtgtagctttgattaatgtccctcagagttttttaaactttatattgatatacattcattataatgcaaaaatctgaagtgcatagtttgatgaattttacatgtgtatatatccatataaccaccacccagaagcaagatataaaatgtttccagcaagatatatttccgtaactttgtacctgtgagatcatctgtttttgcatgtaatttgtccctttttattcctgtattcattccattgtatgcatatgccatgatttatttatccatttgcccattgatgaatatttgagtttttccagtttttgctatcatgaataaagcttctttgaacattctcacacatgtcttttcatgaacatatgcacccttttttcttggatgtatcctaagggtgtattaatggatcatagagtagatttctcttgccctagtagatattgccagaaagttttccaaagtgcttattatactaatccataccctcagcagcttgtataaaagttcccattgcttcatgtcttcaccaaaacttcataatgtctatcttttgcaggttagtcattctagtgatatctgtaactatctgatacagctatatagtgataatctcatgtggattattttgcagttttctgaagaataaagattttaaatacctttgcatatattttgttgtcgttccgatttgttttgccatctggatatctgcttttgtgaactactggcctgtttcaagactttttgcccattttttaagtggggaatttgtcttgtcttactgatattttgcaattcttattttgttaaatgagttcttcatcagatctttctacttaaaacatcttatagcttgtgacttactttccttttttttaacagtgtcttttgaaaaagtgttcttaatttcattgaagcctaatttgctgatattttttcttttatggttagtgctttttgtgtcctgtttataaatattttcctacttcatggtactcaagacttaaaatatagtaatattaaacattatagtctccaatatggctgacattttgataaatatgataaactttacatcatactgcatgcatatttattagctatagagttcatcaatttttagtcatgtaaacctgatctaatctctcaagtataatatgatttgttacttgaattccttatatgtcgctgctcctttttcttatgaaaatgtaaaaccaatacttaatctgaagtgctaaaacttggatatatgcatgttctcacttataagtaggagctagatgatgagaacacatggacaaaggagaacagacactgggggctacttgaggatggagggtggaaaagcgaagagggtcagaaaaaataactactgggtactaggcttagtatctgggtgatgaaataatctgtaccacaaacccccatgacacgagcttacctatataataaatctgcacatgtatccctgaacctaaagtgaaagttaaaaaacaaaacaaaacttggaaatacacactttgctaaatatgttcaaagatgtaataaataatcgaaaaccacttgtttaaaaaaagaggccgggcacggtggctcatgcctgtaatgccagcattttgggaggccgaggcaggcggatcacgaggtcaggagatcgagaccatcctggctaacacgatgaaaccccgtctctactaaaaatccaaaaagttagccgggcgtggtggcgggcgcctgtagtcccagctactcgggaggctgaggcaggagaatggcgtgaacccgggaggtggagcttgcagtgagccgagatcgcgccactgcactccagcctgggcgaaagagtgagactccgtctcaaaaaaaaaaaaaaaaaaaaagaaatgcatggttaatgtattacaaagctgtgtcatttagtatttcttattctaagatctcgcctacacacagacaacacgcagatatacaatgggagacaattttcttactttatttatttatttatttatttatttatttatttatttatttattcgaggcagaatctcactctgtcacctaggctggagtgcactgccgcgatctcggcaaactctgcttcgcgggttcaagtgattctcgtgccccagcctcccgatagctggaattataggtggacatcaccatgcctggctaatttttgtatttttagtggagatggggtttcaccatgttgaccaggctggtctccaactcttggactcaagtgatctccccacattgacctcccaaagagctgggattacaggtgtgagccaccgtactgggcctagagcactactttaaattcttcgtgggttttcttttcacatttaaaaaatgtttacccaggaaatttaggacacatagacaaacgttaagagaataatgttaattccctcctgcccttcaattggcttttaccatttatcaacatttttctagtcttattcatcactttcctcatacacaattattttttctagagtattttaaagaaaattctggatattttatctgtaaatattttatgaacctctaacattaaaactttttaaatacaactattgtcacatccaacaaaattaacagacattaaattatctaatagctagtctatactaaaatgtcatttattgcagagttgtctttttatagttggtttgttcaaatcagaattcaagtcctcataattgattcttgaggctcttaagccttttctttcagaagaattagagctttctgacttggtaaagttaatgcacatgagtattcttgatatatggagatagacaaaatttctcttttttcttttctctttactttgaataggcgtactaaacatgtatgtacacacacacactacattaaaaaatgctttgaaatagtgtaccaagggtaattattttattattatgtgttaagtttctcttagatcacttaagtaaaatgtgcgtatttggcaaatttgttttctagaatatttcagatgactcttgattgctgttgaacacttgtatcaaaattatatgcatataaaacaaatagtatttgttttcctgaagcttggtagtttgtgatatcaaatttttatgttaaaaattatatataacattcaagctaatgcaagtttataattctgtaatgccgtcattaagattgaatgacaaatgacatcataaaccacaaaattcctcttgtcatatcttcctttttggaaagcggacttaacatactgtgttttaatttcagtttctataagagttagaataaatctccagaacgtgtgtctctgttatgtgtttatcccttgactattcatacctgtggatattatatgtaaattacagaatctattcttatgattattttttccttttttaaaccaatttcccatttataccaaaaatttaattattctgataagatttctaataggcatttcttcagtttcatatcgaagaataaaaaatatatagctttttttttcttttttttcttttttttcttttttttttgaggtggagtctcgctctgttgcccaggctggagtgcaatggcatgatctcggctcactgcaacctccaccttctgggttcaagcaattctcccgcctcagcctcccaagtagctgggattacaagcacctgccatcataccggcctaatttttgtatttttgttgagacagggtttcaccatgttgctcaggctggtcttgaactcctgacctcaggtgatccacttgcctcggcctcccaaagtgttgggattaccggcgtgagccacggcgcccggcctatagcatgttttttatttattggatttacagctgtgattccctccccatatacgtatttttctagttttcatattttgtgatgtagctttgtacgttattaaacataaatgcatataagcattactgtgcattaagtcacagtaaaaaggtgaaaacatcatttcatatagaataattgtttcatggtagattacatgtgacaaacaacatttacatatttctcagatttcatcttcacagttctggtaattagataggcagatacttaatctctattttatagatgagaactggcctcaaagatgttgagtttttgcccaaagtaatatcagtcacttctggacctgcgcctggattttctttgccccagtctagttgtcatttcattaaactattattattgatgcagttgatatattttcctttcaataatgcttaaaattatattttggtctttagttgattcttggctaatcatctgtaatttttctgctttagtcattggaaacctttctgatatgttttcaaaatgtactttcttgaaactgagcttctagcattgttaatatcagttaagcaaattacaagtgattcacttaagtaatgagagaaaattcaagcatgcattttgttacacaataaaggcagaaaaggcgtatatgaagattctctgaaatcttctgctactgaaattcatcaaacgtgatttttcttacatatgtaagttaatatgaaatgtgaatgacctttttaacaagagaagtagaacacattaatctccataattcctacagcatttaatttttgtggatatttttgttcttttttctagtggcttttcatggcctgccactgaaaatcaagaaagaaccccacagtccatgttcagaaatcagctctgcctgcagtcaagaacagccctttaaattcagctatggagaaaagtgcctgtacaatgtcaggtaaagccaccaggtgtatgtatgtaggatagtggttcttattgaatcaaaaagtccagaataatatgaaatctcaagtcatattttatgagtaacgtctttaatatgtaacaagctaattaggtaatgcatttagcagaactctaaagaaccatttaccatccaatcacacactttggattcattttaaagcaataatttttatccagatcattagttgcttttctactgtagtgatgcatcttgggtttgaaaaaggggttttacttggcacaagcagcttttgaaagttcccattagaatgaatgcattatacactttagatagagagtttgcagaaaaaaatgaaacatttggcaggtctgagcagtacattagttatctgccaggctttgcagatgatctgtaagatgagttcatggacaattgcaataaaactggaatttcataaggcttagcagaggctattatctattaaaaagctggttgttcttctgatgataataaagggtggtgcagtaaaagtgcattgttcatttattagaaaatttgatcacatatatgttcattaaaaacccttcaaagtaaattgtatgatgctacttttcatattggcctttaattgcataaagaaaaagttggctgtctctactgagtattatcactctcaattacagtagaaacttagttcttaaaagaagttagtttgcaaacttacacaaattattccaaatattcatactgttttataagttatatcaattcagattcattgtacattatgacccaaaggggtcttctattaaataattcctcagatatttattgcatacgctgtttatgtccaagatatgtaagattctagaaacataggccagacgcagtggctcatgcctataatcccagcactttgggaggcagagttgggcggatcacctgaggtcgggagttcaagaccagcctgaccaacacggagaaacctcgtctctactgaaaatacaaaattagctgggcatggtggcgcatgcctgtaatcccagctactacagaggctgaggcaggagaatcgcttgaacctgggaggtggaggttgctgtgagccgagatcgcgccattgcactccagcctgggcaacaagagcgagactccatctcaaaaataaaagagaaacatagacttgtgccattatggcagctgaccaatgctcagatattttattaccatttgttcttgcaaacttgtcttttatatttgcttttctaagaggttcaccagagcctgaaattatgagctagctcaattgaaactgcaaagttttataaaaaaggtctcttgtagaaggtaactattaaagcataatgagttcagataagacagtattgatcgatctgagttttattttatagtttagttttgtttttgcattttctccttacaagtactgtgtatccacagcataattatttaacatattgaggaatttctagtcaatggcagttagatatagaattgtcattgcctttcagcattaatcagaattgtgactgtgaaatcatcactgttttatatgccatatctgacatccacaaatcaataataaaggaattgcctgaatattttgtgtttcttttgggggatgaaaagtccccacagtgatatatggcatatgcaataaattctggtacttccatcgctatacagaaaatattattgagtacagcatttcatgggggaatagtatcatttgtttcttcattcatgagaatgagttaggtgaaccatttcacaaaagaagtgggtttttcttcagaaatactggtaaagaacataggtggaaccaaacatgcaattcattatatgaacactgttgactttgctttgaagcaagagctgccttgtgcagcatatattcctttactccttgtaaaagatttttgcagctggatataattccgttgcattgatggagcaacagaataaattattacataatttaattcaaaaagaaatatttctttctaaagaaaaaagtgtactgatgattgctttttattttattttacttatttttttttgagacagggtctcactctgtcagccaggctggagtgcagtggcacaatctgggctcactgcaacctctgcctcccgagttcaagcgatcctctcacctcagtctcgtgaatatctgagcctacagacatgcatcaccacgcccagctaattttttgtatttttagtagagacggggtttcaccatgttgctcaggctggtcttaaactcccgtgcttaagcgatcctcccacctcagcctcccaaagtgctaggatcaggggcatgagccactgcgcccagcaaaatgaaatacagcattctaacttagaaatgccctgttgttaaaaaaaatttaagaaaatttagttttagtaaaatattttatagatgaccaaaattagctaaatcacattcctgaaagttacacctaggaaagcagtttaaaatcataatgtaaaatcaagcttactcattttattcttctgtaactgtgtttagaagttagactataataggattttattcctaatgacattattttttacttattctctaagaaagtttaaatatatcagacattttaatttacctcattaatcttcattatcccatgtggggaagttaatgccaagcatcatttatttaatataataaaatgaaaataaagtaaaagcattgccttcttaaaatcccaccacaaataaaagcaagccaggtgtggtctctgccttattaagctgatgttagttcttgttttaaaatcttacataatataaaagaagaatataatatcagaagtatttaatgatttaggaaagatctatcaaactttctcaaatagatatatcaagaatagatggaaaaaataccactgcttttttggacgtaattttccctgtactaagttgtttgtatatgcattaaaaatacacatttaatatttgttctgttacaaggttttgcattaatcatcctattttctgtttaagggtgttgtgattttgaagtttatctgttctggatttaaacaacaatagcaacaacaaagttttcatttccatttgacttaagtctaaaatatcttttcttcctttggattagaaacttttttaaaaaattgctccaaagaaagaaatgttctctcttcttttgtcccctgggtagtgcctatgatcagaagccacaagtgggaatgaggccctccaacccccccacaccatccagcacgccagtgtccccactgcatcatgcatctccaaactcaactcatacaccgaaacctgaccgggccttcccagctcacctccctccatcgcagtccataccagatagcagctaccccatggaccacaggtaacctgcagataccagttttctagaaactgttttttgcgttcttggaaaaaatttctattaacaattctgaaggcctagagtagatttaaggtgagcctattaattttgcacatctgtgcaaaatatttttagaaagagctcactctatctatacttataatttgtggagaaagtcatttataaacattccttttataaacatttaaattggttgctaaaatggaaaattaatctatctactgacatttgagcatttccctttcgctttgcttgaattaaattgcttcacttaaactttaaatcagatcatcccatttttatgagcatatgtgtgtacttgttctgtaaagttaggagactaattttagtaggtagcttatggaattaggttttctaccttatattgaatggttcagctgtacatagttttgcagaatataacttatttgattaaaactgttgaccatcttttccaggtgattaatatttaatatcagtagacgcatgactctggacactgcgaatatacaattaaagagatagagactcaattagtattacttagaaaggagcaaggcaagaagcatagcatagatctaaggagaatactgcgttaggtaattcatgactccttgagattaagaaattcatatttaagtaaaatactaaataaaacctgtagaggttctgagatgtactaccttaatatacagcttaaaatcaggttgcttatatacagcatctctccttctttatctcttctgccctgtgcttctgtatgcagtggcgtgctggtaaatgtttagcaacagcctgcatgagagaaaaacaaaacgccctcatcagtagcttttgctgggtctgtgatgtacatattgctttcatggcccactacgagccatcactgtgagaaccctgaatgccgagttgcaaagatgcaatagcacagcgtaatgtagtatttctagcatacggataccagagacataagtaacctcaggtgtataattggtaatgaaatgtagtaagataattagaaagtgatgagttttgcatttttatcttctgtttttaacatattttttgattgtgaagttatataatttaactgttaatagtggctgtgtttaagaactggctcaaaaaattcctgcaagtttgacaataagtcagtgcaaactggccctgagacaccgttgtaaaaataactcagccaaaggaatcttctagatcagcagaggaaagcagaagatgtgccactggcaactttctgaaaataagggagcactcaaatgtgctttttataggttttttcatgggactcaatctcaaattcagaaactcattttgctataaagggcgtaagatgaaagcgttctttacaatgtgatacaaagccttgtcttttccacccttggttccatcactaagtcctcttgtggggtagttattaaatgcttcctattatctttttcttctcaccctgtagccttgagactttgtcagagtgcaatggtatgtgcatctgtgtaaacagttttgtaaatacagatgaaagaattcttattgcagggtgggccattaaacagatggacattgtgcagagctgaaagggaacaaaaaaatatgaacaaaccaagttttattttctccactactggtgacttctgagttcttgataactgaatctcactcttctgatcagtgccagaattatagattgtataattcgctttttgtgcaaactggttatttcttagggaaggtgcctgctgaataagcagtgtgcctggttttaggtgacctaacttgaaatgctttagccaaattcattttagtttctctacttgaagtcagatatttgagactgagaacagccggcccggaactccaagagggaagctcggggtcttttcccactgacccctgactgagttttgaggacagtaccagctggccagtcccaggaaaatctctaaagccgtatgtttctgaggaggatttcttagagggctctggccaacaaatgacagtccctcagttataaatggcaaatttgctctgggaacagatcctttccccaaaacaccccctccagccaggcaccccacttcactctgggaatgctttacggccaactggcctgcaccctgcttcctttcctcagcctcactctgctcctggggccagccctttggcactttttcctgaacccactgtgcaggagccctgtctctctttctcagtgtttccaccacttacaccctgtttttctttatctgggagttcatcagcatgttctccttatctgttaactcctttccagaagcttcttgaatcactttctctttaccattggtcagtggctcctaagaattgcaccaaaaccttgcaaattcctgagaagcatgcgtgtttgatatatacatgttccccagcaacttccaactggaatcaggtcgactcgtaaaaacaaatggcttgattccttacaaagctttcagttacaagtattattaacttccttttaaggcttcacaagtgagccagtttcttattttaacttcaagttacaattttctgattcactccttgacagttcttaatgataatttctgtttctttttttggctaatgaaataagcaagagaagggaaatgaatgcagtgccagtcagcctaactgctctgcaatatccgagtttctaagtttattttctgcaggtgtaggtggaatttcagtgctttccatgaccaccagtgagcctagagttaaatcacaggatggagtgttcttagaaatgctaaagcaatcgctttgccattctttagcttttaccttatttttatttaacattaccgaaattaaatgctaactttccaaattaaagtctcaggaatgcttttagtgggggggttattaggcttatatttgctcatagaaatgttttataggttatttttaagcactcctggggcatttttagagcacttttaaatctttaattaatccacatctttgtggtgggtcaatgatattatggatgagaaacacagaacagaacgattatgtgattagccaattgttataaagtataaccaagaacaaagaggcataggactcatttctagccttctgctgaggcctcagaacttcctcatgtcctaacagcgggacttgccccaaacctatacaacactatatgttattttcacctttggagatcagctgtgcatttatgcttatttttatcaacctgatactgtatttgaatctattggaagccaatatggtctgcattgctgtttgacagtaaagaggtagtctttttacaaccggcttgggtttgagtccttataatacctagttttgtttcttactagaacgcaatgttaattaggacattgttgaggaattgaaagtcctgatttgagaaaaaagtcattcctctcttgctttctcagcaggtttttggttggttggttttttgtttattgatcagtttggtaacagaattaaaagatagaggatgcagtttgagatctttttctggtatataatgatttaagaatcttgtgtggaaattatccgtgatccaattgatttagaactaggcattttagccattaatcgttgtgtgtgtgtgtgtgtgtgtgtgtgggtgtgtaaaatcctcaaagtttttcattgctctccaatccttactcaaagtacatctttaactcatatactgcaacagtgctgcaaaagactgattagaaagggaatataagtcatatgattaaaaaacatagagctactaatccaggaaagaaaaacgtaatgcttgttaaagatttacgcttcaggtcagctggtatcatgttcgttcactaagaaatggaaaaccgtatccgtattttaaagaatgttccatgttaccgtttcatctgaaacacactctcttattccctagatttcgccgccagctttctgaaccctgtaactcctttcctcctttgccgacgatgccaagggaaggacgtcctatgtaccaacgccagatgtctgagccaaacatccccttcccaccacaaggctttaagcaggagtaccacgacccagtgtatgaacacaacaccatggttggcagtgcggccagccaaagctttccccctcctctgatgattaaacaggaacccagagattttgcatatgactcaggtaggcctgcgctctgcgcaaattacattcaaggcactttttcacctcccttgtcacattggttagtgttggtatcagactaggtagctcctgaccattttttaataagatctttcagattttgtccgttcattgaaacttcatctacgtgtaaagatttgaactatcaggtcattttgacatgaggtgatggttgaaatagtgtctggaaacaaaaccagtttaaagaaaaatacactttacagaattatgcacagtctcagctcgagagggacattgcaattttttttcttaattctgtacttttttttcttcttattttgctactacagtgctacttaataaaaatgtttacagaaagtaatattcttctgaactaggtcacatgttgcttataacatttaagaaaaaattactggggtcccggtgcagtggatcacgcctgtaatcccagcactttgggaggctgagaccgagatcgaggccaccctggctaacacggtgaaaccccatctctactaaaagtacaaaaaattagccaggcatggtggcacgtgcctgtagtcccagctactcgggaggctgaggcaagagaatcgcttgaacccgggaggcagaggttgcagtgagccgagatcgcaccactgcactccagcctgggtgacagagagagactccgtctcaaaaatctcaaaaaaaaaaaaatatatattggtggcaaagattctaagtgttcgtaagtaagaattcttacatattaagaggggaataacagattattcgtagagtttagctttgtctctgtgagctagaaagtagtacaaagcagcgggtcaagtgggggagtggggtttcctgaaaggagggagggtttaaaatcttttccagtctggtggctcacgcctgtaatcccagcactttgggaggccgaggtgggcggattacgaggtcaggagattgagaccatcctggctaacacggtgaaaccctgtctgtactaaaaacacaaaaaattaaccgggcatgctggcacgtgcctgtagtcccagctacttggtaggctgaggcaggaaagttgcttgaacccaggaggtggaggttgcagtgagccaagattgcgccactgcactctagcctgggtgacagagtaagactccgtctcaaaaaaaaaattttttttccaaatagtaccaccaactttgccaatatttgaaccttgagactttaaaagaattacttaaccctgctgagtttttccttctataatctgccaaatcaggacatctgtttttaacacatctcaggtattttgaaagataatctatgaaataaaagctaatgtttataaggttaccatgtacctgtaaaatattgttaacattattgtatctgtggtcaatagatggttgtggatgtggaaatatttgagaacagtttcatttccttttgtctggatataaagtttgggcattctttatgaagggagtattgcgtcctctgctgagtttttctatcatcagtctacttgagtaaagaaaactacctccaggtcttgagttaccagtttgcgtataagattacctggttgataatgaactgcccttaaggctctgcaaaagagagccctgtgacttagaagtctccctctggtcatccttctacactggccaataggttcaaaggacgaagggaattggccccgttgaggcatgcctcaacttctagaaagcatgcaagctccccaaaacctatgaattctctgcccaagtggccttgagtctacttccagggcctgagtaagtgcatcccaggccctgttttctgaaaccagagcacattgctcctatatatagtgctaggttcaagggtggctaaagggcagttgttcgtgaaggcatgaggatggatcttgatgtgtgaaactctcacagtgtggcccaatattgagctcaaggataggaagagagacaaaaagtggggtgtgtcaggatctgaagactgggtactagctctctccataccacatactcttccaggctcattttagagatttcctcagctactaaacttgacatggctgagaggttgttatggtatacagttgcaaagatgagaagacaccttatttatcagtttgcttggccgatttataatttaagaaattttaacagattgtataagagtctttatttgaatttttgccccagggactgtaatttggggagtatcttgaaattcccattgtggtttcagtttagaaccttttgtatcgtccactggtgtctctaattaagaaccctgcaatacagtgggctctattataaatagtacacatttatctctgtaaatttcaaatcctgttaattgatattatccttattccccaaaccacattttaatttgttgtagtttttaaaattcattatgatttcaagaaactttatgtggaaatcatataaattatctcaaataatcattccaaagaacatgtatagcatagcacttaaaatatttctttttgtgctctagaaatgaattttttttgagacggagtctcgctctgtcgcccaggcttgagtgcagtggtgtattctcagctcactgcaacctccgacccccgggtccaagcaattctcctgcctcagcctcccgagtaactgggattacaggcacccaccaccacacccggctgatttttgtagttttagtagagacggggtttcaccatggtggccaggctggtctcaaactcctgacctctggtgatcgggccaccttggcctcccaaagtgctgggattactggtgtgagccaccatgccctgcctagaaatgtttttatatgtataataccaaaaagagccacactgaaactcttctctttttttttgagatggagtctcgctctgttgccaggctggagtgcagtggcacgatctcggctcaccgcaacctccgtctgccaggttcaagcgattctcctccctcagcctccggagtagctgggattacaggcatgcgccaccatgcccggctaattttgtatttttagtagagacaggatttctccatgttggtcaggctggtctcaatctcttgacctcgtgatctgcctgcctcggcctgccaaagtgctgggattacaagcgtgagccaccacgcccagcctgaaactgttttcttgattctgtgattgctccatgtatatcttctcctcatatttatattgtatatacagttatatgtagtgtggtattgagaatgtataacttttcttaagaagatgtgaacctaatggaaaagagattttaaaattctaataagggcgaaatacagcatcttgtgctgtaagaattacattcatacataatatggacttcagagccagtcactatttgaccctcaaaagcacagattgagtcatatataatcttcaaaacatagtccagcatcgtttgtcgaaggtatgtatggcatctcttttgtaagttaagtatgccatgtcttgcagattacttgtaaaattcttacctaaaaagctgttaattttatattgcattctcccttttaaattatatttaaaattaccaaagttgtataccacctttgagttctaatttcaatattgccaataggatacagttgtgttttgcttgaatagttaaatggtaaaattgtatctttctgacaggatttaaaataaatatagtaaccccataaccagggcctatgaaaacttaatctgtgggtgtcaaaatgtattttacttgccatgaaattgctgcagttaagttgacacatatgtatatgtcatacatggcaatcaacaaatatgattcgtagatattttgtttggttgtcattaattttttcatccttgctgaaagtacacttaataacctttgaggaaatctaatgcatttatcactgaatcagtgatttcttttttcacctattggtgttgaacaaatagcacattaggaagcacatagatttatatgtggtttaaaaacaatgtaaaaagcattttgtttatttgtatttgtattttgagatgtagtttcatcctgtcgcccaggctggagtgcagtggtgtgatttcggctcactgcaacctccagctcccaggttcaagcagttctcctgcctcagcctcccgagtagttgggactacaggcgtgtgccaccatgtccagctgatttttctatatttttaattagagacaggggttcatcatgttggctaggctggtctcaaacgcctgacctcaagtgatccgccagcctcagcctcccaaagtgctgggattacaggcatgagccactgcaccctgccgtaaaaagcattttctaagtcagttaactcagcatctatgatccaaaggctattcttacggaagacctttagaactctttattgcttaattctatacaccataaatgttgtgaaaataaaagaagcctcgtaagggaaaaggtagcttatgattgtgctctaataaagcctgacattaattatgacatgggaaatggaaggtctattagttataattataattacaggaatgcaatttcaactgcctaatatttaagataaaaaatgcaaaatagtatgttagtagagtataaatttttattcaggagaaaagaaaaagacttcaatcagaagacagtgaggaaacaagaaatagatatttagggctagcttaatgaaccagtacagtatgatcatgattgtatcatgatactaggttctaaaagatccaatccaatccatctattattgtccctttccttctcttctctagcctattatgctgcataaagcagtacacattttttgttgttgttggttggttgtttttgtctaaatccaacatgatattttttttcatgcccttatggtcaaatgcccacataagaagtgttaaatacacattgagtgcttcatctggagtgcgtcatggagattcccgtagaaagtatcctattttcttagagtcaagactgttttctcattttcatgaccacatatgaggttttgcaaattcagaatgtccagtgacgcaaatattttagatgtttatagcaatatattttattagagctgaaagtgttaggtggttggttgatattttgctttttttgtttcattttattttactttttgatatcttacagtagatttttttagggagtagtgagcacatgaaactaaactttgactttagagaatatcagcacacaatgttcacatggtaatttcactctcaggaatttattctaagaaatagtgaaagatgcatagtgaatgtttgagagagacagaaagcaaaatattaaaaatatataataggtgaacggtaaagtaagttatgggtacttgtaaaagaaatattatgcagccattagaagtcagatttttgaaaaatatttaatgaaatgagactactgagtttttaaaagtatgcaaggcataactcatgcaaattaagagccagtacagaaataccttggctatatataggtggtgatattataggtgatattttgtatctgtgaagtattaatattttatattttaacaatgcttatgtgctgctttcctaatcaaacagaatgagtatttaaaaaaaaaaatcagtcgggccaggcgcggtggctcatgcctgtaatcccagcactttgggagggcgaggtgggcggatcacgaggtcaggagatcaagaccacggtgaaaccccgtctctactaaaaaaaatacaaaaaattagccgggcgcagtggcgggtccctgtagtcccagctactctggaggctgaggcaggagaatggtgtgaaccagggaggtgtagcttgcagtgagctgagatcgcgccaccgcactccagcctgggcagcagagcgagactctgtctcaaaaaaaaaaaaaaaatcaattaatgtatagttgaagaagagaagtgtccaaactcatcacgtcagtcctataagtgaaaacaagtaaatgatgttatagtctcacacgttgtaagcgtaaatgactttctattggtttgtgtctagtactgccttagaggagggagggaaaatgatgccttacttagtgggattcatgttcaccttgcacagtgcttgcaatgctaccattagggttttattcctttgcacattgcagtgtattaaaaatcttaactcagtagttggttggaggagtaatgtacattaataaggtgtttttagccctgaagacctattctgttatcctaataggtttaaacaatgcttctcggccatgtggtggagcaacttaatcagagtagggaatgaagagagggaaagaagaactttcaaaggcaagaggaagatagctaaaataagaaaataaaggacaatgctgcatactttgagcttagagagagcaggaaataaaagcagagggtagaggtgagaactcaacatcatatgtttgccgaagaaacggtttttgcatttttaaattgtgtttcttaaggccactcctgctgctactcatgaggccttttttcaatttggaggcacgtaactctttgacagcaaatgttgttcgtgctattttaaactgggaagttgacacaaataaatgtttcatagaattctaaatcctgttatcatgaaagctcttgaagttcacctacttcaaacttctccacacccaaattttacagataaatatctgaggttcatccaaatgaagtaatttaccatcagttacagatatattgtgaagcagccaaaactaaaattaggattttctaattcttagtttagtgaagagttcatgatttgtctttctacataattgttcagattaaagggaaatactgagtgtttttgtatggttttcgaaggatcttcatgatccagggcatctgcttgaagatacgaggtgtgctttcactaatttgggaggagcacatttcacattaaatagtgcccacattttactctaaatgttaggtgttcaccgcagtgaggtagcaaaatagagcaattcaacgatataaattatgaagatgcattctgctttcttttaaaaaatataccacgagcattcttaagaactgagattatcaaagaagtgatcttttataatagctcttttgaaaaagactgaaaaataatgagaagaaaaagtggctaattaatggcccttccaagctctaagtccttgattgcatgaacatagagtttgagtcttctcattggacctcgctctttctttcttaatgcccttgatggctcagtggcttacacttcaccttcagctgtgcttttcagaccattgtcagctgaatccatttttcacaagtaagcttatgagggactacaggatctcaaatcgatgtaaagaaagctgttgttgaggaatagggtgctttttccattcttcattttattttattttatttttttaattttttttttgagacagagtttcactcttgttgccccggctggagtacaatggcacgatctcagctcaccacaacctccgcctccctgattcaaatgattctcctgcctcagcctcctgagtagctgggatcacaggcgtgcgccaccaccatgcccggctaattttgtatttttagtagagacggagtttctccgtgttggtcatgctggtctcaaacttccgaccttaggtgatccgcccgcctcagcctcccagaatgctgggataacaggtgtgagccactgtggctggcccattcttcatttaaaatccatccattattcaccccaacaacccctcccaggctcctcatatacttccttattaccctattagggctttgataaaagccagtagaaaagcctgtaaatttagagaacggttatctgtccttagcacatcgaaaaattatgtgtaggcagaaaaatgatgaaataaatactgaaaaaatatttaccttatgttaaatacgttaaaactggaatatgtttaactttcatctgtcagagctgacaaatctatctgctattcacataggcccaagctggcactttaatcaagaaatttaaatactcttgggtttctgaaatggcaagagaggaatgtttttatattgtaaatgttattctatgttttgctgtgttggtggatactcatcctaatcaaatagtaggaaaagtagtgaagtaattcctaatgctgcctgtagtagtaagcattgcttgggcttccccttgcagagtttataatatggtttgaaagtgaaacttgtaggattaaataattgggtaatggagcaagaacaacatggttattttctgcatccatataaaaatataaatgtgtagtgttttataggtttggagatgacatgtcagagcctcaatcaactgactaaacttgcacaaaacttaagaaaaaaataacaacattcagagggctaaaatatcccagtcatttatttctaaactattactattgcatttattactactactcatctagcaatatctcagaaattgtgtcatcaggatattttaccttaaaaaacaatttattgctatttacttacaagatgagatacgtgttctagggaaactaacctcatacatattttccaatacacttttctttcatcctttctgaacaattggggcacacataagcaaccaaaaatattatccaggaaacagaaagtatgcagtgattacaaaaaggaaagctgttgaaagacactaattaaagtcagatggaacacagggagtagaaataaaggtaactgatatttattttgaatattcaaggcttaccataaactagcaggcttcattatttccaaaatggaaagcccatgatcaataatttctccctcttgaacattctatgtgtgtgtgtcttgttttgttttggctgatgtgttttaaagagatagggtctcgctgtcttgcccaggtaagttgctaactcttggcctcaagcaattctccctcctcagcctcactgtagttgggattacaggtgcatgccaccactgtctgaacattccaatgtcacttactattcagtgttttcacattgaagacattattttatcttagttattttttaaaaattgtattattgctgggattctaattaggcagctaaggaggaaaggaagtagaatagtatttttctattcatattccctttgaaagtatggaagtgtcaccaagttgttacgaatgtatgccttcttctcttctcagcaaccacaacagtctatctcaaggcccgcctccctcttatatagttatagaaggcctagaattataaaaaccacaatatctaaaactctgaacacctaaacaaattatttcaatatagataatgcatatacttctcaaatcaatctattatgaattttatatccagcccctaataattataaatttataattcatgtattacattgatcagactttaaatatattgaataatggaagttagacaacatattacaattattttaaatatgaaatattacatttgaagatattcattttcagtttgtcatttttatttacatatttttgaaccaccttaaaaagtaattccttagaaaatattgaatatttttaaagccctggaaaaaaagttagcaataaattaataattcggtatacgttcactctttggtgattttcctctgtcccatattttttctgaatggtgggttcatctcccacctgcctatgttaagtattttagttttgagctctaacatactgccataaatttatttattctgtatgactgtattaatcagatattagaaattggaggttgaatatttgtcataatgccataataaataatccttcccaggtttaaaaccaaagactgggcagtttttctgtttatcctcttccttttctgtaggcatggcaaggatctgttgatcagtggtttagagatatacacagggactgtttactgcaacttttttctcacatggcttcaggtcactgaaagaaaaaagtgtttttttccccttcggagtcaaggaacaaagtacaaatggctgataaaacccattccatattcaatactattcaggataggattgactcttcaaaaaatatttccataattgcttatatattgcttcctctccataaaaactctggatatttttaaatattgccatctttagtaatttccagggcagcaatgattatgattccatgaactttggccttttgtgcttgatatgtaacacttccaaaggctaaaccgtggccttattccattacaaaacatcacttgcttatggctacattttctcctgaaacatggcagctcattttttccctcctaactctaaaactattgcttaaagaaattcaagtgtaggatcacttgggaactttaaagaatgagctattgaactttcagaaaatgttaacatcttatctctttctcaatatccaaagataattttcttttacacatccagtgatttgtggactagtagatcacttaatctctgatttttaggtgcttcaattgtgaaaagtgacagtgatgtcttcctaattgattttgttattgcaatagaggtcatagattggcctcacaatttgactttgccttttattgcttagcatgtctcatatgagttttcctcatttcttttggagttaaaattgcaaatctcccaaatcagtactctggcccactatatcagtttttctaagaaatacttaaatatgctctaaatctacagttacagtaagtggcattggctctagtgatttgatttgagagttgagactacagtctggatttactctttatgcattaacacaggccaaatggacagggactgcattttaaggcagtaatggaaggctgaaggctgtcttaaaccaatcataccagttttacccatgactgattgatccctaggggcagagccctgtaagcatttctcttacatgaatggacgctatagagcctggagtttcattcataaaatggagactgaaaggaaacacacacacacacacacacacacacactcactcactctctctggaatgtccatttatacagagctgaagggtgtagtgttccatcagctgctgcttatgccagttgactggaagtaatgattaatgctcattggtcctgcttgcaagtaacctgacactatttatggccttgcagtgttcctaatgtatagtgaatgagaagacaacattctcaaatcagaaacataaacaggaactggtgggtctgaattccattcaaatatgtcatttcagccccacagtgtttgtctaacttggattttacaggcaggaaagggggaagggatggataatctgcttgtgagttgtactagcttggaaaaaggcaattagaagggggtggagtgtgcttttatagggtgggacttttagtttcttttttaataaaacaaccaggatatttaggcccagaactgcttatttcaagtgggtaaagtgaacatacaactgtttttataagtggaactgagatttgaaattaaatgagacagtttaaagatacatgtttggatctctcttctctctctctctctctctctgtgtgtgtgtctttgtgtgtttttgtctgtttcatgaatatgaacaaaagaagggaacatataacattttttaaagtgtttacataactaagtatctgtttttaggtttcgaatatagttttagaatttttacacttaaatgatttctatacttaaatgagttaactaataggtttgaggaaaagagacattttatttcataaaacattttcaactaggatatgaacaacttgaaaaaattttcaaggaatttttatcagattaaatagatggttattgttcttattttgtgtgtgtgtgtgtgtgtgtgtgtgtgtgtgtgtgtatggtttctatttagttgtttctaacaatctggaaaattttacaggagagtaattcaaagataaatatgaaaagtatcaaaaaaaaaaaaccaaaagaacaacaagcatgtgttattgtgattcatttaactattctctttaaaagtatttttcaactctctgttctggtaatttttttttttagtatgtgggtctgtacatttcactgctccatctgtttttcttagtattaaaaaataaaaccactcacttaacatgacactggaaatattatagtaaatcctgggcctgacatccatttacgatttgtgtcatattgagcatgttttgtaaccccttatgcctccagtttcttcatttataaaagggcaaataactctcatcttttagtgtttttgtaacgggtaaatatggttatgtttataaagtcactgataccgtttctagcacataataggggtgcaggcaataataaaggattcccattgacatgattttattttgactagatacttcttcaaagactgctagtcctttattaagatgccattattatttctaataatttaaagtacagtatttggggctagaggataagataaaataagagagacaatactcttaaaacaatcatattgtgctagtccagcaagagaaacagtcttgctgaacttctttttttttttttttattatactttaagttttagggtacatgtgcacattgtgcaggttagttacatatgtatacatgtgccatgctggtgcgctgcacccactaactcgtcatctagcattaggtatatctcccaatgctatccctcccccgtccccccaccccaccacagtccccagagtgtgatattcctcttcctgcgtccatgtgatctcattgttcagttcccacctatgagtgagaatatgcggtgtttggttttttgttcttgtttactgagaatgatgatttccaatttcatccatgtccctacaaaggacatgaactcatcattttttatggctgcatagtattccatgatgtatatgtgccacattttcttaatccagtctatcattgttggacatttgggttggttccaagtctttgctattgtgaataatgccgcaataaacatacttgtgcatgtgtctttatagcagcatgatttataggaaacaacaggtgctggagaggatgtggagaaataggaacacttttacactgttggtgggactgtaaactagttcaaccattgtggaagtcagtgtggcaattcctcagggatctagaactagaaataccatttgacccagccatcccattactgggtatatacccaaatgaacttcttactagtattattcatatgcaaagcaaatagaaaaagttatctgaatattgtggtgatccaaggagagatgaaaacaagaggacaaagctgttcatggtatgttttttttcaaatcatgtagtttccagcaagagagaaatttaaaattgaaattccacattaaaaccactatctcttcagaattttgtgtggcccattttggcagctaatggcatcctgtatcatactttctttttctttttcttttttttctgagacagagtctcactcagcctcccaggctggagtgcagtggcatgatctcggctcactgcaagctccgcctcccgggttcacgccattttcctgcctcagcctcccgagtagctgggactactggtgcccgccaccacgcccggctaattttttgtgttttcagtagagacggggtttcaccgtgttagccaggatggtctcgatctcctgacctcatgatccacccaccttggcctcccaaagttctgggattacaggcgtgagccaccgcgcccggcctcatattttcttttaaacctctgttaattgtcagagtatggtagtatgaaataaatactcaaagttggtcaggcgcggtggctcacccctgtaaccccagtactttgggaggccaagacggcagatcacctgaggtcaggagttcaaaaccagcctgacttaagatagtgaaaccctgtctctactaaaagtacaaaattagcagggcatggtggtgcatgcctgtaatcccagctactagggaggctgaggcgggagaatcacttgaacccgggaggcagaggttgcagtgagctgagatcgcaccgttacactccagcctgggcaacaagagcgaaactccgtctcaaaataaataaataaataaataaataaataaataaataaataaatactcaaagttacagttgtgtctatgttttctatcacttcaactttattttaaaatttcagcttagtaagactatcacaggcttgtaaaacttgtaatagtgcgagcctagtagatcatataatctaatgttgtttggatctggtcattatttgtgtggggtattgtccaaaagaaaaccccaggtgcttacaagagaagtttataattgtgtagataaaattctatactgttatttttcgccatgtagccttaaactttcaaaagcacgtaaattcagataactgcgataactgcattatttacttattctacttttactttttctttctttactttacttttacttttttttttttttggacaaggtctggctctgttgcctaggttggagtgcagtagtatgatctgggctcactgcaacctctgcctcctgcgctcaaaccatcctcccatcttagcctcttgagtagctggcactacaggtgtgtgccaccacatccagctaacttttcaagtatttttggtagagatggggtttcaccatattgcccaggctggtcttgaactcctgggctcaatcaatcctcccacctcggcctcccaaagtgccaagattacatgcatgagctactgtgcacagcctactctttttttgagatggagtctcactctgtcacagctggagtgcagtggcgcgatctcggcttactgaaacctccggctcctgggttcaagcgattctcctgcctcagcctcccgagtagctgggatgacaggcacgcgccaccatgcccagctaaattttgtatttttagtagagacaggttttcaccatgttggctagggtggtctcgaacccctgacctcaggcgatccgcccaccttggcctcccaaagtgctaggattacagacgtgagccaccacgtctgacctctacttttctctcttttttttaagattttgcaaatgctattacaagcatattaaaaccatctaaaaattaacatatttctcccccatactcaatcaatagtagattcagtacatccgagctattgtgaagtaagtatctctgcagattttacattatttatattcacagtttacttaaaaccctaaagagaaagatcccatctaagtgtgagtgaggtaatactaaattcatcactcccttgtcaggatttctccagctttgctgccttcttcacatgaggttcagtaactaagatgttacattcatgtgaagttcagtaactaagatgttacattcgcatccagttcagtaactaagatgttacattcacatccagttcagtaactaagatgttacattcacatcaagtttagtaactaagatgttatattcacattgagcttcctaatgaacagcaaataggtcttataaaacttgacttttttgctatcattctcacatgaattcagatatatatgtccttattttggaagataattacttttagacttgttctgcaatagagtggtcatatggtaaaagtaaaaaaaaaaaaattatttccattatcattcattctaggaaactttatgaaataagttttctcaattgagtgcactcaatttgacatgtgacaattggaaaagcaggctaaaagtatggcatatacgtgatggctttgcatttaaacacatctgcataaaactcaggtaatctatgcatccttgtaaacctttggattttaaacataaactatgagcttaccagcaaatgagaagaagtaagcaaacaaaaaatctagtgaagtactaagtttaaaagagataaaatgttggcaagatctgtcactatgctcatctttcttgaatgagattggtgatattaattcttaatacaactcagtattttttacataatagacaaatgtttttgaaaaactagttgaaactcctaggtatgcattgatacacacattttttactgagtatatgataatttcagatatgtgtttacatacacattttggctctggatattttatgcaccaagttttagaaatcatcaatatacaatagacaagtttatgtgcacttgattttgtcatatcaactccacaaggagttagtcaagtgtataatcaatccagctttgcactatatacttataggaaagcaaaaccacattaaaatacaacatcaaacatatttatattttactgagatttctcatttcctctaagagattcaaatgcttaattaagttatacagtcgttattggtagaagaatttaaccaaaagcatcaaatggaaaagacttgtttttctcccttatttagaggttataatatgttataattccagatttacacactatttgatagcagagcaatttcagccagctctgtacagatatttcaggcaactgtggcaaatcttttctctttgccgtggcctgatgtagatccttgaaattttaagcaaactctgccctaaaggagagcctccattctgctatagaggcagcaaatatgcaaatcagagagtgcctagcaattttaaatgtgcaaattcaatactgcactttgtggtcaaacctttggtaaagcttcccaaatcaatattatgtttcccagcatagcttgaaaatgcaaatcaagagacagagaagaaggtaactttttttttttttttttttagtttcttgtctgcgtattttaatttgaagagaactttactgatgttactaaacgtgaaaactaatcaaattagatagtttggggtgttagtttattattcttcttaacttccgctacattgattagtgcattaaaatgacaacagggctttgttgctttgaatttttacagcatattagatcagctttcatcaccatgaactcatctgtaacaaattataggcagtttaatttctgtaagctgatttggccagtactaatatgtcatagagcattttgatccacaagttttgaaacaaataaaattctttgtcctaaattaaatttacataatttaatttttagatttaatttaaaacttttaaaaccagagcgctttaggagctaacatgagggggtaatactgtaaaaagaagctcaaaagaggtacccccggccgggcgcggtgactcatgcctgtaatcccagcactttgggaggccgaggcgggtggattacttgaggtcaggagttcgagaccagcctggtcaacatggtgaaaccccgtctctactaaaaatacaaaaaattagccaggcatgctggcgggagcctgtagtcccagctactcaggaggctgaggcaggagaatggcctgagccgggaggcggagcttgcagtgagctgagatcacggcactgcactccagcctgggcgacagagcgagactctgtctcaaaaaaaaaaaaaaaaaaaaaaaagaggtacccccaaatagttaaagcatctactggagagtctggcttaaaccttataagtttataatgaattttattgtattttagatatcatagattaatagatagatttgtgaaaaatattccaaaatagatacactaataatcaacaaatcagtcatctcatataatttaagaacagcagagtaagataacaaatgtaacttatttagatatataattatttttagttttaagtactgtggttaaagtactcagtttaaatacttgtgaggatcacttaaaaatagtgttattaataataagtcccatatggtgaattcttacagtgtgcagatactgtgcgaaatgttgcacataacttactccacgtggtcctcccaacaacccttttaaggatgtcattattattattattcccactttacagatgaggaagttgggagttagagatgttaaataacaacaaaatgtcatactcccatgcaatgtcagaactgagattcaaaatcagttctatcagatgacaaggtgcctgtttataaccattgtgctgtacttgtactaatgatccttaaactataatctgtggatgcataataggacagtgtgaatatgctgtcatcttaatatttttgcatgagttaaactacagcttgttacggttgttgaactttgtacattttattcgtgaagaaacagaactgaatgcatatgcaatgcctccttcctctgccacaaaacatttgcctttgaagtcgccgcttagctagtttggatcatagtcaagcatttaacaaaagttaaaatgtaatgccaaacttcattggttggattttttattagataaggtagaaatgaaagcagcaggcaatttaattagcagtaatttttctgggcaagtcattactttgatgaacttcagagcaatgtttatggctcctaattaaccatgttagtcatttgattgaataatcactttggaaatgtttctacaatttgattagagtctgacccactctgatagtcataaattaactgatatcacttaaggataacatgactttacttactttatggggataatctccccttagccatattttttcaggcttctctggactgtataaaggacaccaattttaagtatagaccagatttaaacaatgctagccaagtgtatccattttaagagctagatgttaattttatttacactagagtataaatagtaacagcaattggcaaaaacacagtcgtattccatatatttctaaattgccatccattgcttttttgagttcacaagttgggcctttggaagtgtaatggagattctggcattaaccttattatatgttattaatttattatgaattttaaatcagtatatcttaaatatcatagattagaatttattaagaatgttataaagtaaatatagcaataaacaaatcagccatttgaatagagatggtattagtgaaattatccatcagatctcaaatttgatgtcaaatatctagttttccagggttatgctaattttgtcatatgttaaaacacttttataaggtgttctttgacattaaatagtgaatttctcagaaatgtttgcacttcctttctccctccttttctcccactctgggaaggaaagactgcatttagtcacacttatatgtaatagagtttagcctatctgttttcctctggctgcctccagagtcagccagctgtttttatagccgcaatccaggtgtgcagcagtcaataaaagtattttgtggcagggtgtcaacattagttcaacaaaatgcttgcctcaaagcagctgctgagctgatggcagagttattaacactgtcccttccagtcccagctgctttaagggaccttacgtctgggaataaatcaaaatagcattaaaaattaatttgaagtaccattggttaagaagttgggctaaaatggattgctaactatttggtaacccaaaagattaactatactgcaaccctattataaatgcagatatcaggaaacagtgttaactctgtcttttatatggtcagaattatatgcttcataatacttcatatgaagaaggcatagtataatagcataataaaacttttgataatacattttacagtattttcaacttgaaagcttctaaatatttccaatgttgctatattcatagaatgctatgggattatacaaatttatttgctaaatgtcctgatgcatatttaaaacttgtgaccctgtttcaaggacaccatctcattcatgtgggttgctgtttgagctgacttttagcaaggtttatttgggtaaaactttgaattcaccttcctattcaagagaatcagcattcaccaagatatatactcttcattctttcatttcatgtgtgggccctgcctgaaatgttgattatatgttgacatgttccccacattggaacctgtgtccgtttctgtatcttctctgtctgcaccctgtccattgataaccgcagcgtttcagctccagactctttttgaccaatattgtttcctctttcagaagtgcctagctgccactccatttatatgaggcaagaaggcttcctggctcatcccagcagaacagaagttaagttgtccaccactgaaattccgtgtaaataccgttcagaataatcagacatcccaaatatgacgtcatttaattaatcattatattatttgggaaaaatcatttatgttccctaagcaattgttttaagactatctccaaagtaaaaagaagatgtttcaagtagtggtatcttgttgttaacatgagtcatatgcgtagaaacaactgaaaagtggatttctgtgttcttttttgccaacaaccacatccttttaaaatagaacatatgctttatagattagcccactttactactactgaaatgtatctttgaggaatatttggttttgcttttacagacctagtcatagttttggagtaaaatgccatcgatttaaaggttttcacctttaaatgttctggattttatatttttggacaaataatttatatgaatgagatttcacataggaggcctagagaaagagttttctcatagacaggcttgtggtaaccgtggtaggaaagctttgcctgtaaaggactttgatacctaaaaagtaatggtaaaaatgatttcgtctggatataatcctcaataaaggatttctgaaatatgtgcatggttcctaacctaaacactctacatctctttaataggattgacttggatgcattcttttaggctaggtctaatattggttattttgtgtaaatgatattagtagaattttaaagggtagtatgagatggtaaatgtaaaatatttgaaattaaaagttttgcacaaatgcaatgtaattattgttgcttctgttgttagtattatatacccaccataaagaccaatacatttgagaaataaaagtaaactctatgaaatttattcctggtaatcacagatagcaacaacgaaagttcacagtgaaggatatttgagagaggacattattatgaaaagctgttgatttattttgcatttttttctgtggacttaccttacagcaaaaaaaaaaaaaaaaaaagggaaactttttttttcctcttatcttgctaattgagtacaggaaggttaacccatctaaatatttttacaagaaagtaagaggataaaataaatctgtctcagagcatcagactaataatataatgtgaataccagtaattcaccttgctttctcactttttcattgaacaataaaatttagatgaatctaaaaaaggagacgatacgttataaatccttgccaatgtttaggtgagctctggcttgagttaacaatgtaaataactaacttttatatttcactgtgtactaggcatcactctaaactacagcaaccctataacatgataagtggtgttactgtcatcccatttaatagatgaggaaactgaggcacagaggttaaataatgtgtccagggctcaaggaactgaaaggtggtggcagagtcattttctatcacaatttttatgttaaatggttatattttaagtgtttgtgagcttcatttctatcatgaataaatgtattcctttttcatccacaggctgtatgtttgaaaagggccccaggcagttttatgatgacacctgtgttgtcccagaaaaattcgatggtaggttttacactttgcctcaagttctgatttttttaaagatggagtgattaccttcgcttcttctgaaaacagtggacatccctacttaaagattcctatgcacataattcatcatgcacttaattttagccaacgttgacctattacaatttatctcttccttgccccagtaggaaaccttttcttttgtgttaggagggagttcatttttggagaaatagacaaagagcatcattcttgctgagctttgtgtagcgtaagagggggctttccattgccctgctgagcacatgcagcttgttattcgagatttattgaaagctgatcctgtaattaacaaagcagagcagaaaacgtgctgctgtggatggaccgatgactaacgcggcctctcttctttcattgttcatggaaagatgcattatggaacacaggaacaacataactgcccatttagttagtgattgttagtccctttttttttttttttttaactggggaagatgtatgttactaatgtagcatgactttgtaattgcttaaaagggagttaggaaagcattacctttttaatatcacttgctattgcaatgcagaggtctcagatgttagaaaagggtgtcaagttaaattgaattttttttttgacaaaggtgacaaaagttggcatcttgaggaagcttgggtaaaaagtaaacagttaattgatttagtggttcttcagagtggttttcatatttcctgctttgatcgtttgacaggaaaccagcaggggccctgtgattcactgattgcacaaactttgggggtcatggctataatgacttgggtgctctctgaagttttaaattgtcattatttaaacagcaatgtacatgctcagattgcttttcaatttctaattagttgcttggagactaccccatgttcccgagctttgtgctacccttacccttctcagaagggctggtaagtctagggaagatctgcttctttatcctcctttagatttctaaattcattcaaggtcaaaaaaaaaattataggaatcacatttttggttttattctacaacagatgttagctttaagctttgcatttcagaggggtgagccgtactatttagcaacattagcagagcatcagcattcttaaaatatagcattttctcttagacaaagtatataaagcctcttactcttggaatgaccttcattagtttctttcgtgtttggtgagcttcatatttgcagagatcttgaaaattagtaagggcatataagaaagaaaaatatctcaaaattatggacagaattacaatataatctgacaggccaaagtcacactaatatttagggaacaagctgccttgattatttattcccttcgacttttaaatactcttcaattttacactaataaaacattttttggaagatagtatttgccttgtattttataagtaatgtagaacaagaagaaagaaaaatgagggggttattttttcactgtacatggtcagtgtgatcagtcacatttataggcagaagcaatatagagactataaaatgtaacagtgtttcactctatctgcataattactcagttactcccataaaaaaaacattgtaaatctcagaaggaaaaactgagataaataaaactgtcattgaaatcgatatgaagatacacttctatattatcatgttaagaccaaaacaacataatgattttagcagctattgactcacacattttatattttggtttaggtttttcaaatgttgccctttctgtaattattttaagaggtatatgtctctctactgaccataggtaagttttagaaagtgtgcaatttggtctattttataatgcacacttagtatgactacataggcttagatatattttgtctggattgtttctttagcggagaagagcaatttatgcactaacaatgacatacttgcagggccctagacactcaatccccaatgtgagcagttccacctatttttgagacatgtggctggagatggaagtaaataatcagaagtcatgaaactttgtatttttttttgtaaaattaatataactgaccagatttataccagaagcattgcaacatgaacacctttattgctgtgctctatttaacagatttttacactagatatgaatatcaaataaatataacacaaactttttgtgcttaaaaatacatacttacagaaatctctcgtgcatgcatttttaaattggacttttagaaaaaacaatagcaagttaaattcaagtgagtgaagtacaagcaagagataaagaaaaatgagagagaatttttgttaccagttgaaaaagtagtagctttaataggaaggtatatgatgcggtgaaggaagggtagtactacgataatgcagtatgccctgaattacccacaagattttccttatttatataaagtgaagattacttaactcagtttaggatactattaaatttgctttgaaatatttgcattaaaattttcaatagtttttcatgagcaggtcaataagatatttataaattatagtttgcagaatttaatttgtatgaatcaaatgcccagagcttaagattgattattccctcttcagtgttgcctagagcagtgggtaatagcattaacaataaaagcaaagaagtctgattagatacgatggtttttaaagaaatcaatttaaaaaaaaagatagttccacaatatttttgtaagtaaatgatgtgtgtcattcatattgacacaggatttattctgcacctgtgttatatatagttatctgtaagttcgtacagcttgctcatttatattcaaccatttaactattttaaattcctctttaatggtaataatatatttcataaatgcccataaagtggttgattgtggtttaaccatattagtgattgatttaatgtacattttatgtaagatagcatagtattgctaataatagaaacttaaaaatgttttaatttaggagacatcaaacaagagccaggaatgtatcgggaaggacccacataccaacggcgaggatcacttcagctctggcagtttttggtagctcttctggatgacccttcaaattctcattttattgcctggactggtcgaggcatggaatttaaactgattgagcctgaagaggttagtttaatagattttaattaggacactcagacatgttataacataaagaaactgacacatttgattaatataccaaaaatgtattcttaatcatttcaagactttagggaaactttctgaattaaaaagcatgcaaagataaaacatgtctacctttaaaatcaccaatgtattgcgtgttccttccggttgtatacaatcctacaaaattgatgttggagaaaattaaccagagcatgctttgcacctttatttaagaatgtctggcttcagggtttctaaaggagcatctgaattagagaaaagaggcaggagggaggttttatggtccttaggagagaggaacgatgtctgcaaaagtcaactggttgggggatgggtgaattattctttcaaattagcaatcattatttggacaacttggattttgtcatgagggttggagaggagcatttagaggccaaagttatgttcaaaagaagattggggaaaaacagctgtggcggataaagggatgcaagggcaacagtggaaaattctcagcccttaagtgtctcttacaagacacaggcctggtagaaacattttcctttgtccgtgacacttgttccaagtcagctggactggcatactccattggaaggttgggatgaagtttaaaatgttgccatagcacataaaaaattactaaaataagaagagcctggacagagataatactgtacagagaaatggaggacaccttcaactaacttcaattgtcccctccttcccactccccacatacaaatggagtatttccatgaagaatttctcagttcagtttttattcttcccagaactagctttaggcttaaggctactattgttcctgtagcataactcatcaatagcattttggactgctgatggaaaggtgaagttaatatcaaattgttgtgtcttcattactaaagatactttctctgctactattaaaattgactttagtttatatcagccaaaaaagcaatggaagatttttagctaccatacctctaactgattatattaggtattgaatctaaacacctcagtaatattgaaaaattcagtaagtttaaaaaatgtttgaacccaaagtgattttcatatacactgaacatccacacccttgactactgggtccatcatcttgaattttctgtctttattaaaccacgtattcaactataatcagataatatgccctaatttgatgcccagaagataagtttacataacttcttgaaatttaagagattatctgactcgagaatgtactgaaagtatgaaataaaaggcactggttagaacagtcaagtctccttcagtttatatcaatactttagtaacactagagggttagttttgcagtatctcccttgccccacatcaagcacgcacacacagaagactcaatgtcagtatttgaaaattctcattatctaggatgacgtttgggtgtttgaatgctgtagtgtgtttaaaattaacttagctgtcaaagaagattagttttttcatagatactctcacatgatgtaagtgaaagaaccacaaaaatgttaagcactaacaaattgagactagaagcatttaacaaagtaatttgaaagccctttcgcatgatgggagtgtgtgctcttcacctcatggaagatgttaataatcactgcaagagttggttcatgctggaactgagcactttctacagggatttgtatcagttaaacagttatttcccttcacctgtgattaaaatgaactgagcagaggtttttgttgttgttcctgccatatatttgttaagatagggaacattactgaattatgccagtatttcttgatccactcagaagaagaaaaattcttttgcaaatgattaagctttttatatagcaactgttgacttttatgatgttcagatttgagtaagtaggagatttgactagatgaccattaagtttcatcaaattctgagttactgtgatttttaaatggagggaagaagtagaattacatctgttccatacaacagactgacatttagacaactcttctgtagcagcctcataaagttaaaaagaggctggataattcagagtcagtagagcgtttccaaataataaccaactcaatgggaattgtgcaataagcactgaatgtctcctaaggcttttgttcaaaatgaaacatcccatatctgattgctgcattgctgactgttgcaattacttccatcaggcaatgactgtagggtcttgtttaaatttcttctttggaaagggtttgtgaaatttcttgtctttgtgacctgtggtcaccctgttccctctactgcctagcagctcattgggtgcctgtgtcagcacagtccgtgaaagatgtctctgaagccatcttattggaattactgatgggttccatttctttatatttcatcttgcattttaaaatgatattgagtgagactccagacctgcacagattatctgctcagtgtgtttagggtaactttagaaaacgcataatctttaacatgtctttttcttagatatttgagataatgaaatactatttttgaattagtcatgtctcctagggaattgttccaggaaacaatttttttttttttttttttttgagatggaatctcactctgtcacccaggctggagtgcagtggtgcgaccttggctcactgcaatctctgcctcccgggttcaagtgattctcctgcctcagcctccccagtagctgggacttcaggtgtgcacccccacacccagctaatttttgtatttttagtagggacggggtttcactatgttggccagggtggtcttgaactcctgacctcaggtgatctgcccacctcagcctcccagagtgctaggattacaggtgtgagccactgtgcccggccgggaaacaattattaacatagaaagtcgtctgtaagactcagtataaaagtcttttgatgaaattgaagcttgttgagctggaagagttaccaggaagtctgatagccaggccctgattgttgttatcaggttcagtgttacatattcaagcgtgatattttaaaataagttgattaatgcttgaactattacattatcttatttaatttatttgacaataagggtgaatgccatagtgctatcatctttttactctcttcactaacaactcaagttttcatttgaaggcgtatataaggaagtcactggaagttttcccaccatttttcccactccatattggaaactatgccttgactttgagtggtgttggatatggtggcgattggtcggtcgtatgtgaaggctgaatgaactttcttagttggtggttggcctacctggcctggaattatttacgctgttaatttataacttttgtcttgtctgcatctcttaagcatattgctctctcccatttacctcaactttatgaggaatatgacactaaaacaactctaagactacattttattgtttttaaatgtccactaatacccatgatgctgagaatgaactggcatgataagtatcaaactctgtggtatttttaaaaatcatatttctctctccagagacctccacaacattgtattaaagttgttgtgagtatgtgagtattttattttctaggtgcatcctggtgagtttctagaaaataatcctttataaatgaataaggattcagaaattattgtttaaggagatactaatactttattttcacatcccctccaggtttgcatatagttcggctgctatgcctattaaaggttcactgatgtccatagttaggtttttgaatgaaatattctttagaaaatgctttcatttcttattgcctccccccagcgcccccacccccgcttcaattcactattgctcagaagatttacattaaaatgaagtttatctttgggaaattgagatgttcctgccactgtgattgtctgctgggatatatgatgttgtccctgttacatcgcatctctctactcttaaaaaacatactgatgcatgtcattaaagtactttatttcttcattcagagaataaaaattactgagagggaaaatagctaggatcggtatttctaaaggaaaaaaaaaacctggagaaaggttattactaataaagcaaagagagacagaatgatctctttgaaaagcaatctattttagtatatatgacatagcaacaacttggaattttatggaaatgaaggcgctccctagccctattagataatgtcctcttggggttgcctaggtttgcgtggcagctgcagtttcttctcagactaataaaaagtggaaattaatgagagagtgactttagctggggtaggaaaagcaagctacactattctgtatactgctttggctagcctggggtggtgatgaggtagggatatatatacattgaggagagaggattttttttaaagctctattgaaaaactcttagatacattgctcctccaaagccacataataaaaagctctgagtttttttattaaacaacagagtagacattctgctttagagatttttgtttgtggactcatatacatggtgaccttttccacttccttcttatttttagcatccaattaccgttctctaaatgaatgcttaattcttcagtttggtattacccacagttttattcggctgctgctttaggcaataaaaagtatttgcagttcggtttattaatttgtgtactgtttcctctgctacacacattgtcacttgttcactctttcatatagtattgagcagggtatcttttttcctttggcttatcataacctcagtaaaacacctttacaaggagatcactaagctgctctttatctatagtttttgtctgaaaaaccaagaaggataaaacagacagtatatctcagaatgaaaaacgtgcctcattttggtgaactgtagcctgttcattcctgttgtaagaacatttccttatttccatttaattttgtattcaaaacaatagtgacaaataattctattgtggtgttttagaaggatcactgcacgcctggtttaaaatgcaaaccaggccaggcgcagtggcttactcctgtaatcccaacacttttggaggccaaggtgggtggaccacctgaggtcaggagttcgagaccagcctggccaacatggtgaaaccccacctctactaaaaatacaaaaattagccgggcgtggtggggcccacctgtaatcccacctactcagaaggctgaggcaggagaattgcttgaacacaggaggcggaggttgcagtgagccaagttcgcgccactgcactcccagcctgggtgacagagcaagactctgtttcaaaaaaaaaaaaaaaagcaaaccaggagacaggaaatccagattacgatagctcttgctactttacttatatccttgagttggacatttttgtgggtttggaagtaattaattaaataatttttatgaaatatgctgataagttaatacttaacactacaatgtaattctgtttcgcggcaggtggcccgacgttggggcattcagaaaaacaggccagctatgaactatgataaacttagccgttcactccgctattactatgagaaaggaattatgcaaaaggtgagcagctaatacagcattaaaattcattgaaatgttgcacattaatctgaacatcatactttaaacgccacatatcattgcattgctgaagcgagtttttcactcattttaacaaatgcttagctcttggttttggtattacaagcctttctatgtataaatgcctagacattgtagacaaatgtgtagtgatattgtatacagaataataggctttctggaaggtcctactttgctgcacatggttaaaaaagattgttttagtattaatagcacatctgtcttcagaagtttttattgcacattgtctacaattatataattttggaatgcttttgtttatagcaataaagaatctttagaataaatttgtacttttttcttgttttgattcttaaaacagacatttctttttctcatttgtgaaaacattttcttccttgcctcaaatcttgcctagttttatcatctgatagtttgacatcctaaaccattcattaaaaatgaacatttgatcttatttggtttgtggaagttcaatatattttatttcaaatgagcttcccataatatttgaaagtagctttttgtttgtttgtttgttttgagacagattctagctctgtcgcctagggtagagtgcagtggcgtgatcttggttcactgcaacctcagtcccccaggttcaagcagttctcctgcctcagcctcctaagttgctgggactacaggtgcgcaccaccacacccagctaatttttgtgttcttagaagagatggcgtttcgccatattggccaggctggtcttgaactcctgacctcaggtgatctgcctgccttggcctccaaggggctaggattacaagcatgagccaatgcacccagccaagagtagctttttaaaaaagagtagagaaaaaacaagtgaattacacttaaaataaaatacaacatttttgaagaaaggaataaataaatgaatgaagataaaacgtggatatttgtttttattacaccctttagctttgcaagtgtacagaaatctaattgctttgactgtgaaccaagtttatgatttacctattgtgaacgttacagttttattttgtatcatttgtttattttagggtttgtaaacatagttacatgttatagattgtggcacatttttatgtcaccatagttttacccagaaaaactagaccagttgctacatgaagcttattagagcagcgaaaaatagcactgttgactttcctagaacattgtctattgacaagaggcatattatctcagtgccctagaatttgctggctcagacgttagaacttccatgatccttaaaagaaaaggctgacttcgattttcagttgcttcctgttttctcaatcatgccttcaaaatgtataacagtttactacctgctcctcctgtctttttcatctcaaccctggggtcatttctaattcctccctttctctcacctacctttttgtagtaagatccttcaaatacattccattcctttcttttcaccaccatcttcctaatgcgggggcacattgcctgggctgtcacagatggtgctcagcagtgtccccgggcagtattgcacagcagtaacagataaggcagtcaggaattaggtttgaatgctagcctctcaccagattacattcttgaacagattattttcctagtaaatggtgatattcttgcctcattaaagttgctgtgattattaaatgaaataatgtacttgagatactttacattgtaactggcacaatgtaaagtatatctgaactcctgggctccagcaatcctcctgcctcagcctcctgagtagctggaactacaggtttgcatcactgcacccagctaatcacattctcggatatgtaccattctgatgttcaagtaaattctagtatagtcattcagaggaaaactatgctgtccttttttaaatagcaaaaactatgatgttgaattatatattttaacatgtaggagaaaatatttatatggctatatttgttcactaacttaaaactttgtgggcatatgtggtgtatataatatagaaaattagaagattagagaaaaataaaaataacttacatctgaacatgttaaaaaaattgaaaactggtaattaattttagtaatacggaagaagtaagaaacaatggaacagtgtatgtttaccttacagacaatgcctatgtgtacttctatttcaaaattaggaaatgcctagaacaatatataccaatatgttaatggtgattatattctggatgatataattatagaccctttgttttaacttaattgataatttctaatttatccttcagtatccccatattacttctgaaattttaagagataaaacataatttgaatatccagccattgaaagcacagctctaaagctatctccttgtttacttttgatttatctccctggaaaaattcctgttttttctgtctgtctcagtgttgcattttggctatacttaatgtacagcattttgcacgttagtacttctgttactcataatggaagacatcattccccttggttggttatcatcccttgttctaaactcagtagcatttaacatagtccagcaaatgaagtagtagccctaaaaatgtttattcaaaagcaatacagaaggaagcagtgaggaaaggcagagtccttgagagattgcataagcttgattgcatgttacacattttaattcatttattacataatttttaagtatagccagtagcaacccgtcaaaggaagtccagtacttaaagcaaatgtatcttcctccacagccccaaacaaaacaaagcacattataaaacactcagaggtatgcaggccatttattttattttattttttctccaaatactttgaacaaagaaaaaaataaaggaaaactaggatttactatctcagctttgttcctgatagtgctatttttatgtttatggtcatttcatcatttcacctttaagatcttaattttctttgtatgaaggactaaagtaaataaatgtatgccagactcctctgtttctggcacagtgctctgtgctggagacttccatcccaaccttgcaatgggctttctgaggcgccattcctgtctccatttcacagcaaaggccactgagaggtagtctaagaaacaggtccaaattcataaaaactactaaatgttcattctttcaaacctaggtacattcagattatttgaattctctaaagtggttcctcttacttaaattcagggcaaaagaaacaaaaaatgttctaaatttgaattcagagcagcagcattcattgacaattgttacttttccctcaaagatataacaatactttataacccaggaacacactgttgccccacatcaaaaatcaactagcaaatgccttgttgatatacaggaacatggaggtgttgtgtcaccttcagctttctaaaatctcatacctttacacacacccatacaaagtgactatcaaagttaatagaaagaactgtattcatccacccatccccccaccccgggttttgagagcatctcagcattgtctattaacaagaggcgtattcatctcactcagttgtttataattttctagggaagcattactcttcagaatttaagtttggggtatgtcataccctataaattatgctacttctttattccaggcagttgtcacatttctttttctcatttcctccctgtgcattgtgtattttaaattcctttcacttttttacacctcttacttcaatttgacactttacacacatccttaactctgtctaatgcatcttgccttcatttttaaaagtgatgtacccaggatactgtccttttgatccatctttcatttaaatgaggctgtgtatcctttctttctttctttctttctttctttctttctttctttctttctttcctttctttctttttctttttctttctctctcctttctttctttctctctctcttttctttctttctttatttctttcctttctttcttctttcaacacacactgccaaaaaagaaaaaaagtaaagaatccatttattctgtgaatcagtgaattactagtctagtcttattgggaataaagcacatttttcttttaaattttgaatttagtttttctaccatttcagatatgtaatattaagagggacagtgtaccttaaaagtacagatttgtagatactaccttttaaaatgcagaaaaaaagctttcaatatgaaatgcctgcattaaataattgactttttttcaaaacaacgatgtaagtttacctctatattaagacaagcaaattcctgtgcttcctagctatatctggaattaattaattattattcaaggtcaacattttgcatctcccttgactgaactgtagtttattccacaaagtaaagacttttttttttttatgtgtatctgctattagttgtttgcttttttgggccagagttacccatcctttcctgtatattaaaccacgtttttggctttttccttcctgtccttccccatctggcgatggtgaggatgggtttttctcttccatgttatcatcaggtggctggagagagatatgtctacaagtttgtgtgtgatccagaagcccttttctccatggcctttccagataatcagcgtccactgctgaagacagacatggaacgtcacatcaacgaggaggacacagtgcctctttctcactttgatgagagcatggcctacatgccggaagggggctgctgcaacccccacccctacaacgaaggctacgtgtattaacacaagtgacagtcaagcagggcgtttttgcgcttttccttttttctgcaagatacagagaattgctgaatctttgttttatttctgttgtttgtattttatttttaaataataatacacaaaaaggggcttttcctgttgcattattctatggtctgccatggactgtgcactttatttgagggtgggtgggagtaatctaaacatttattctgtgtaacaggaagctaatgggtgaatgggcagagggatttggggattactttttacttaggcttgggatggggtcctacaagttttgagtatgatgaaactatatcatgtctgtttgatttcataacaacataagataatgtttattttatcggggtatctatggtacagttaatttcacgttgtgtaaatatccacttggagactatttgccttgggcattttcccctgtcatttatgagtctctgcaggtgtacaaaaaaaccccaatctactgtaaatggcagtttaattgttagaaatgactgtttttgcaccacttgtaaaaaggtatttagcgattgcatttgctgtttgttgttttattttgctttatatatgacttgcagaggataaccataaaatgggtaattctctctgaagttgaataatcaccatgactgtaaatgaggggcacaattttggactctggcgccaaactgagtcataggccagtagcattacgtgtatctggtgccaccttgctgtttagatacaaatcataccgtcttttaaatattttgaagcccatttcagttaaataatgacatgtcatggtcctttggaatcttcatttaaatgttaaatctggaatcaaaatgaagcaaaaaatatctgtctccttttcactttcttcagtacataaatacattatttaatcaataagaattaactgtactaaatcatgtattatgctgttctagttacagcaaacactctttaagaaaaatatccaatacactaaataggtactatagtaatttttagacatggtacccattgatatgcatttaaaccttttactgctgtgttatgttgataacatatataaatattagataatgctaatgcttctgctgctgtcttttctgtaatattctctttcatgctgaatttactatgaccatttataagcagtgcagttaactacagatagcatttcaggacaaaatagatgactcaaaccatttattgcttaaaaaatagcttacgccatgctatgctataagcagcttttatgcacattgacaaatgaagagtaagcttcagcttgctaaaggaaactgtggaaccttttgtaacttttggtgatatggaaaattatttacaaaccgtcaaagaatatgaggaagttgctgtatgacatagtgctggcactgatattatccatcatctctttttggacacttctgtaaatgtgattggattgtttgaaagaagatttaaagtttcaaagttttttgttctgtttttgctttgcatttggagaaaatattgaaagcagggtatgttgtttcattcaccttgaaaaaaccatgagtaaatggggatatagaatctctgaatagctcgctaaaagattcaagcaagggacatgaattttgttccatctatcaataatatccagaagaacaacttttttaaagagtctatagcaaaaagcaaaaaaaaaaaaaaattctaaacacaaagtcaaaataaacctattgtaaaagcatttcgtgatgagcatgaaaaagattgtttaaagatgatccccccagctacccattttccaaaactacacagatcacagctcatttctctaagtggagcagttatcaagaaacccaaacaccaaaattgctactcttcacatttaatcctacaaaaagtactccaatttcaaaatatgtatgtaacctgcgatttcaatgattgttgttcatatacatcatgtattattttggcccattttgggcctaaaaaagaaaactatgccttaaaaatcagaaccttttctccccactatgcttatgtggccatctacagcacttagaataaaaacagatgttaaaatattcagtgaaagttttattggaaaaaggaattgagatatataattgagatttggtgaaattgaaggagaaaatttaagtgagtctttaaaatatattctgaatgaaaactgtattgaggattcatttttgttccttttttttctttttctcttttctcctttttcttctttttaatagtctagttttagtcagtcagtgaggaagaattgggccatgctaacgttatcacaagagaacaatggcagaaatggtattagttatataatatttaaggacaaactatatgttttgctgttttaacgtagtgactcactgaactaaatacataattgaccaacattaagtgtatttccaatacagaagggttgaaaatattacattataaactcttttgaaaaatgtatctaaaattttttaagttctgttttgattccactttttggttgagtttttatgtttttgttttcaggtagattaataaatctggcagctgatttctgcaagattcttgtgttttgaatttctcattgaattggctactcaaacatagaaatcatttgttaatgatgtaatgtcttctctcagcttttatcttcactgctgtttgctgtctcttgatgatgacatgttaatacccaatagattaattgcaacaaacacttatactcaaataactaagtaaaaataatttttcttgttatgtccatgaaaagtgcttcagaataaaaatccacaagactgacagtgcagaacatttttctcaaatcatgggcggatcttggaggtctagtttcccgtagatgctgtaaccaattaccacaacttcagtaatttacacaaatttatcttatagttctggaggcagaagttcaaaagaagccttaagagactaaaaccaagatgtccttaggtctggttccttctggaggctccaggggagattcttccagctttcacttctagagtctgctgacattccttggctcctggctacatcacttcaatctctgcttccatggtcacatactcttctactatagtcaaatttccttcctgcctcttataaggatgcttgtgattacatttaggggatgctcagataatccaggacaatctctccatctcaagatccttaacttaatgacgtgtgccaagtccctttggctagataattattcataggtcccagggattaggacatggatgtaaggggtgagggcagggctgttattcagaacaccgcacggaggaggaagactgtgtagcaaagactctaattgatttactcaggaacagtggagttctgctgagggatctaggatttgaaagtactagagtttgcttttatttaccactgagatattttccccttattctgcataaataattttgaaaactttctatattaaatttcaactattccactaaaatgtctggtaatcacatcaagcctttagattattcaaatccttccccagcccccaggaaaacactaagtcatgaaacagaaaaacagaaggtatgataataatagtaataacagttaaatcagtggtctaatccagattttattttttaatacatttcttttggtgttaatatgggttactatgtgatcttatcatttgctagtgattattacttattaggtaagaacaatgtgtaaaatatgtctattactcaaaagaacaattgcaaaatgagtcaacttatctttatataaccaggaaagaaatatattgccagaagctacagaattttgccagatgatagggatttctaaaatgagccactttgtctatcatgcagccttttcagagcttgtaatgagaaaacattacagaggagaaggtcatttggatgtttgttacttggaatcctagaaaacaaaaactaaaatttaaaaataagaagtgagtaagctattttccatttgcgatttggtatggagaagagaggaaatagaattattaaaaaaatacaaattgggtaaaagtgatggtggaaaaaatataaagaaggcaaatgtacatattaagcaattctactaagaattggaaaaatcaagtttcaaaaagatggtaatagttgggcatgatactagaaaatttcacccagtttattcagagctcaactagtacttttaggacttctttttttatatacatgagactcactttgacatacttaaaaaaaaaacagtttatggaaagtacagtttaagaggagaatttgattagactaagtggatatctttatagaaatattaatgatttcagaattttcagttacaagtgtatataccgtggctattgtttatggattcatatgtaaggtagggtcttttttgcatatagactccagtattagttactttcattctaaaattatatttatgcttctatggggaagaaaatttttaattcacttggttgtattaaaattatacttacggtttgagaaaacatgctatgaaaatcatgattatagcaaattaaatatgctcaaaatttaaatctaaaataaaagcccagaaactgaaaat

SEQ ID NO: 232 - DNA, 55798 bp, Homo sapiens
gagaacacaaggatttgtgagaaagatgagaagttgaaatcaggtttatgatgaatttgaaatgcctataaaacaaggtaatgaacttttttattatttaaaatggtcaattcttgtcctctgctttggcaattattccacataatgggtcagagcccatctcccactatgggatgcccctctcacagataaggcccaggttccatatgtgacctagattttttattaactttcatttcaggttcaggggtaaatgtgcaggtttgttatataggcaaattgcatgtcacaggggtttgatttacagattattttgctacccaggtaataagtgtagtacccaataggtagttttttgatcctcatccatctccctccctttaccctcaaataggcccaagcacctgttgttcccttctttgtgtccacatgtactcagtttttagctcccatttataagtaagaacatgtggtatttggctttctcttcctgttctagttgacttaggataatggccttcagctctatccatgttgctacaaaggatatcatctcatgcttttttatgactgcatagtatttcatggtgtatatgtaccacattttctttatccagtctacagttgatgggcatttaggttgattccatgtttttgctattgtgaataacatgcaggtacatgtctctttatggtaggatgatttatatttctttgggtatatactgagtaatggaattgctgggtagaatggtaattctgctttgagttctttgagaaattgccaaactgttttccacatttgctgagctaatttgaattcccaccagcagtgcataagtgttctcttttttcccacaacttcactagcatctgctattttttgactttttaatgatagccattctaactagcatgagacggtatctcattgtggttttgacttgcattttgctaatgattactaatgtggagcattttttcatatgcttgttggctatgtatctgttttctcttccagggtttttataattttaggttgttcatttaagcttttaatccatcttgaattaattttgggttatagtgtaaggaagcggtccagtttcaatattctgcatatgtctagtcagttatcccagcaccattcattgactagagagacctttttcccattgattgtttttgttgactgtcaaaaatcaggtgattttaagtgtggggcattatttctggcctctccattgtgttccattagtctatgtgtctgtttttgcaccagtaccatgctgttttgttactgtaaccttgtactgtagtttgaagtcaggtaatgtgatgcctcctgctttgttctttttgcttaggattgccttggctattcaggcttttttttggttccatatgaattttaaaataatttttttctaattctgtgaacaatttcattggtaatttgataagaatgtcattgaatctgcaattgctttgggcagtatggccatttaaaaaatattgattcttcctatccatgagcatggatttttttttatttgtttgtgtcatctttgattttttgtgcagtgttttgtatttctcattgtagagattttttttcctccctggttagctgtattcctaggtatttctttttatgggtaaagtgaatcagattacattctcgatttagctctcagcttagatgttgttggtgtataggaatgcaattgatttttttacattgattttgtatcctgaaacttcatggaagcggtttatgccatctcagagcttttgcacagagactgtgggtttttctaggtatagaatcatattgtctgaaaacagggatagtttgatttcctctcttcttattggatgccttttttttttcttgcctgattgttctggccaggactttcagcactgtatcaaataggagtggtgacagaaagtatctttgtcttgttccgatttttaaggagaatgcttctaggttttgttcattcagcataatgttggctgtggggtcgtcatagatggcccttattatttgaggtatagtccttcagtacctagtttattgagaatttttaacacgaaaggatgttgaattttatcaaaaaccttttctgcacctattgagataattatatggtttttgtttttagttctttttatgacattaatcatatttactgatttgcataggctgaaccaacattgcatcccagggaataaagcctacttgattgtgatgaattagctttttgatgtgctgctggacatggattgctagtattttcttgaagatttttgcatttatgtcatcaagttttctcttttctgtttaatttctattgcctgaagttttctgttttccatcatatctctgccagatttggtgacagtatgattctggcctcacagaatgagttagagaggagtctctccacctcaaatttttggaatactttcagtaggtatggttccagctcttctttatacatctgatagtatttggctctaaatctgcctagtccagggctttcccgattggcagacttattactgattcaatttcagaacttgttattggtacgctcagcgtttcatttatcctggttcaatcatgggaggtggtatatttccagaagtttactgatttcttctaggttttctagtttgtgtgcatagaggtgttcatagtacaccccgaggggtttttgtatttctttgtggtcagtggtaacatgtgctttgtcatttctgattgtgtttatttggtttttctctcttttttctttattagtctagctaatggtctttctcattaattctttcaaagaacaaattcctggattaattggtcttttgtatttttttttcacatcttaatttccttcagctctgattttgtttttttttatttttttattttattatactttaagttttagggtacatgtgcacaatgtgcagctttgttacatatgtatacatgtgccatgttggtgtgctgcacccattaactcgtcatttagcattacgtatatctcctaatgctatccctcccccatcccccaaccccacaacagtccctggagggtgatgttgcccttcctgcgtccatgtgttctcattgttcaactcccacccatgagtgagaacatgtggtgtttggtttttttgtccttgcgatagtttgctgagagtgatggtttccagcttcatccatgtccctacaaaggacatgaactcatcattttttatggctgcatagtattccatggtgtatatgtgccacattttcttaatccagtctatcattgttggacatttgggttggttccaagtctttgctattgtgaatagtgccgcaatgaacatatgtgtgcatgtgtctttatagcagcatgatttatagtcctttgggtatatacccagtactgggatggctgggtcaaatgatatttctagttctagatccctgaggaatcgccacactgacttccacaatggttgaactagtttacagtcccaccaacagtgtaagtgttcctatttctccacatcctttccagcacctgttgtttcctgactttttaatgatcaccattctaactggtgtgagatggtatctcattgtggttttgatttgcatttctctgatggccagtgatgatgagcattttttcatgtgttttttggctgcataaatgtcttcttttgggaagtgtctgttcatatcctttgcccactttttgatggggttgtttgtttttttcttgtaaatttgtttgagttcattgtagattctggatgttagccctttgtcagatgagtaggttgtgaaaattttctcccattttgtaggttgcctgttcactctgatggtagtttcttttgctgtgcagaagctctttagcttaattagatcccatttgtccattttggcttttgttgccattgcttttgtgttttagacgtgaagtccttgcccatgcctgtgtcctgaatggtaatgcctaggttttcttctagggtttttatggttttagatctaaaatgtaagtctttaatccatcttgaattaatttttgtataaggtgtaaggaagggatccagtttcagctttctacatatggctagccagttttcccagcaccatttattaaatagggaatcctttccccattgcttgtttttgtcaggtttgtcaaagatcagatggttgtagatatgcggtgttatttctgagggctttgttctgttccattgatctatatctctgttttggtaccagtaccatgctgttttggttactgtagccttgtagtatagtttgaagtcagtagcgtgatgcctccggctttgttgttttggcttaggattgacttggcgatgcgagctcttttttggttccgtatgaactttaaagtagtttttttccaattctgtgaagaaagtcattggtagcttgatggggatggcattgaatctataaattatcttgggcagtatggccattttcacgatattgattcttcctacccatgagcatggaatgttcttccatttctttgtatcctcttttatttcattgagcagtggtttgtagttctccttgaagaggtccttcacatcccttttaagttggattcctaggtattttattctctttgaagcaattgtgaatgggagttcactcatgatttggctctctgtttgtctgttattggtgtataagaatgcttgtgatttttgtacattgattttgtatcctgagactttgctgaagttgcttatcagcttaaggaaattaaaaacacatgaaaaaatgctcatcatcactggccatcagagaaatgcaaatcaaaaccacaatgagataccatctcacaccagttagaatggcaatcattaaaaagtcaggagacaacaggtgctggagaggatgtggagaaataggaacacttttacactgttggtgggactgtaaactagttcaaccattgtggaagtcagtgtggcgattcctcagggatctagaactagaaataccatttgacccagccatcccattactgggtatatacccaaaggattataaatcatgctgctataaagacacatgcacacatatgtttattgtggcactactcacaatagcaaagacttggaaccaacccaaatgtccaacaatgatagactggattaagaaaatgtggcacatatacaccatggaatactatgcagctataaaaaatgatgagttcatgtcctttgtagggacatggatgaaattggaaatcgtcattctcagtaaactatcgcaagaacaaaaaaccaaacaccgcatattctcactcataggtgggaattgaacaatgagaacacatggacacaggaagggcaacatcacgctccagggactgttgtggggttgggggatgggggagggatagcattaggagatatacgtaatgctaaatgacgagttaatgggtgcagcacaccaacatggcacatgtatacatatgtaacaaagctgcacattgtgcacatatatgctaaaacttaaagtataataataataaagttaaaaaaaaagaaaagattacatcttttcacaaagaatacagagataaaaccaaagagtcaaatgactaaatgtagttgaacaactgaaccagaacacatttttttctgagtgctagtccgggattctgtgtcacacactgctgtcctcttaagccttcaacaacacacagatcctctttgaggtgcaaaattcatgacctgcagaagtttacaaaatgtaataggttcccttgtttgggacacagtgagaattataaattcacaagtcattgatattaaagagaaattgcagagtgacttttaaaataatgaagatggtaaattgtataatatatgtgtattttaccacattttttaaagtcaaaaaaatgcttttgataaaggattgaagattagtattctgaaatgctgaattttcagtagtcactagtagagtacagtttatacttatttgatttgacttgttatccttggttaattgttgctagtgttggtggttgatagtgataagattttcacatgaattttacactgcgccacttgtcctgagtgtggaaatatcaacattggtctggattgtgtttaaattttgaaattgttgaaagctcattattcaatttaaagtatgtaaacagctgttgccatgagataacagattatgcttttggttaaaattctgggaatcacccaccagtttttgtttactttttaataaccagaggcttatatttaaaatagacaaaaaattagcaagtgcattttaaatttagtaaatttagaagtaaccaacgacaagtacaattatgaactcatactgtctccactactagacatgttttatgactgtctgaaagtatctaaaacagattttatgagttttcatataaaattatatttctgttttagcaatcagtcatggtaatcaaacaatttgaggacaagagtctttatatttgagtagcagaaaaacacaagggaaatctttgatccctgatagatcattaaacaaaatagaatttaattttacttaacatcatgtgtacacacacacacacacacacacacacacactttttctattgtttttttttcaccatggataccgtggataaattctcagtagtgagactgttgagttgaagtgtagatatgtttttaatatttctagtatcattagattggcttccaaaacaaccttattattttacattttcaaacaaaccaccatggcacgtgtatacctatgtaacaaaactgcacgctctgcacatataaaccagaacttgaagtgtatatatatatatatatatatacacacacacaaacacacacatacacatatatgtgtatatatatacatatatatgtgtatatatacacattatatataatgtgtatatatacacatatatatatgtgtatacgtatacacatatatatgtgtatatatacacataccataaagctgaaaccactaaaaaattatagcattgaagacaaagctataatataaacacaatgatgtccaaaagaattaattctcatccaaaagaatttaaaaagggataagccaaaacaatccaggtaatgaaattaaataaagatagctaacactgatgattaattatatattgttagttaaaacgtgagcaaaagtcattctttatatagacatatgtatatataaagaatgacttttgtatatgtatatgtatatatgtatatgtatatatgtatatgtatatgtatatgtatatatgtatatatgtatacatatatatgtatatgtatatgtatatgtatatgtatatgtatacgtatacgtatatatgtatatatgtatatatacatatatatgtatatataaagaatgtatatataaagaatgtatatataagaatgtatatataaagaatgacttttgtatatgtatatgtatatataaagaatgacttttgctcacgttttaactaacaatatataattaatcatcagtgttagctatctttatttaatttcattacctggattattttggcttattcctttttaaattcttttggatgagaattaattcttttggacatcattgtgtttatattatagctttgttttcaatgctataattttttagtgagtactgctctggctcatatgtttggtataagttgttttcccttttgtgattttctaggtaatttctaacctcagtttcgcatacttctttgacacaaacttgacctatgaatgtatttttacattttcaagtaagcaactctttgatcacctttttgtaatgatttctatttttatgagattataatcaatgaatgggatatatcacttaggtattactaagtaataaaccaccctactttagtgccctgtaacagctcccctttattatttttgtaattctgtgagtttttcaggtggctcttgtgccagctccacctgagttcatgtgtgtggccgcatgcctctgacagccaggctggctgggggttcaagatagcctcacccacacatttggcagtaagtgctggcaggtggttcaggcactttagtggttttcaatgtatcttctcatcctccagtaagctagactgactttcttgcatgcgggtctcagggaggcagtcctgtgtgttctactggtcaaagcaagcaattcacaaggtcagttcagatttaggggataaggagacagaccaaccttattatcagtcacattgcaaacaggcatgccaccagagagtagttcttccagtctttgcaaactatccgtcatggtagcctgtaaaagactactttttaaagttgtccattttgattaaaattttaagtatcacttgtgcatttggggaaaaagttatctttttgatagacataatttattatctccctctcattttttaatatctttgcactaagtgttataatgttaaataatatagcatcaataaccataaagctgaaaccacaagaaaaacacctggaaatacacaggaaaaaacattagatatgggaaattttactcatctctattattctatgacatcatataaacaaaaatgcagatattgtagactaaaataataaaattattaaggatatcccttcttttcaagtagctatgttacattcacacaaatgacaatactattaatccctaaagaaactctgattaagctttataagtagaaattgtgagagaaaattatctgaatgcaatacgataaaatagaagttagtgagaaaaatgaagaaaatttctggaaattaaaacaaattaacaaatatctcttaaataacttttaagtcaaattggaaagccaaacaaaatttttagattaatttatattattaatcgtttctagaaaataataagcacaatatataaaaaacacaataataataaaacacaatacatacctgatatcattgaattttactaagcaatgctcttgggaaatttaatagcctatcaacaaataagaaaagaaatgaatgtttgaacactcaactgaagaagtcagactaaagaaaacaacaaaacaaacaagtagaatgagacaattcataatgataataaacagaactatctgctgattacttatttgacactaacaaaacagacaagtttttgctattctttcaagaataaaaggagaaattgtatgcagacaatttttaaaaaaaatgcttaaccacagatacaaaagaaatggaaaatcagatgagaaactgttttgtataaatttatcaagtaaaaattgaaatcatttaaaatgatcttatacaatagaatttaactccatgacacaggagttttcttttttctttctgactttttttctctctgttttaatttttgtatgcctagtacctagaacaatactgaaagagtggatggtgaatatccttcctttgcaattggtttagctactttgttatttcattttttttttgtattcaagagaaatgcatgtatactccaatttccccttaattttacacacaaatttattcataatatcctcttacctgtttaggatctgtaatagctctaaaatgtcccgcttttaaaatttctgttattgaaatttcatactttctcctttgtactgtgtcttactacaaattattaattttatttgttatgtcaaataaccaatttttaattctctttattgtaaagttattatttatttcattaatctcttttatattttttactccaatctttaagcttaatttgttttcaccttttaacttgttagggctttgtgacctgtatgctcagattatttctttccattcttctttttaaaacatgccatcaaagatatgatttttctcataaaaatagctttaaatgcattttacaagattttatatactttattttcatcatatcccaacaactctttctatattcagtaataccatcagaccttacctgggtcgatttttctcagcatcctttccttccttcctcccgtcctcccttcctttctttcttttctttctcggagtctccctctgtagcccaggctggagtgcagcggcgcgatctctgttcactgcaagctccgcctcccgcgttcacaccattctcctgcctcagcctcctgagtagctgggactacaggcgcccgccaccacgcccggctaattttttgtatttttttaaatagagacggggtttcaccatgttagccaggatggtctcgatctcctgacctcgtgatccgcccaactcggcctcccaaagtgctgggattacaggcgtgagccaccgcgcccgacctacttgcttatttttcttttccaaaaagctacccatacagattttctcagcattttaacctaggacttgataagctaattcaaactgtagtttcagctctttcatagattaagaagcattattcttttctcctgtaagtttttatgtcattgcctctatttagtctatatcctctccctccttttatgttcccatttttcttgcatgtgagttgcaaaacactcttgagttttgagattttacttctatttgagcctgcaggccagtaactcagtgctcaaaagtgaccatccttttcttcaatgcatgtattaaattatttaattgaaaactatagagatattttttagttcctaaaaagtttcttcagttgaatcttaagtcctctattagtttttaaaattcaagttgtctccatccctttgtgttgtgtgtatgctgggatgttctgtgctctccttctttgatggtttatctctccctctctctctcttttttttaattttcattggaagacgtttatttagtcagcatttaacagagaatagcagaatccatgaaggacaagtgttccaggcactagagatacaataggctagaaaccacacatttctgcactcatggagctgaacactcttagtttatcatttctttctgtacatatcttccctacttccaccctaccctctgccataatctttttaaaatatatatataaatggcttcattttcacatttcacacaaccacagctgtgcatgcaaaaacactgcagtctagccactatttatacgtccagccacttcttgcatctctcccgatatcccaatttcaagctttctctcttcaacacctcctgtgtttgatttgatggctcagctggggcagtctagcctcaggaggtgggaaatcaagtcctgtctaaccctatgagccaggattggactaacagggaaacttctagtctactctgaggcatttgggggaggcttttgtttcttgtgatcccctgatagtctctcagctttaggggcagggaggactaaccccaagcacttactccctttgtgggtactcagaggcccgggaaacttggcatattcctgtgaggctgatgttagccactgcctggggcccacagatttctgctcaaccattctatctaagacccattgagacttgggtctcacatatagtactgcaaatactctcgagaaataaacctcaaacattatttttctctatctagggccaattagagcaaaaagcccctcgctaacacccaattacctctaagttctactgcaatttggctcagagaagaaagataatttacagttgttagtaaaggagaagaaagatgcattcatgttgcagttttctcagaatacactatatctctcttactttttcttagtttgaaattattcccttcttacacggagatgcacaaattctaattttgcatttttttttctgaaagagttgactacgtttttttggttccacatagaaaagacagattcattaaacacatcttcacataataataatttttcttaagattcctaacatattaaagagcttaaattattaaaaaatagctatattaaaactggatgtaagactctttttttttttttttttgagatggagtcttgctctgtcgcccaggctgcagtgcagtggcacaatctcggctcactgcaagctccacctcccgggttcacgccattctcctgcctcagcctcccaagtagctgggactacaggcgcccgccaccgcgcctggctaattttttgtatttttagtagagacggggttcaccgtggtctcgatctcctgacctcgtgatccacccgcctcggtctcccaaagtgctgggattacaggcatgagccaccgcgcccggtcaagactcttcttaacaaatgaattagtttttctagcttgtgggtgttgaccttttctctttacaccgtagtttcaaaaagtggacatttggaaaatttctgaaagaacatttaaaactctcttatacaaagttctttggttgtaagaatacaattcttacaactagcagaattagtatgtctttggatcctaatcaactgctaatctaactagcagatttaggatgtctttggatgaattaacacctaatcttgtctcacattggcgtaaacagttaggaaatagtatgatccaaataacaagcatgaagagttgagtaatccagcaggacaattatgtccttacagagccaggttccctccagaatcctgttcttgccgtcactgtttcagtctgggcctgacggcagttgcaggatggcagttctcggtgatcacagacaggcttgtaatgtctagtggaagaagagcatctctttcttgtcaatctctttaagaatgaggaactctttcttagcagtgcccccaggagaccacctcacaaccaactgtaaaaagcctctctcatttgtccctccttagcaatcagtggtgatgtagatggagtcatcgtgagtagatttcatgattaggacttccctaaagtgtgagattatgtcggcatcccacagagatagatatctaaacaaagtcagcgtctagatttggggcaagaaagattctgttaagatggcgaagcagaattgggcatacagatgcttctggcttcagagcctacactcctaaacccatcctcttctcaacattcaataagcgaaatttcaaataaatcattaaaatatttgcagtccatttaattttaatttatttgttttattgatacaaaacagatgcacatattttcagagtatatgtgataatttgatacatcatataatatgaaaagaacaattcagagtaactgggaagttaatcaccttcaatatttatccttttgttttgtgggaacattaaaatgattctcttctagctattttgaaatgtagaacagattaatgctaactctagttgccctactaatctatcaagcattaggttttattttttctaacataaatcaacctctcttcatccctccacccttcttcctactcttcctggcctctggtaaccacctatctactctctatattcataagacctacctttttagctcccacatatgaatgagaacatgtgatatttgtctttttatgcttggcttatttcatttagcattagtgacctctagctggtgagaatgtggagaaagggaacgctggtgcactgttagtgagaatgtcaatgagtacagccactatggaaaacagtatggaggttcctcaaaaaactgaaaacagaactaccatacttaagcaattctatcactaggtctatatccaaaagaaagcaatcaatgtatccaagaaatggatccaagaaatggattcattcatccaatcaatgaatcatgttgattcagcactattcacaatagccaaaatatggactcaacctaagtgcccatcaatagatgaatgaattttaaaaatgtggtataatacagtggcctactattcagccataaaaagtaaaatcctgtcatttgtagccacctggatgagcctggacgacattatattaagtgaaataagctaggcacagagagacaaatactgtgtaatctcacttatatatgcaatcttacaaagttgattttattgaagtagagagtaggagagtggttaccggaggtattggggtggaggtttgtcacctggtacaaagtcagggttagataggaagaacgatttccagtgttccattgtacagtagggcggctatagttaacaataatatattatatatttcaatagagctagaagacaggattttcaaagttctcaccagatagaaatgataaatgtctaaggtgatggatatgctaattttcctaatttgatcattacacattgtatacatatatcaaaacatgacactgtatctcataaatatatatgtgtcaattaaaaattttttaaattaaaaattatatacagtgattaacatttagcctttcaaatcaaatttaactatataataacttaacacacatactctctctctctccattatatataatatatatataaaatatataatatataaatattttatatatatataatatttctactggaaaacagcatattttcctgaaatgcaatacttaacctatatcataaatcttccatattctgagtgctttaggataccaattttatctagatgtaattttaggtacatttacagatcgagtacattcacagatctagaagagctgttgtcgccatgcttgactggtctaaatccttttcctcaaaggattttgaggaaaacacgcttttcctcaaagaaaaagggcaaaggagagattcctcaaacctgtaattctttatagcactatttagccagaaatttataattcatttttaaaaatatttttgaggttgtcaatgtaagaacatagtcagagagtgaatgtttattttctgctgtttctgactcccggacaaactcacaagttatattcttttgaatcctatctgcctatttctgagtggatagaacagtttcgtcagtcacaaagtcctagtatctcagtttgtttattgaatgacagaagaatgctttacacttacattgagaaaaagatgtgtgtaaaaagcagctaaatactgtcaataaacactgaatgtataataagatcgctgcacaatctgtggctcagatacagtggccttttgtccctgaataaacttgtgatgtggtgtattattcaatgaacgtgaacatgcttcttgtttaacagaatttctgttaaattattgccaaaccatttcctcttccggaaacagattcttgatttatggagtaatgacttccttttgttcatctaataagagattcaagagtcatgaatgtcacttcgttttctacctgtctttagagaaaatgcagctgtcagatccctgtggaggatgtgcacattgccatccctgcttgctgtccctctagccagagggacatgatggctgccctttgtggaagaagaacttgcccattttatgcatggcacggctcactgccgcaacaaacatcggcactggtttaaaaatggctgcgtgcaggctggccagtgactctcttttgagatgttcaggcatgaaagtctctgcccaacacagtgacgaaggcagagggaattccctaaagcagtcaaatcattccctgtcttcagaattttctctgagggatatagaggggaacgactcaccagaagagggagaatgtccatggatggagagaagcagtggctacaggaaaccctgagtgaaacgcagagagaaattgctttctagcactgcgttgcatcctttcatttctgcatgtatttaaatcataagaatacacaaacacatcatctaaaggatctcaatgactttcagtaagaaggccttcatacaattcccatacgaattccattttttatggcaaggttactccgtatgactcaccctaattgttctggaacaagaactgacagaaaagaattggactgtcattcctgatgcaaaagggtttacaaacatccttctaaaagaagacttccacctgagaaggttgatggaggacctcttgtctacgtacctgttagactggggcacggtcaccttattgtgggagttataggtaagaaaaattagagagcagcttattttgggggccaggataataacaagttatttttaaaaggtcttggaaacttgcagatgcaaagggaaaaaaacaaaaaacaaaaaacaatcctaatggtaaaaacaagtaagtctgactgcgtcattttgtagtaagacaatgaggaaatgggaactcgtcagagggtaactgggtggtgcctgtaaaagtgaagatgtgcttctccctcagcaggcatttgctgggaaacccttgcagacgttacaagcacagttgtagaaaatatctattagagcactgtttgtaactgaaaaatgtttcattcatactttgaatgtaaagaataaaagtgaatgaaaaaatggaagcattgcaccgtgcttttgatttacatttccctgatcatttagtacaaccaccatggaaaacagtgtggagattccttaaagaactaaaagtagaactaccatttgatccagcaatcccactactgggtatctacccagaggaaaagaagttgttatacgaaaaacatacttgcacacacatgtttatggcagcacaattcacaactgcaaaaatatagaaccagcccaaatgcccgtcaatcaatgagtggataaagaaactatgatacatatatatgatggaatactactcacccataaaaaggaatgaattaatgatgttcgcatcagcctggatgggattggagacaattattctaagtgaagtaactcaggaatggaaaaccaaacattgtatgttctaactcacagtgggagctaaattacaaagatgcaaagacataggaatgatctaatggactttagggactcaggggaaagggtgggaggggggtgaggaataaaagactaaaaaatgggttcaatgtgtacactgctcgggtgatgggtgcaccaaaatctcacaaatcaccactaaataacttaaccatgtaatcaaataccacctattccccaaaaacctgtggaaataatttttttttaaatggaagcatccaaaatgtaatttgtttccacattcttgtaagcctcattatgtatcccagggacagttaatatcgtcatacgaattcacaggtgaggaaatggaatcacagagagattatgtactttgcataaggagagcgagggtgaggcaggatttgcagtctagaagcctgggtctggagttctccactttgcactatatcatttctgtaaacttcttacttaagactgtgtggaaatgtagagtgagacagaactaaagctcactattcttagtccacaggggagtagtgactacccagggcttggtaagtgctcagtaacgtttgttgaaagatgaatcaatatttcaatgctggggcaaagcagtgaaaaactggggaatgtccaggaaccagccatcaggataaggcaggactagaatgaatgcaacagtcctcacaggtccaccaagtcaacaacagaaaaatccaaagctaaggtggctcttgtgtgatcaaggacctcttgtacaccgacctgttaggctgtggcacagtcaacatgggagttgtagacaagctacttgagagtggttaatggtagcagtcaggcatttggagctggaggcaaggctgattctcctcaactagtatcatattgagcggggacttaaagcctcagaagtctgagcagaaaagctgagaccaggctccttgggacaggctgttcatatgcatgattgagtttcagtgatgagtcccagaaggaaaaagtttatgcatgttttccttaaaaatatattcacttatatttagagaatccttcagatatctaacctaaatacgtctgtaacatttactctcattctttttatgacattattagtataataatatgaataattcccagtggacttacttccacacttccttcaaggattctccattttatttcataattgaagactgttaataaatcactctctagctaagaacaattcaatgctaaaacacttagcttatctgaccttcacattaattatttttatgacagcagcaggaactttcagctgcttttcccccttccttatgaagccatgtggtcccaagcagacagagttcccttgctacacttaagggtgggcttctcagacctgagcatatcttaaaagctttcccttgactgtgccaatccaaactccaagtttcctcagcagatttaaggggttttaaatctacttgagcatgagtgttatgagaagactttgaaattcttacaaaaactgaaagtgaaatgaggaagacagattgagcaatccaatcggagggtaaatgccagcaaacctactgtacagtaggggtagagatgcagaaaggcagaaaggagaaaattcaggataactctcctgaggggtgagccaagccctgccatgtagtgcacgcaggacatcaacaaacacagataacaggaaatgatccattccctgtggtcacttattctaaaggccccaaccttcaaagttcaagtagtgatatggatgactccacagaaagggagcagtcacgccttacttcttgccttaagaaaagagaagaaatgaaactgaaggagtgtgtttccatcctcccacggaaggaaagcccctctgtccgatcctccaaagacggaaagctgctggctgcaaccttgctgctggcactgctgtcttgctgcctcacggtggtgtctttctaccaggtggccgccctgcaaggggacctggccagcctccgggcagagctgcagggccaccacgcggagaagctgccagcaggagcaggagcccccaaggccggcctggaggaagctccagctgtcaccgcgggactgaaagtgagtttgcagcagctgcaagacgcaggcaagatcctgcctacactgctgcctctccctcgcctcagctgtctttctaataacttgaagtttttctgttcatagatctttgaaccaccagctccaggagaaggcaactccagtcagaacagcagaaataagcgtgccgttcagggtccagaagaaacaggtatgttttgggcacagacacttttaggagtcagggattagagaataacatccagtctgggggagctggaggtgagtatcccctctatgaacctattaaatagagactatgaaatttgccatccaaagcagacattgctttagagcaaagccccagcgctggcaaatgtaacaggctgcatgggtgtgctttttcctccaatgagcagatcgtgtgactggaagcatttctctgtgcgtgtgtaagtatttatctgtgcattaagcatagaggagataaaagggccatatgtgtttcctcaggtagataatgccctcccatgtgagaagcattattcatcactccagaaaaataaaaaaaagcattacatgttagaattagactttgcttactacctgggtcatagaaagttaaagacatctgttttctgaatgtacattacatgttgtgaaaccaggtgaaggttgtaatgaaaggccctgtatgttgtactttaattttgtttatttgttaaaaaggttattttacacacacacacacacacacgcacagacacacacacagattttaaagcttctctttaaggtacgcttttccaggggatccatgcatttatcgtcttcttataatcgtcctttactgatttctgactttcttcatgttctgctcattccacggaactttacagagttggtggggcctaccaaaatgatcgattctagttctttcatttgaaggtgaaaaaaagaatctttgtatacatttattaaagttataatataacaaattcttaatattattgtccttttattaaatatattgaaagaatattttttgagcacctggaacgtatcgtacagctatagaccagaataggcattttcaaacatactatttcgtttaaccttcacagtgacgctatgaagtccacagaatacatgcaataatttatgtatattttcacttctgaagagaattgcataagaaatgtagtgagagatagaccagggacccttctatcacacacacacacacacacacacacacacacacacacacacacacgcatgaggtaccctgactataaacttattttttgactatatgctttattcataaaaaattgtttcttattttataaaaccataatttttggtatctggttattgtatctttatactagttatcaggaataactgggcttaaacatttttaaattaggaaacatgcacatttttattattttaacacatcaattatttttatcgtctgcattttatagtctatatttcctacataattgaaaataatacggaatatatactataatattttttgttttgacttatacaataaggatttttcctatttctaagtatttttcatatatctgtattaatttatctaacaattgttttaaatggttatttccattctctttgctataatacaacatgcaaaagttttgcacagaactcttttatttctgtgaaattatatattcaatataaaattcatatagtggaatatctgagctagggagaagaaacatcttcatcacccttgcttccgactgccatattgttttcaaaatgagttatacatgcaatcaaaaatgtggtgtaccggttctccacattcttgcttgcatgttatttttaaagtgtattttgactagtttagtagttgtaaaacaatatctcacatttattttgatgtgttgcttgtttactaatatgaataaactttctgcatattttgattatttataattttatcttttgctaatttttatttataactgtctccacttgtctgtcccatgtttttataattttggataagctcttcctaattagacatattgataattgatcaaaattttgatgtaaatattttaacagttttgcttctttttttacttgaacattttgcatttctctatagtaaagtgataatctttaaaaaattttccctaatattaaagctaaaaatacatttgttcatgttttcttaagtagttgactccctgccactttgactttttcatagttgagtgttttgttttaactcattagtccttctgttgtttattttgatgaatcatctcacattggctttaacttccccctctctcttttttcctttctaactggtatctcaaccaaatgtattaaatagttctttttaactccttggtgttgaaaagcttactgtgttttattaagttcctcataagagttgaatctatttgagactcttttttttaattgattattctatttatatgctttaaagaatatttttaaggtaatttgtattataagaggcttcaataactagtagggtcaggatccttcaatctccttaaccttcactgctaatatccccgtttctaaatattagttttaaaaataaactttaactttacaattaaaaaaaaagatgtagactcatttcagcagatttaagaagaaaagaataatagagtaggaaagaaataacttcttgggtcacattttcccaaaattctcctattaatacttttatgtatttgtgttttaatggcatccaggaatagtatactgatgagaatctttcaccaaataatttgcaatttgtagattctaacaaagtgaaaaaaaatttgcccagatttccacagcccagaagtagctactattattatttcatggtttgccctagactttttaataaaccttaatacagtgtgcatataggtatatattgcacacagttgagccttgaacaacacaagttttaacagcatggatacacttacaggtggattttttttttcaataaacctattggaaaattatctgtagatttgtgataatttgaaaaaactcatggaagaactgtgtatctttgaaatgttgaaaatattaagattaattagccatgtcatgaatgtataaaatatatgtagatactggtctattttcttattactatcataaaatatacacaaaagttaaaaattctcaaaacatatgcatacaaacagactgtacatagcgccctttgtagtctagagaaatggaaacaaacataaacatgcagtattaagtcatcactgcataaaattaactgtggtacatactgtactactgtaataatttcatagccacctcctgttgctactgcagtgagctcaagtgctgtgagtatctgcttaaaacaccatgtgatgctaatcatctctgcatgagccagttgtatctccaatcagttggatattgcagtaaaaatgatttctcatgatttgtgtgtatttttcttcttgtgtaatgcaatatcataaaccttgaataacaccatgagacctatagaaaatgcgatagtgatgctggaaatgctcccaggaagcaaagaagagtcatgacattatagttgacccttgaacaacacaggtttgaaccgcgagggtccccttgtatgtggattttcttccactttccacccttgagatagcaagaccaacgcctcctttccctcctcccccttagcttactcaatgtgaagaatgaagaactctataatgatccacttccacttaatgaatagtaaatgcattttctcttccttatgattttttaaaataacattttcttttctctagcttattttattgtaagaatacactacataatacatataatttatgaaatgcgtattgattgagtttttgttatcagaaaggcttctggtcaacagtgggctgttagtaattaagatttgggagtcaaaagttaagcacaaagttttgactgcatggggtcagtgaccctaattcctgtgttgttcaaggatcaactgtatttgttcatatacatatgaacaatacatatgaacaatacatatatgaacaaatacatatatttatacaaatatatgtacaaatatatacacatacaaatatatatatatatacatatatatacatacatagtgtgcatatgtgttatgtgtatatattcaaataggacatagtatacacactcataactttcacaaatccaaggtggaagatttgaagataagaatcttaatgacatcatgtctactattccttgttaataaaattaggaaattcatttgaatgttgttctagatactattctttggtggagggaaagtttattttatttagcatactccaaaattaatgtttatattcccaaaaaagttgtctgtaacacaaggacgttttttagtaggaattttttggcattgagaaaattctatgcagctttctttgatttttgttttcattcaagttctgatttattttcagtaagactcaaaaccttaagttgtcctttttacttttaaagtgtttatttatgttcatatttattaattgtctacatgttttagaaccaagtatttttattggaacttcacacaaactgtagaagaagggaggggaattaccatcagccaacatgtcccaatgatactctcttccaggcatcccatgggtaaacagtggttttacttaatgttttaattttagaatttagtactttggctttagttttgtttttcttaattactttgtgtttcaaaccaaaatctcattaagcttaatgtatttcataatatcatttttgattgtagtataataaacagaaatgtggggaaatccaggattaaaaaattgccaaatagctcatattagccaaaaattcacttttaagcccgtaactgtgtttggagatattcccaatttaaaaattaactaaaacaatatggctttgaaaatattacgtaataaaatttatttacaaatggaatcatgaagatccacattttgaacatcacttaactataattttattaattttaagaacctaaagatgaatgtctttagagtctatcaagaaagtgaattctttcaaatgggtatcactgacctaaaaaggttcattgttaaaattaggtaaccattgtattttctttcctgttaattaataactattagaaatttatgtgttttaggatacagaaagacaaaattatttttattgataatgtttattataattgtctcaattttaataataaaataatagtaaaaatatggacaattcaaagtaatgtaaagcaagaatagaaaaaattgtccgtatttcaccttccaaataattatcatgagatttttggtcaatctactttaaggtatatttttcttcatttttaagtgagcttgggattgtttaagaattacacacagcttgcaaagaatacagtgtgttggcatgtacccctatccagcttccctaatactaacatcttatatgaacatggtatttcattacaaaaaggaaaccaacattaagacttaactattagctaaattctagacttaatttgaatttcacgagtttttctactaatgattttatgttttaggatccatcaggatatcacattgtatttaacattttttaaattaaaattttgaatgtagcatatataaacaccaaatattataccttaagttttctatcggataaacctttctaattgctaaaagtgaagatatcaatactatttttgagtcttcttttttgaaatccaaagtccaactcctttgcaaggaaagatgagatgtttgacaagtctgtaatgtccagtctttgcccggttggcatttctggcttagctgtgagttccaggctgtaacatgagtgttggaagcgtgcaatgtagaacttgaccatccagcccttatcaaaattaggctgacttgagcctcttacccagcaagggtgtgttccttcgtggaacagaaccagctggctgctgcttaggcgatctttgaccagagctttccctgagagttattttttctttccccctgcttcaatagtgagacttttcttcagtgttgcaagaactggcttctgttcaacttctggaaaagcatttaaaattgaaaacgttgaccttccaaccaaatctttgacctgttcttgttaagcttgagattttgggaaacggaagagctaggaaacaaatcagtcaacacagccaaatgtgatattgtgtctcttttacacaatcttacattatcgtgagttgaagagaaacagaaaaatgatagtacatatagttaattagcaaattaaaatacaaaaaaatggtaaatatgttgaaaaagtgaaaaggttagggcaggtgaatgagtatcaggaatgtgaagggtgaggaagggaaagaaatgcgttttcattttgaatggagaggccaggttcattaagcctttttatcttttcttgaaagctcaataattctttatacttttgactattttttttaacattgcagacatgggtaggtgatttttaaaataaattcaaaatgtttatacctgtgttgtttttattagtaattccatatgaatggaaaatgttagttttaatgcttattctttttatagatcaactcctacttaaaagaactgcattgagcagctgcatttttgttgtggtgatattttttttttaaaagacattcccatttctgaagagttagagaaacagaaggtttctcttcaaatagatttatcacccactgtttctgcaaatatctgaggtaggcactccataatatacagagaagaggacagcgaagctaacaattatcaggcgtgtttcatgtgcaaacactgtgttgggctctgggaatgtatatcatttactttctcaacaactctgttagttgggcattattgttttcattttagatgagaaagctgcaacccagagaatcaattgcctctctcagcaagctaattatttaatagttggagaagttaagccaaattgatgcaaaatttaaaagaacaataaaatagacaagttatttacaattcataaaacacatctaaatgatgacttcaatctattttcgcagcagtatgaaatggatattgctattcccattgttacaggacccaacactcacccaaagttaacctttgggtcgggggtttctgtactatattcccttctgtggtcgccagagaaatgttacaggaaaggagtcccgatccagacccccggagagggttcttggatctgacgccagaaaaaattcggggcgaatccacagggtaaagtgaaagcaagtttattaggaaagtaaaggagtaaaagaatgccgaaaccatagacagagcagccctcagggctgctagttgcccatttttatggctatttcttgatgatatgctaaacaaggggtggattattcatgcctcccctttttagaccatatagtgtaacttcctgacattgccatggcatcatgacgctggcgggagtgtagcagtgagaaccaccagaggtcactcctcgccatcttggttttggtgggttttggctggcttctttactgcagtctgttttgtcagcaacgcctttgtgacctgtattttgtgctgatctcctatcccatcctgtgacttagaatgccttaaccatctgggaatacagcccagtaggtctcagttattttacccagctcctatccaagatggaggttctctggttcacctgcctctgacatcattatacagatttaaaatgcttcaaaattaagtgtcaaactcatggtttgacaactaattgataggagaggtaaggtttgaattcattatctattgattataaattctgatttttttcaatgataatggctgtacatgcttaattttcaagtgtgccaccagatttgagaaaaaatattgggtctgacaaggcccagggtattacgattaatgccagtgagagagacatcaagttaaggaatcagagaatgttgttagtggtagagatcacagactgcgagattatctagacagtggtcaagagagctgaagtgggtttgaagatggagcagacttgggtaagaggacagaataactgaggttatgaggacaaggtagaaataggaaacagaaataattcaagaaaaggccttgttttagtaggcatagaggcttatcccatacaaacatctttatattatccctttcctcttctaaatttgtaaatttttgcaagtgctgatctgttgaagtgtttttgcaaatgcaagctttcttcctaccccctcctctcctcctcctccccttctcttcctcctcctccccttctcttcctcctcctccctttcctcctcctccacttctctttctcctcctcctctcctcctctcctcctttcctcctcctcttcctcctcctccccttctcttcctcctcctcctccttctgatcaggttatttgagacagggaagggtaagagaaaagggaataactgcgctgtgacagctcctgacagcagctatgaagtctcactttcaggcctttttctcttctatctgccccactggagcctctggaaattacaaaataagacattttaggaaaatggtgcacaactacttactttaaaaatattatagagtgctacacttctgtggatagagattcaaaaatgtattattaaggttttctcttgaggaaaatgtttcctatataactgagggttcaaagcctattatgagagagtccacaattcatggaaattgttttgttttatggaaccccttttccctcaagcaatgacttgatttaacacatttcataaagctggatttagtgactggtttttaagaattgtttggaaaagttgagtgctattttttatgtaaattgtttcatatattattccacggatttttttttaagtctgctgtaaatcagacactgaaaatttgtgaatggttgtccttaatatcaagtgattcacaatctagggagagaaacagttacagaaacaattgcgtgtatagtaacatgtatttcaatagatgatatgcaaagtatagtgggatcaaatattttgctagaagtattgtagaaaaagtttgtatttgatttcagtactgaaggatgaatggagttccactggatagaaggtaaagtatatttagtaggagggaacagcagacatacagtcatggaagcatggaagatgacctctcattctgagatgtgtttaagtacaactgggtttgggtgggtgacacgcatgagactgtgaatgttggctgggccggggcatggaggaactgttttgtattccagggagatgcagtgagtgaattgtaagcattagaatgagaagaacaaatttgcacttagaaagataattcaggaggaaatgcaaatgatgggctaggaattgtgaaaaagaggcacaacttggtaggctaatggaattgtcaagaatggtgaggtagggattcgaatttaggctgctatgctcctcatcttccttcctctctctctgtgtccctcccaacatcaccctctgcatagattcatgagctgttaattttgtccgtgatgctcctattgctcctctttttttctgattttagttgaagtgtcacctcccagagaagccttcctgattggatcaaatgcccggcccgggcaccaagaattaaagttgaaactttaattctgtccgtgtgatgttgagtaatacccatttcttccactggattgtaaactccctgggggcagggatggcgtctgcttttttttttttttttttgctgttcttagcacaacacctgacgtagattaagtccttagtaaatttgttaaaatgaaatgaatgagagatggaatctaaattgaaaaaaagttaaaaatttaaaccattcgaacttgattattagttgaactccaagattgagaaggcagaaatcaggaatgtttataaagtttgtagcttgggcaactcagaggatagttatatatccactcagagagaaaataagtatgcatgagaaagataaagcattatatttgagacatgttgaatctgaagtatcactaaggcatccaaatggaaaggtccaaggggaaagtgaagatttaattgctgattggggaattcattagtaacttcatacattcaactgtttttctatttttggctttatcttccttgacatcaggttggtttacacgtgatattgtgaagctactgttcttcactggcaagctcctgatattcagtgcgttccaagaatatattattaataaattgaaatattctaacataattcagtgaagtcatggagaaacacagatgatgattcaagtataaaattatcaatttaaaattaaaatattagatgaatagtaaactgaagcaacattaagtcatgataatgctttttttttttttactcttagtgcctatgaggcaatacaaaaggcttgcaattttacatctcctatattgctttaagcacaaaacatagttaaaatatgagtggatatgtgacaatgatcaattagtgcttaagattctgtctatacaaacacacacacacgcaagttacagaaaattatcatttgaggccgggcgtggtacctcggcctctaatgccgaggtatttagaggtattagaggtattagaggtaattagaggtagctcacacctctaatgccagcacttcaggaggctgaggtaggtggatcacctgaggtcaggagttcgagaccagcctgaccaacacagagaaaccctgtctctactaaaaatacaaaattagccaggtgtggtggcacatgcctgtaatcccagctactcagaaggctgggagaatcatgtgaacctgggaggccgagtttgcaatgagccaagattgtgccattgcactccagcctgggcaataagagtagaactctgtctcaaaaaaaaagaaaaagaaagaaaagaaaattatcatttgaagtatttgtcatcattccatcagctgtggttttttctattctatcaactcctttccaacacccgcttccaaaaaatacccagcacccctttcttactttctcaggaacactatagtgctattatctttctgaattctccaaaattaaaaactattggtcacgacttcaatttttcttcacaatgtatcttagatgctgcatttacataactgcatttgagaccaaaccatcctcaccctatgtcttttcccagtagatcactgagacctttgctgccaccctccctttacaggagctcgcttcacacacagacaggaacatgattttcctcaagtacaaggtctgtcaggcagacccctcccaagattgagaactctacttataagaatttctagtaggccaatatgtacttctcgatctagttttctcaaaattcaaagttctcgacttttattacttttttaagtaagcaaccaaagcaaactgcttatcgttggtcaaccttataaactagcttccctcctctaaattcatgtgttttaatttcagtgaaaatgttaattcaataccatgctttccccattttcttcataagtctttgtcaaatattaggtcaatattgagatctttaagtgttttttttttctagttaacatttttctgccactgattatttattcaaagctagttcaagaaaaattaaacagctacatttgtcataacttacgtttaccaaatgataagttttgcagaaatgaaagtgaggcattgccgtccaagatcctccttctttaaaaacatatggtgcaataaataagatgacaggaaaaaaaccacacaaagagataagggaagatgcaggacttacatctcatctggaggaggcttcttgaatgagatgagtgagaagcactatgaagaatctgtgggtgcaggtgatatggatgggataatcgtaatgggaatgctctgtgtgtaatgtttttcatgggagacacatataatctgcagtaattgcgttatttatggtagttcatattagatttagctttgttgaaataatgaataataaaccagtttcaagttttaatggattcagttccagtacagaaaatagtataacagatattaccaattctctaaactttcaaatcactttttctgattaaatggtatttagacattatacttcaaaaggtggcctttcaaactgtaaaaatgtttcccatatggttagtatttaaattacactctaattgtgaagtattgaattttattgtgttaaatattgatcaatagcaaattatttttgtccttaaattcttattttggtaattttattttgtaaacattttgtgatcattataatattttgtttttagaaatgttttatgtgaagtttattatgatgagtaaattctcttatgctgtaaaacggcattttataagattatgtattttacacattattacatcataatccccagaaatgtatattcagaaatgtgtctccataggctcggaagggttttaatgtatattattgccttgcttagttaaaagaaaaaacaataacaaacataaaaaaaactattcttaacctcttgtgtaattcctttcaattgtagtagagggagagatgtgtgaaaggcatttgagaaccaaacaataatcaattaatatgataattactatcaaattgtgtttcttatattaaactacgcattttcaaaactcttgtggttagatatctgtgttactggaagatattaaaaataatattgccatttttgctcctctctttgtgaggcaaatctctagctgagcactaatctccagcctaagaccagatctatgttgaatgagaaagaaagtcttaaaaggctgaataggagataagttgaaatagctgaaatagttgaaattcgataatagctatcaaatttcctaaagcgaattgccttggaaaagtcgagtaactttgtctggaacaaggacaattattcattctgcatccctaggcaatttcaccattgtgcaaacatcagagcatacttacacaacttcagtggctgtaatttaaacctcattattgaaacatcaattttatatcttattttctcttctgaagaacagttcttgaaagaaacttttctctttaaagcacattttctgctaaatgttagatttctgctactacatgagagaatagaccactgtttttcaatgtgtaggttgtgactaagttttaattgggctgtggagactaaaaaggagacatattcatggtgtcaagtcattacttattaggtaaacttctctctgactacatagaacatctaaatctgccttagttcattcaaggctgttataacaaaataccatagactgagtggcttgtaaacaacagagacttatttctcccagttcagggggccggaagtccaagaccaagatgcctaaagatttcggtatctgatgaggacttgcttcctggcttgtagatgatgcctcctcactgggttctcacgtggggaaaatagggcaagctagccctttgggatctcttttataaggatactaattccattcatgagtgctctgccctcatggcataatcacctccccaaagtcttcctaatagcatcacctcagcagttaggtttcaacataggaatttgggggcaacacagacattcagaccatagccgtctcctactgaagtttttgggaaacagagaaagggtgacttgaaataggaagtcatggccgggcgcagtggctcacgtctgtaatcccagcactttgggaggcgaggtgggcggttcacgaggtcaggagatcgagaccatcctggctaacacgatgaaagcccgtctctattaaaaatacaaagaattagccaggcatggtggcgggcacctgtagtcccagctactcgggaggctgaggcaggagaatggcgtgagcgcgggaggcggagcttgcagtgagctgagatcgcgccactgcactccagcctgggcgacagagcgagactccgtctcaaaaaataaataaataaataaataaatgaataaataaacaaacaaacaaacaaacaaacaataaaaaaagacaaaagaaataggaagtcatacattctgtatttctttagcctttatcagctgcagttgggcagcatgtttccacggtgtccttccatgatgttttctaagttatttgccttgatattattaagaacaataatgctaacaccactactgatacaaatagtcaagatttatttattttgcaggtgttatgcactgagtatagcgcaaagtgcttcccatgcattgtgtcatttactctttacaatatacgtataacaaaggaaagatgcaaagtttaaaaatctgactttgacgttcatcaacatcctcccttgtttttgatgtggaggaaagatgagagctttgtatgctctgattgaccctagtgccactcagaaacctgtcagggtgccttgtgaataataattacttaagaaggatttgttggaaaaataaaaactcttttaaaataggttgaatgtggctactactgtactactatagagactgtacgcttggggctttagctgccccggaggctttgttattcctttctttcatgctgtcctcattcactaccattcttcctgttaggatgcttttccatacttccagcagaacagagtctgccatagtgactaacgaatcatgtttttcctggggcacaggcatggatacctttcttgtataagattaataaaagaatcctcagagtggaccaaaatgctctgctcctatcaaaatatctgaaaattgacataaaaatgtgttagaaaagctttatagttataaaggaattatagtttttaacaatatattttcatctttaaataccaagaatttcttaacagattttcttatgtgaccacaccctttaatagtatgtatttatacaaactcaaacttatttagctactgctatgttatttcaagttttaaatacattcatgtgttgcttaataacagggatatagtctcagggatacattctgcatccctgggcaatttcatcattgtgcaaacatcagagcatacttacacaaacctaggtggtgtagccttctacacaactaggctctgcagtacagaccattgctcctaggctaccaacttgtacagcatgttactgtattgaatattgtaggcaattgtataataatgcaatggtaagtatttgtgtatctaaacatagaaaaggtatagtaaaaacttggtattataaataatcccattgaaccaccatcagatatgcagtttctcattgacctaaatattatgcagtgcatgactgtattagaaatttttcagctaatctccatacaatcaccaactagtcacagtagaagttccctactgtgtcaagttcataaaatgtatacattgagaagcatctttataaagtattactttaactcttagtaaaatatttggtagataaaaaactacactaatattttcttaatctaaaacatgcaagcttagatttctgtttcatatttttcacagacatttactgctttattgtatcttccctacagatccagcaggtgtacttaatttgcttttgcctaaaggcatttctccttatttaacacaatgttatttagtttcttaaatattgactggaatattctacatgtaatatgtgatgtgaattgatgttttcaggaagctttactaactatatgcacttgcatggaagtcttccattttatttgtaaaagatgttctatctctctttctctctttggtccaatatattttaccaaaagcttgactttggatccagagtgaaacaggtggggttgaaattctggtcccatcactttctgtctctgattcctgaacaagctgtttgcactttccgagccttagtttccaatatctaatttttaggattcttgtgagggtaaaaggaagtgatatatactgtcttggtacactgtctgcacttaaatctgttcaatacgtattagcatttttttttttactttcataagtgtcagaaatagtattttctgtagtagtaggtcattatttaatgttagattttttaaaaccaaagattgtttagaatgttcttataaggttaactgtttcatgtatttggtagacttgcaaaacaaatgattaaacttgctttctcttcagccatttctcagagcaaattaggttaaactgtaagggtgatattatattttaacagcacatagagcttttctgaaatgtcatgaatttcatatatatatatcatatatataaatcaatgggcaaatataaagtaactttaagaataatgtcatgcaatcaatgtaaaaagtataattgatttagtgtttctggaagagtgggtttctagctttgtgttctcagtttctttattatttctactcaagtaactaaaatgataaatttttgctttttagtcactcaagactgcttgcaactgattgcagacagtgaaacaccaactatacaaaaaggtaataaaatatagcaaagacttggaaccaagccaaatgtccatcaatgatagactggattaagaaaatgtggcacatatacgctatggaatactatgcagccataaaaaatgatgagttcatgtcctttgtagggacatggatgaagctggaaaccatcattctcagcaagctatcgcatgttctcactcataggtgggaactgaacaatgagaacacatggatacaggaaggggaacatcacacaccggggcctgttgtggggtggggggaggggggagggatagcattaggagatatacctactgttaaatgacgagttaatgggtgcagcacaccaacatggcacatgtatacatatgaaactaacctgcatgttgtgcacatgtaccctaaaacttaaagtataataaaaacaaataaaatatccccagtactttttccacttagaattcagtccactccaaatatttgtaagtttcaagtctaaagactgtatttgaattgcatgtaaaatcaatcagccatctcagaacttcttataatcaggtaaaaaataataaacctacatttattcaaaatgacttgggaataaataataattaagaccaaagtaataatctaataaggagaatgaccttagaggcacgaatacttagaaatgttaaataattaaactacaataaaataaaaaccaataataaatcaaattccatttttattatttagacagcattttatctttaagaatgactcaagaccatcttcacaaatatgaattctcctgttatattcaattgtaaaaatcatagaaagaggaaaataaaactgaacagattattaaaaatctgtatttttaaaataaatttccaacatcaaattattgcttgataatttaccgttttctcacagaggtagaatgttttacatttttcagttatttgaagccttttttagttttaattttagacaagttaagtgttttccataataatggcctgaaaccaggtttacaaagaaacaacttttaatgtcatttcccaatatgtgtcacctagaatgttaatccagagaaatggtccttgaaataagagtttcagtgtcgtataagtttggaaacacagcatcttacatatttttctttgagtcacaaggcacattagcaagttattgaatctaagtagtcctactttaaaaaatgtttgtttaactttgtttcatccagtttttcacaaatttttgtgactatgctgctttatcatgtatcgacctctctctgaaagcaaatgggaattgatgctctataatagcatttgtttatataagataactagtgaacaaaaatgtactaaaaaagaaccattcgttcactcacacattcattgattcatttagtttacatttattaattaagaatatacaatattttaattactgtatgtttactgggtgtatcagtgactaaaatatgcacaaatgctccttggcttacaatggagttatgtcctgataaacccatcctaagctgaaaataacgggccttgaaaaaagcagttaggacatctaacttaccaaatatcatagcttagtctagcctaccataaatgtgctcagaacacttacattagtctacaattgggcaaaatcatctaacatgaagcccattttatagtaaagtattgagtagctcatgttgtgttttgaatactggaatgaagtatgatttctcctgaatgtatgtggctttcacacctttgtaaagttgaagattctaagccaaaccatcgcaagtccatatgcatggttttctactttgaaagagcttacctcttgatgaggagaaaacaaacgaaaggcccaacaacccacaaatgaacaagtaaaatgtagatgagacgaaatgctgtggagggcagcaaagcaggcgggggcaggagaaagttttgtgttgtgaacgaactacgagttcaggagtatctggaggttaggctaggcgatgaggaatgggcaaaacaacactagcacagatgatgaatgtgagttggcactggtaatgattccctggcatgctcttttcatctgtgtttttttctgcgtgactttaattgtcctaaatgcaacacaagtactaaactacttgtaaatctattatttattgttcaacattttcctaaatcatgtttgcaacttttaataagcagcacactgtttcctaagaagtaaaagaaagccagaagatcttaagggccaaagttacagtttttaaaaattcttttgaaaaggtttactttacacatctctcccccaccccccaaaatgctataaattgcaccaaattatgcagctgctatactccaatgtgcgtgtgaactggagagtatgctgtgatcttcctggagtggtgactgcttgccacagatccaggggtgctgaactggggtgattacctgggatgcttgcttgcagtgctccaacctttaggatggacaggttgcccttgtgatgtcagcaaacccttgaccagtatataaatgtgagtgtgcatgggcatttagcaggcagattgcatttagcaggtaggttgcattttgttaaaaaaggctgtactcactaaagcattttacttgcacaggtccataagaagacttctgggaaaagataataatatattattaatattattagcatattatatgtaattatatattatataatatataatgtattataataattatatataataatatattattatcttctggggaaagaatttatatatataaatattattagcatattgtatatattatcttattgtattatacataacatcaggtcttgagatgaaatcatgttatgtattccagagacatggagattcaaaggagcggggctacgttcatctgatattttgagttcctatgcttgctctgccccatacttttgtccagacagtgagggcagaggtaaacttcacaaaagagaaaaagacaagaggggtttatcagagtgtagtctcatgtcttttctgttcatttgtttttttgaattttaatctagattttgaataggtaatgcattcacacgttgcaaaaaataaaaaagcatgaagagtgtggattgctccttttcccatctgttcctgcccacactcacctcactttcagtttcctacatagacttcagactccctctatgttaacacaaacaaatgcaaatgtagctctgcttccctcctttcttatagtaaacacttaaaaaccatattttcaatacatatgatttgaaaatgagattataacctgcattctttacttaacaatgtatattgcagacattttgatgcctgtgtacagagatcctcatatgaaaaaaaaagcagcatagtattccattgtatgaattgaatgtatttaaccagtctcctaccaatagacttcttggtgtccatcttttgcaatgcaggtgcttcgaaaaataattgtgtgcatccgtaacttctcatatgtcagcctatgtgtgggacagattttgaattttgacagttattgctaagtggtcctataggggttgtaaagtgttatgctatcacttgcagcaaaagagcatcaggtgaaaaatagcatctcttaatttgctttctttcaagccattcttttgtatgttttaagaaccatttgtatttctgtctttacattcttccaatttttcatgtctatttttatttttttctgtgagccatctgttcatatttttttccattttttcgttggacttggtcatttttaaactgatttctgtgagcaccttatatctcaagcagattaattctttatattactaattgcaagcatttcctcccatactgtcatttgtcttaattttgcatactttttttttctgtcaaatttgtcaatttttttaaaggattctggatttgggttgtgattagaaagaccttttacacttaaacgtattaaggaaagatctcgtgttccttctgaaacctttatagttattttctacctttaaatactttatctatttgcaatttatcctggtataagatgtaaggtatgaaaccaacttaattttcccctgtgagggcatcacagtctttttttaatcgcccatcttttccagactgcttgaagacattaactttaacttttattaaattccatgtttagtctatgtttttttcactttttaaatacttttctgttataccatattgacttaatgtctatttatgcaccccaataaaatggcattttggttactagggctttgtattattttctggtaaatttaattcactcattttttctttttacttctagaatttttcttttttttctattaaatataggaactgtagaatcagcttacttagttaaaaagaaaaagaaaaatacgtgctatttttgttgaatctcatatttataaattaagaaaaataccctcatgataacagatgtacagatcaaatccaagaacatgatatatatttatatttttttagtctccttttttttcttttagtatgtattgaaattttcttcaagaagttcttgcatatttcttattaatatcattacaaagtgttttaccttttcaaatgctatgataaatagaaacattttctttcattatattttccagctggttgttctttttgtgtataaaagccttgaattccatgatatatcttttcaatattaaagttgaaatgttttcttttatttttggattgcatttccctagcatgactttgcccaaaattttacttttaacttctctgaaataatttttctgtgtttctcatgtatgcaaaacagagttgctctttgttttttgatatcatcttaaaataattttcatttattgggtgatataaatcaatttacatttacttatttcagaaatgtatttggcttttattcatcataatgtgctatactgtgtattgtttttcatgttaacaaaagagtttctattttatagttttaaagaggttgcttactatgtaggctatttgctttgctttttctgttagcgtagacttctaaatgctaaatactaggggtagctaccttttcagttatatctttttattgaaattaaattcatataacataaaattaaatgcacaattcattgtaatgtagtattcacaatattttacaaccaccaactctctctagctccaaaatattttcttcagccccagagaaaatcctgtatccattaagcaatcagttaccatttctctgtctccccatgcccctgtaccagcaatctgctttatgtctctgtggattcacctattttagatggtttatataaaggcagtcacacaatacgtgacttttagtgcctggcttctttcacttagcatgatgttttgaggttcacccacattctagcatgtattcatacttcatgcctctgtatgaatgtatatcattctattataagtaagccataatttcattaagggtatttggtttgtttccaccttttggctattgtgagtagtgatcctgtgaacatttgcataaagtacttcctgagtgcctcttttcaattatttggagtatacatcgatgaatcgatgagtagaattgctgagaaaatgtcaacctgttctctacagtgctgcaacattttgccttccccccagcaatgtactagtgttctaatttttccacatcctcactgacacatcttattttcaatgtttttattagtattgccttcctactgggtgtgaagccatatctctgttatttatttgcattttccttatgactgatgatgttgagcatcttttcatgtcctttttggtgtcttctttggaaaaatgtctattcaagtaccttgtccatgtgttttaattgggttgtttgtctttttgttgttgagttgtaaaacttccttatatattatggatacaagacccttatcaaatatctgatttgcaagtattttctcctcttttgtggattatctttttactttcttgagaatgtcatttgaggcacaagagtgttgtacatcagataaatgaagtaaaatttatcttttttttgtttcttgtgattttagtgttatcattgaagaactcattgccaaattcaacatcatgattcacccatatgttttcttctaagagtcttgtagttttatgtcttatatttaggtaattaatctattttaattcatttttgtatatggtgtgaagcagaggtccaaaatcatcttttagcatgaggatatctagttgtcccaacatcatttgttgaagaagatgatttcttccacattgaacggtcttggcacacttgttaaaaatcagttgtacgtagatgtatgggtttatttctgtactctcaaatttattttgtttctttatacacctcgccttatgctggaccactatactatttggattactgttatgttatagtaaattttgaaatttaggatagtgaatccttcaatcttgttatttatttttaagattgttttggctatttgatactcttttgcaataacaaatgaattgtaaggctggctttttcattttggagaacaaaaggtcactgaaatttgtatatggattagactgaatctgtacataatactgagtattactgccatcttaaactaaatctatcaatccatgaacacaagatatcttctcttttatttatatgtcctatcatttcttatagcaatcttttgtagtgttcagtgttaaagtgttttatgtccttgggtaaatttacttctaggtgttatgttcttttgaatgctgtttagtcagttcagtttgctataacatattacactagactgagtggattaaacaataaaaatgtatttctcacacttctggaggctggaaaattcaagattaaggtgccaacagatttggtttgtgaatggtggtcttttcattgtgttttcacatggctgagaacagagacaaaagcaagttcttgtgtcttttcttataaggacattaacccatcctgaaggctgtgctaccacagcctagttatttcccaaaggcaccaccccctaataccatcacattggaagttagaatttcaacatatcaattttgggtgacagaaatattcaatccataacggatgctactgtaaatgggattcttttttaaaatttcctttttagattattcattcctggtatattgaaacacaacagatttttgagtgttgatcttgtaccctgaaacttaactgaattcattgattagttttagtagatttttttgtaaattcatggattttttttttttttgagatggagttttgctctgttgcccaagctggagtgtaatggcatgatcttaactcacagcaacatctgcctcctgggttcaagtgattctcgcacctcagcctcccgagtagctgggattacaggcgcctgccaccacacccagctaatttttgtattttcagtagaaacagggtttcaccatgttggccagactgatctcgaacttctgacctcaagagatcttcctgcctcagcctcccaaagtgttagtattacaggcgtgagccaccatgcctggctggaaattttctgtatatagaattatgatatctgcaaatagagatcgttttactactctccttgcatttggattttttttttaatttccagcatatgttgaatagcagtggtaaatgcaggcatagtcttgtttctgatgttaggataatcttgaggattattacctttatattcatggttgattctggcctgtagttttttgtggtgtctttgtgtggcattgatatcagtgtaactctagacatacagaacaagttaggaatggttcccttctcttttactgttttttggaagagtttgagaagattgatgttaatttttctttaaatgtctagtaaaattcaccagtaaaaccatctagttatgaattttgagggaagacttggattaattaaaactctacactggttataggtctgtttaggttttttatttatttttgagtcagttttggtagtttgtgtgtttctaggaatttgtcccatttgtctacattatctaatttgttggagtacaattattataaataataaaaaggtatagacattttatttccaatgggccattaataatacctccattttctttaatgattttattaattggagtattttctcttttattggtcaatgtagctcaatgattgtcatttttgttcatatttttcaaaaaaccagttttcagtgttattgtttcgtctttttctgttctttttttgagatggagtctccgtcacccagcctggagtgcaatggtgcgatctcggctcactgcaacctttgcctcccaggttcaggcgattctcctgcctcagcctcccaagtagctgggactacaggcatgtgccaccaagcctagctatttttatttatttatttattttttgtatttttagtagagactggatttcaccatgttggtcagactggtctccaactccttacctcaaatgattcacccgccttggcctctcaaaatgctgggattgcatgtgagccaccgcacccagtcctttttgtactctttattccatctaccttctttattattaccttctttattatattatctgatctttattattttcttccttctgtcaattttgggcttagtttcttcttctatttctatttccttaagctgaacttaggatattatgttgagatctttttttaacataggcatttacagttgtacatttctttctgagtgctactttcactgcttcctatgaatattgctatgctgtgtttttattttcaatcatctcaaagtattttctattttcttctaggatttatttatagatcaatttgttgtttaagaatttgttcaattttcacttatttgtgagttttccaattttccttatgttattgaaggtagctaaaatgaatgcttaatagagagccatttcagattgaaaaacataaacaggtttcaaggtcaaaggatgaaaaacatatctttttaaaatacaagatatttgtggaattcaaatattttaaaatttaatgagaattattttgttgcataacatggtctatcttggtcgatgttcatgtgcatttgaaaatatgtgttctgctgattttaggtggagtgttttctatgtgtctgttaggttcagttagtttacagtgttgttcaagttcactattgccttattgatctcttacctagatggtctagctattatttcaggtgagatactgaaatcttcagctgttactatagaaatgtctatttctcctttcggttcagccaatatctgcttatatcttgaggttctgttgagtgatgtttataattattaggtattcttgatacattgactctgttatcaatatttaatactctctttgtttcataaaaatttttggcttaacatgtatttattctgatatcagtattagccatccctgttatctttggctgctatttgcaaggaggcatatttgtcatcctttaatcttgaaaccttgaaacacaaaaacctgtttgtgtttttgaatctgaagtgagtctctggtaggcagaatataattagatcatgagtttgggcttttaaaaaaattattttaccaatctctgtattttaattgccaaatttaaatttagctcatttatatttaaagtgattactgataaggaaagaattacttatgttgctgtttgttcttttataagttttgttcctcaattcctttattacctctttattttgtttttaatagacttttataagtacatcattttgtttttctcttaatttctttttgtgcatttttaaaagtcattatcatagttgttattctggtgatcacaataaacatcctaaatttataacaatgtggtttgaattgataacaacttagcttctctcttatgttgttattgtcacaaaatatacgcttatacattgtaagcccttaacataaattaataattattattttatgtatttgccttttaaatagtataggaaacaaaaggagaagttaaaaactaaaaatacacttacaatggcttttatatttgcctatgtatgtacctttacttgtattctttatttcttcatatgtctttcaattctcacttagtgctttttgttttatttctatctcctttagcatttctcacagggtaagtctgctaccaatgaactctctcagtttttctttatttgagaacatcttaatttttcttcacattttaaggatattttcccacatatagaatacatggtagacagtgtttttcattcagtactttaaatatgtaattcccctggcttctggcctccatggtttttgatgacaaatcagctattaatcttattcagcatattttatatttgatgaattgcctctctttctgctttcaagatctcctccttgtcattatcttttaatagcttgattttaagaagtcttggtaggaatcttttgtgtttacccttcttggagtttactgaattttcttagatgtgtacattcatgactttcttcagcgttggaaagagtttggccattatttctccaaatattcttttttcaaattttctctctcttctccttctgtaactctcataatgcctatgttcatctgcttaatgtatcctgggggtctcttataatctgttcacttttcttttttcttttttattttaactttatttttagagccattttagattcacagaaaaattgaaaggaaggtacagagatatctcatagacctcatattccctacggatgcatatcctcccccattatcaaaatcccccaccagagtgatacatttgttacaactgataaacctacactaatatatcattatcatccagagtccacagtttacattagggttcaccttaatgttttactttctataggttagcacaaatgcataatggcatgtatccaccattgtagtattagagtattttcactgtcctaaaaattctctgtgcttcactccaactacctttccctttccactgcttatcccctggaaatggcattttttaaatgtctctgtagttttaactttgttccagagtgccatgttgttggaattgcacagtatgtaacatttttattttcacttcttttttttagtaatagcaatttaagtttccttcatgatatatcagtgtaggtttatcaattgtaataaatgtatcactctggtgggggattttgataatgggagagtatctgtagggagtatgaggtctatgagatatcactgtaccttcctctcagtttttctgtgaatctaaaatggctctaaaaatgaagttaaaaaagaataacgaaaagtgaacagattataagagaccccccaggatacattaaactgatgaacatatgcattatgagagtcacagaaggagaagagagttaaaatctgaataaataatatttggagaaataatggccaaactctttccaatgttgaagaaagtcataaatttacatatctaaaaagttcagtaaacttcaaggagggtaaagacaaaaagattccaaatcttattaaaatcaattatagtaagtcttgaagtagagtagtgttagttctcccattttgttcttatcctttaatattatgttggcatttctgtgtcttttgcttctctatatattctttagactcagtttgttgatattcaacttgctttgattttgattaagattgcattgagtcacctgggcacggtagctcatgcctgtaatcccagcactttgggaggccaaggcaggatcacaaggtcgggagtttgagaccagcctggccaatatggtgaaacccctctctactaaaaatacaaaacttagcccggcgtagtggcacttgcctgtagtcgcagctactcgggaggctgaggcaggagaatcactcgaaccccagaggcagaggttgcagtaagccaagatggcacccctgtctccagcctgggcgacagagcaagacttgggaaaaacaaacaaacaaacaaacaaaaaacaaacaaacaaacaaaacattgcattgaatctacaggaagaactgacatcttgacaatattgagtcttcctattcataaacatggaatagctctccatttatttagttctttaaatcttttacatattttgttggattattcctcagtatttcattttttgaggtaataatctcaatgccattatgtttttaatttcaaattccacttgtttattactggtagaaaagtgttagatcactggtagaaaagtgattcgctattgagtattaatcttgtaataatgactttattcttttggtccgctgagtagttcataattttctctttctttgtatgccttgaagtttcttcttgaaaagtgaacagttaggcagttaggatgttacaatgtagcaaatctggaaatcaaaattactcccatcctcagggttttctgttaatggatgtggactgcagttgttcacttgtttagtaatttttccaaaatacttttttttttgtttgcctagactctattccttgtcctgtgtggacacaggagtccttcttctattatctcttttgttggcctggtagagatgattttatcgctaatcctcatcctgacagagatttcgttaaacattaaaagtcaaaaaataaaaataaaaatctctcctggtatttacaaacagcctctgaactggggtatttcttcaaactttcactaggctgtctgcagttaaacttagtctttacctcctgtttgcagagagcccaggtaggtatgtggatgtgcgtatgtgtgtgtgtggatgttggaggaataaagacaatatataaaaataagtaaacatgttctctatcactttaataagattattgccagaaagagatgataaaatgcctaaataaaatgttaagagacagtaagaatagagacctactaagtatttgttttattttctaggctgacaatgcaccagtgacatttactaagaagtgggtctttaattttatacatataaatttaatgtaaaaaatctaacaaatcaatctaaattattataaaattttagtaaacaaatatctctagccagaatgtaaacaagtggttttagaaatttgtattttacttaaatttaagagaatatactacctctatgatggagggcatttcattaccaagaatttcagtaacttggtattaaaatgcttttaaaaaaacaattgaatacctgtgattaatttttacagtacattgctattttgaattatattatgtttaaatttgaattcattaatttaataaatatttgctgcatgtctactgtgggtcagtcatgatgttaagccctgggaaaatgacagggaaccaaacataaatggccctttagctcagaaaatttagtatctctcaagtatattatttttttaaaagctctcttccctccaagcatcaaatgaatatcattaaactatgaaagcaactgccttggtgaagtcatcagtttgtgttttacaataatgacagtaactgtattaactcttcctcatttttcagcactccaaaaagtgctttgcatacattatgtcatttaaacaaaattaaaaactattttattataatcttttcactgaaattatatcgtaaaagaggcgatgatgattttgcatttgtaatttgtcattgaggtgatcttgtgttaactattactatacaagagggcttttcttttaaggaaaatattcccttctttgggaaaagccaattagacctgcccatatcaaggcacattcacccttggtgagagacagtgacagaggtggctcctgggagtgagcaagaagcacaggccgacaagaacatgtgctgaagaagacctgggaagtttcttgatccacccatagatcctccatccttcctctgcactctccctgacatctttcctccctctgtctatggtaataggaactcaaagatctgactagggaaatgttatttatttcaacttgaatttacaatgtaatttgcttggttatcacctaggattcttactccttagaaacaatcagaaatatgtggttcttattttatattcttccctccataatcttatttggaatgggaatataaattagtgtagccattatgaaaaatagtacacaagtttctttaaaaattaaaaataaaataccatatgatccagcaatcccactaccaagtatatatccaaagaaaatgaaatcagtgtgtcaaagagatatctctcatccaggtactaaccatgcccaactctgcttagctcctgaggtcagacaagatagggtgcattcggagtggtgtgaccatagaagagataactgtacttcaatgtttattgcagaattattcacaatagccaagatattaaatcaacctaagtgtccatctgcagatgaatggatgaggaaaatgtgcaatatatacacagtggaatactattcagcataaaaataaggaaaccctgttgtttgcagtaacatggatgaacttgggggacattataacaagtgaaataagcacagaaagacaaatactacatgatctgacatatatgtggaatctaaaaaaagtcaaattcaaagaagtagagagtagaatggtgttgaccagtggctggggtggcgggggtggaggtgaaaagacgttggtcaaagattacgaaatttcagttagactggaggaatacgttcaagagatctcgtgtacaacatggtgactacagttaatgaaaatgtatttttgaaaaatgctaaatgagtagatattgtgttctcaccacaaaaatgacaactgtacgaggtaacatatattttaatttacttgactcagtcattgcacaatgcctatatatttcaagacatcatgttgtacatgacaaatatgtacaattttatctgtcaattaaaacataagatcaaaaaagaattttatttggaaaaagtttaaatatgtttggtttgccttggaaacactatgtgaagaaggcatgtacacttggcagttgtatttacagaatgtgaacacactgttagctaccacatcatcctgtgcccctcatgaaaacccacaggaaaaaatattctttaatctcaattctagaaatattgttatcttcttgggcttctagcctattgtctgttgtggattctgaattttattatcaattttgttttcatttttgctatgatcaggatgaaatttggagacaggtatggttcaccattaccaattatatagggacatttaaagtatgattttagactaacttctatagctctattttactattttatccttatattacagtccctcaatcttctttttattcattttacatcatttaatttatactccccaaatttcccaatctccagccttagggctcaccctttattcaacacacccatgagaaatccagggaatgtaaagtatgaattcacaggaaaggaatgtctctgctctcttaatgggttttgatgtctgaacgcacctacagattctggctcagcaatgtagtccccccatgtgcctactcactgatggctactgtcttctctctgtccctttcatctcacccttgagcacagtggtctccttgtcactacccaagtgacttttgatgggtaatggaggagaattatcactgaactgaacagaagccattgaaactcaaatatcatagatggttgttacaaagttccttgaccgttcttagtaaaggttgtgtcttagtcactttcttctttcttccgtaggctcccttctgttgccacatttgggccaaggaatggagagatttcttcgtctggaaacattttgccaaactcttcagatactctttcctctctgggaatcaaaggaaaatctctactagtgtgttattcagagaaattttgtccactctttgcttcaaactctcttatccagatcagcctttattatgaaatagccgaaatatagaccaataaagggaaaacccagacattcatataaagggttagctctcaggttcttgtatctgatatattaacccaggttaacatataagtgatggcaaagaatccagtgcagtaatgtgacttgtattcctttttccttttttttctttctttctttcttttttttttaggatggaattatcttctaagtttcagaggtagcttaacaactaaatggaggtgaaaactgcttttcttggtttctttccttataaatgattctcttcattgcaggatcttacacatttgttccatggcttctcagctttaaaaggggaagtgccctagaagaaaaagagaataaaatattggtcaaagaaactggttacttttttatatatggtcaggtaggttgaaaccctaattctggttttactgttcaaagcctcccattttgtgttcatttctgacacagttttttggtttgtttcttaggttttatatactgataagacctacgccatgggacatctaattcagaggaagaaggtccatgtctttggggatgaattgagtctggtgactttgtttcgatgtattcaaaatatgcctgaaacactacccaataattcctgctattcagctggtaaatattagttctcacaccctgctaattgtgaaatgaagagactttgacgaaaaatctgagctgcaaaatgcaaaaatgaaaggatggtgccctaaaatacaaatagacagaaagacattcctcaatatattgtgttttttaaatcttgaataataagctagtctgttttaattgagaaagatggaattattactaatagttttaccatttttatatacatttagaaagggtagtaatttcatagcaacttctaccttgtacataatacatggtacatagtacttctacatagtaacttctacattgagaaaaaattctaatgtattttcttcaacacttaataacaacaataataatatctgacaaggatagagtgattaccacttgccaggcactcttttctgcatgttatatatgcttgcttatttaatcttcgcatttaagggagttaggatctaggcacagagaagtaacataacttgtcccaggttacacagctaatttttagacttggtttaaaccagccagtctggctccgcaccgggagcaaccaaaactcttcttgcatgctgtggaagaaatgcccctggccaggcttgagggtaagggaaagttgtacaatggcttctttctaaatacaggtgacatcttgtgtcagtggacaccagacaggagaaatgcccctggccaggtttgagggtaagggaaagttgtacaatggcttctttctaaatagccacaagtattgacaattcagatgacatcttgtgtcagtggacaccagacaggtgacttaggaatgcgaaagtgtaggcgcaaacctacctttgcacccaggagcagtgagaggcagagagcacggcagatcttgtaaactttaggtctgtttcagctgtaattgccaacatttccttcattttatttttcaagggtgatttaaaattaatccaggctggttttgcagaaaaatatttaccttaaacacatttattttctctgttgattttgtaaaaatccagaaccctgaggaatggcttcagttccagatggttaccgtgaatgaccgtgtgacacacaggaacggaggctggctatgcattttgaaaaactgtatttcaaaggcatttacaaacaaatgcccaataagtcagttagaaactaaggaaaatagtttctaataatggaaatgatgtcattctggatctgcagccacagatagcattggtggggagatgaggaagtttataaaattagaattccctaactttcataaagagatgtttcccttcacccagtgctgactagtagtttggagttgcaaaatatttataaatggtgagactactccaatctgttatttatttatatttattagtactaaaaattttacaagtaactctttaaaacgtttttctaatcatctgctcctctaacacttacttgctgttagaggactctgctagatttcttaaggtgtcttactttttaagaataattcaccggactttaaaaatatttttcattactagtagcttactgttgtatatgagtaccatcctctagtaagtttcaggtttgcaattttaatctgttttagggcaaatttatttaaagccatttaaaaccacacattagagtatatataagtacataaaatgtttccatagcaacctgaaaagatgtaaatggccaacttaagaaacccaacataataccaaagaaccacttatatacctaaagctgaatcttattatttattgtattaataaaatgtttattagaaaaattatacctgattgctgtaatctggaagaattgaagtagccgataatttagtgttaaaatgttaaatggactctatagttgttcacacccacctaatccttagagttaatattacttaatgctttgtgagctatggtctttgtcaaaatgttaggtcatttccaatctctatgaaaatgacaagtctgttcaacaaataaatctcaatctttttattcttactacttaaggtagtcctcaaaggctttgtcaattctagaaagtgtacacataacctttaataagtcctgaaaaactttcttttgcttgtattctgtctttgcccattacaaaaaagcatacccagtggggatggaaattctgtcatccttgatcactactgtgtgtttgtctagaagggtggctggtacatagtaaatgttcaataaataaactccccctggctgctgcctgagcaaatttgcatgctttgggctttaggttagaatagacatgaacatacatgtgtttatgtaggtacattttcactatgctaatgaaacaatgaaactattctaaaaatagccacaagtattgacaattcagatgacagttttaatgtttgttagtttctttatttcttctcttcccccatttcctcctctttcttcttcatatttttgttttgaagtggggtaaataattacctgatacattgagtgtagtccctgaatgtattttgtattactaattcacagatgcatttgtccttgtaaattagttgcacacagatttattagtcatttttgaagagttaattacactgttgtttttgattataaagacaaacatggtcatctaagaaaacaaaatataagaggttgtgaaaagtaatccagataatgcttaaatccatagtcgggactctcaagaaaaactatattaatgaatgtggtatgttaagaaatggtgttttcttcagtttttaatatttatgcttttcatttgtatgtttaaaactataattaggaatatctagtatatatatgtgtgtgtaatttttcacatttttatttaacattattataaaaactttccctgtcaacaaaattaaacaaaactcatcactaataatttaatattctatcaagggatgttccatgatttacctaattgtttaaaaagttatatattgggcttcttttggggaagtccattttttaatgagtaggtgataaatgcatacatatctgttgtaactccttttgcttatttcttctaaatttttttttaggctaagataattgcaatggtttagaagtccgttggtgtattttgaagtgtgaatgcctatgttaacattttttttttacagaacaaaatagttttatttaagattcttttcttttctgttgtataaccacttatagttcttgtaaatcattttttcccaggcattgcaaaactggaagaaggagatgaactccaacttgcaataccaagagaaaatgcacaaatatcactggatggagatgtcacattttttggtgcattgaaactgctgtgacctacttacaccatgtctgtagctattttcctccctttctctgtacctctaagaagaaagaatctaactgaaaataccaaaaaaaaaaaaaaaaaaaaa

SEQ ID NO: 233 - DNA, 46037 bp, Homo sapiens
agccacgttccagggcacctggctgggacctgccgcagcctctgcgcgcagcgggctccatcccccgggccacggattgggagactgaggcaggcgcgaagcccgccgcccagcctccgctagggagaccccggccacctccaggcagttttcctgaagcccggggccaggagaaggtgagcggctgcccgtcgggggtcgcctgcgccgggtggatgcggcggcacttgggtgcggtgggctcccaacctcactgtccgaccaaaggatcgccccggctgggcggggacctggcgcgcctaggccgggaggggacagctggtttcgggcggcctctgccccagtgacctgtagactttggctttggttcagggacgtctggggttaaaaatgatcgtttgggttcccgcagtactgttcgcggtctgagcatctccacaacgcgcacattcccataatgaatttccgagaaccggcacgcgtgcctcccctcttggctcctgggactgcgaggccggatccaatctgtgcgcctctgtgcgcagggacggctgatggcccggttccgcctgtccgtgccccaggatgctacaggaagctcagatgcaaactctttggggctgtgagttcccgcattgggaaactcttgcaataaaaataatcgtgctgtaatccccagggaccattgagaggaagtggtgagggcgggggaggcgcgggaggaagaggctgggggctgaggtgtgctggggtgggtaggagaccggctgagcccagcacggagccgcttcctggtagccctggcggcatcacccttgggtcgggttccagagcccgggggtcctttcagctttccgttccttttccttatacttcgtccctctctccagctagagaggggcaggctctggggtctgggtacttttgttttggagccatttaacttgagttataataacatgcttttctgattataaaattaatgcatggctaccataaacaatttggaaaagacagaaaacaagttaacacgttaaaatctcaatcctgtctggtgaggactgcagtgaagcccagctggccaccccttccggggcctctgttctccccagggccttgcagcctctctgggcttggcattgctatggctaaagtgtgaaagggtcatgcaaggctgtcagccctgcgtcccccacgtgtgactgcatggggtcccacccaaatcggagtaatatacccactcagcctcacccctgctctgctggccccagggaggaaatgctcatcattgcatccgcccaccccacccctgcagtgccacattcaccagcctcgctgggcatcttccccctccccgccctctgcccctggcgcattcaccagcctcactgggcatattctgccctccccgcccctgcggtggcatattcaccagccccgctgggcatgtcccccaccctgcccctgcagtgccacattcaccagcctcgctgggcatgttcccccaccctgtcttctgcccctgcctcattcaccagcttcactgcccctagccttccctcactcagcagcctctgggccccagtccccactgccactccgtgttcccaggctctgcactcccaacccttcatctgctcatccctgggaggcagacctgtcacctcatttacaaatggaaaaaggtgcctttcaggaactgacctgaggctgtgcagccccctgcctagcaggtgcctagcggttgctgctgtttctatcagaaagaaaaactaacagggggagggaggggggagggctgccctccagccttcaggggcttcctgggtggagggggccagacctttctggtcaggtccctctgggttgagaggtcatctccgggacaggactcagaactggaagagggaggggcagcgaggaaaggtccctgcctggcggtgctgccttccatgggggccttgtggggcagaggctggaacacccacttggggtttctggtgggaactggggagcagggtggggagcctgagtcccctcagaggaggagtcattttgaaactggagggagaggctaaaagaggaggctgtggagagacctagtgttgaccagggtccagcgtcagtgtttaggttctctagctcttccccacctccaatgtcctccatgtccgcaccattcccacgtgcctgtgtcccacctcttctcccacacactgtccccactccccatgccccattcctctccagagaatcactggtctagaatagagacctacaaacttgggcccttaggctggccctccacctgtttttgtcaataaagttttattggaacacagtcatactcattcactttcagaaggtctatggtcactctgcagccacaatggcagagctgagtagtcgcggcagagaccatttggccagcaaagcctaaaacacatactgtctgcaggggcttcctgggtggagggggggtgaaccttcctggtcagatccctctgggttgagagctcttccccctccagggaagagcttgcccacctccgcatcgcagctcacttttacggagcactttctctctgttctgtgccacccgagcccatatccaggcccagtgagctctgcacattggtcatcccctcactgcagggggaggcccagataccacccacaggacacatttgtgtgtgaagtgccacactagggcccagaagggacagctccccaccaggtagggacaaagcaggggtaaagggaacacatgggccggcctatgagctggacccttcaggatgggaaatgcgtgggccgggttgcagagggggttggtgaggggctcggggacaacacaggtgtgttcagagacaaggcgggtcattagatttgatggaggcttggggtccctgagcttaggaagcccccatggaaaccaagtcacaggcatccagggtgaggaaggctgcccacaggcatccagggtgaggaaggctgcccacaggcatccagggtgaggaaggcagcccacaggcatccagggtgaggaaggctgcccacaggcatccagggtgaggaaggcagcccacaggcatccagggtgaggaaggctgcccacaggcatccagggtgaggaaggctgcccacaggcatccagggtgaggaaggcagcccacacttttcttggagacacatccccaaagaagtcctcacgtggctccgtttgggcagaaaccatgaattgaacgggaaaagaaatatgtcaagtatcagaaagaagagtggcatgctttgacagcaagtggactccgagtccagggcagagcctcagttagggtaagaggcacccacccgacccaacccgacccgacccgacccgaccctcgggagccctgctctctggtcagttggccttcatgggggtggggaggtgggtggaggaatgaggtttagtggtctgcgaaggtggcagatcttgttttggtagatgagggcattatctcccactgccccaccacattcgagctgctttcagtcggcgtggtgcttttgctctctctgaccatgcaattgtcgttcactgctgggccatgtggacggactggaattacagtttcttcttctccggttttccccctggagtccatcgttgcttaactgttttcctcgttccatctcctttgaacattgagcatcttcccacccccagggggcctggaagacttcccagcataactccccacccagccaaggctaccggtcagtctgtccctggacagggggtgacaggtgagcctgtctggcagcccttgccaggggctgtgaaatcttcctttgggtgagtcagggaagcaagaatgccacctcctcagctctctccctcaaggaggagccacaccacgcagaggaaggcagaggagggaggaactgtgctcccagtgtgggaagctgcgtcggggggttgggggggcacaggcccacccaggccacagggggatggaggctgcccccagcttctcgcagccctccctccttcctacactcacctgccttccccggggcagatctccatttctgcattgcacccagcctggtggcctgggaccagccctgatggtcagcctgtttgtatggatctgtgggggatcccatgagaaagagctcgttggagcaccccacctggggcacccaactccatttcctgccccgagccctccccactcgcctccagggagtgtgtgtcacctcctcccctctgccagccctgcctgcagccctcttctccgcccccgcccctgcccccagcctgcaaaaggtctcacccgccttcaaagggagctgaatcaacactgcagaaggaagtcactggggggaagaagtgaaaaagaaaaaaaaaggcctacgtgggggcagggttgggaggagaccagagttgggttgcaggggaatttgcaggcaggttggagggtgggcgggagagggaagtgtggtgagtgactgggagggagcagcggttcccgggtggccccagggtcctcgtgggggtgctctccaggcaggaagggactttctgccacttggacatctccctgtggggccagaccccaggggtctccagggctggttagactcctttctcatcccttatgaacctcactgacctgactcttcccttggtgctgccaaaatattgcagctccccaagcacctctgtgaagtgagcctggaaccaccctctccccactggccctctccatccttagcatctttcttgaccttcaaaccctgctcctatggggtctcctccgtggaaacttccagaatcccacctgtcacagagagacctccttcccaagctctggggttgtgtgttatgggggtggaagctgggcgaagggaagctggggggcccaggccagtgtccaggatgggagggcaggagagcagccctcaggctctgaatctccttccccatctatgctcaccggctgcccccgctgcctccacgtgtggacgctgggggtccctctcatctgccttgtgtcatggctgacatgcttgtctcctgaactcgatggtctgttctggagctcagggtcgggcagcctcagagcacgcaggtctgccaggcaagcacagggaaaggctcaaccaaccaacccctgatgacagcaggtagttttctggaatacataagtgaaagtgactgcaaatggaatttctgggctgactggagggaaaagattgttcccagaatcctgctccagtcctgctcactcacgcctggcttcagaacctagcttggtgattcagcagatgagaaaccctgagcagttgtacccagacatgcggccagtttcgcccacctgactccctcggctcttagggacggactcctcagtcctagcttgggatcaacatctactctttcctgtggctgcttggctggagggccctgggaagcagcccggcgtggccccacggatgccggttgccggtgctgctacatttccttctgcggtcgccatttcctcatcaaagcaagagggcagggcagcaggcctcccggctccgtggagcctgtgatttttcactccgtgcagccacacctgatatttttacactaaacgcaccaattactcacttgtctccacaaagaaaaacgtgcacagcctctgacttccagccttgtgcaacaggcacatcagatgggggatagtaagatgagtgctgagtgagtccccggaatggaggtctgggtccccccatagcaaggtcacggctctgggaagccccacggtccctagcccctccccttcactccctccaccagcctttatttaattaattaattaatttatttatttattgtatatatattttttgagacggagtctcgctctgttgtccaggctggagtgcagtggcacgatcttggctcactgcaagctccgcctcccaggttcacaccattttcctgcctcagcctcccaagtagctgggactacaggcacccgccaccatgcccagctaattttatttttattgatttatttttgttgttgttgtatttttagtagagacgaggtttcaccatgttagccaggatggtctcgaactcctgacctcgtgatccacccgcctcggcctccaaaagtgctgggattacaggcgtgagcccccgcgcccggcctctaacagctgttttaatgctccgtgtgatcatttcagcattgggattatctcggagttggcatctattagttatcttttctcttacaagttctcaaggttttctttgttgctgtttgagtacttttgggttgtatcatggacattttgaatattatttaataagactctggattctactaaaatcctctggacaacaatgatctttttgttttgctagcagtcagtctggttagggttagaccacaagtccagacctgcctcttgtgggctgtggttctcatgtgagttcagtttttattttttcttttctttttccttccttccttccttccttccttccttccttccttccttccttccttccttccttccctccctccctcccttccttcttcctttctttctttctgacaggatcttactctgtcacccaggctggagtgcagtggtgtgatcttggctcaccatagccttggcaacgtagcgagacctagtctctattaaaaaaagaaagaaagaaacaacagcaacaaaaagaaaatttacggaattgtgcaatcatcaccacaatctaatttcagagcatttccaccccctgaaagatccttctgctcatttgcagtcacttcctcctagctcctttaaaaaaaaaaaaaagatataaactattttaagaatacagaacagcatggagagcactagtaccaatccccaaacagctacctctcatcttaccaaatcttaacatgttgcctgacttgcccagaactttttcttcctttttagtaaagaaaactctacaatagaactttgaagccctctgcttccatctcccaggcccgtagccttctctgtcttcaggggtaaccactgtcctgctctaggggtgtgtgggtctgcagggacgaggtgcatgttattcttcaatgcctccttctacattttgcttttcagaagaatctcagtgttacggatctgtgggtcacgaggcttcagagcagcacttcaagggctcttattcattaccccgtagcgtgagtgtggcaccatggatgtatgtgatctaggctatatttgggtccacttttcaggagtgctgttttttttctttcatgccatcctttggacagcatctaatttcattcaattgtgtccgtgaatttggcctccttatggtctttgtgctttagaatatgtggttatttcccttgtggtctagtaattatgtgtttatcattgtcccactttgtaacataattgtgtttaagttggagacgaatggttacgttcctcaaattctctacctgccaaatttgcatttctatttgattttttcttgtttgtttgttgttgtttttgtttttgagtaagagtttccttctcatcacccaggctggaatgcagtggcacaatctcggctcactgcaacctctgcctcctaggtttgagtgattctcctgcctcagcctcccaagtagctgggattacaggcatgcgccaccatgcccagctaatttttgtatttttagtagagacagggttttgccatgttggccaggctggtcttgaactcctaacctcaggtgatccgctcacatcagcctcccaaagtgctgggattgcaggtgtgagccaccgcgactggcctgatgtgtttatttctgagagagatctgttagagatatttgctgtttggggctgtgtcagtttgcttatatatttgtcagtctttgttttatatattttgaagttcggcacacaaaggattatggctgctgaactgtctgtggattctgactctcattggctacatcttcctttgtccatttgatgcattttgctttgatttctatctttttgatgttacacgatatcttcgttagtattttctagcacatacgtgtattttccgtttctttattttcagccttcagtgttctcttttaacagtttatctgatagagagcctttcttacactttttactttttaattgtgataaaatatacataacataaattcaccattttaaccatttgaagttatgcatttccgtggcattaaggacacttagtactgtgcaaccatcaccaccaacttctccaaaaccatttcatcttgcaaaacgggaactttatacccgcgaaataataactttacacttccttgaaatgtttttttaatcttactacaaaaaatttcacacatctacagaagtagagagaatagattagtgaagccccatgtccccaacagtggcttcaaaaataatcaactcacaggtgatcttgttgtatcaacacctctcccgactctcccccaacccaacccacccctctttattgggaaataaatctgaaacattatactgcaccatctgcaaatatttcaacatgtaactctaaaagatggggactttttaacataaccacaaaccattgtcacacttaaaacaattaacaatgattttaaaatatggtccatgcattgcaattggttctattaagagattaaatctcttaatctaaagggtctctctcccttcgtctctcctcttgtactgtgctgtttgccttgtgagggtttcttcagcctggattttgctaattgcatccctacgatgtcatctaacacaccctcctgatgcttctttgtagatctaaaaagttcgacctgattcaggctcaatagtaacatttgttctttctatttttcttgatttctattgttatttcatcaagactaattcattaaaggtgtgtgcataacgtctgctgcgtccgtgacgttcgcagcgagggtcattgcttactttaagtcatcagcgggtgtagtagaatggtattctctttctgtccttcttcattattttctaggctaagtctgtaatgagaagatacccttgacagagaacatttcattggaacttgttttgtctctttatttctaaaacccaacgcaagaccttgttgatttaaaacaagaaaatgtaacccattcacaggtgctgtgattcctgatgggtttgaaattattcccaatgttttattgtttggtttttatttacctttcttgtttgttctattttcccttacttttttcttttaaaggatttgcctttttttttttttttttttctcagttacccagactggagtgcagtggtgtaagcatggttcaccgtagcctcaacctcttgggctcaagcaattctcccacctcagcctcccaagtagcctggaccatatcgcgtgctaccatgcctggcgaattcttagaaaatttttttgtagagatgagggtctgggtctccaaatgttgcctaggctggtctcgaactcctgggctcaagtgatcctcccacctcggcctcccaaagtgctgggattacaagtttgagccaccatgcccaaaataaagatttgtcatattttttttcaggtatatacatgctatttttattcttaaggagactcttgaattgttagcatatatacttagatattttctatcaaaatgcccactgacaagcatctatattcctccccagataggatggaacggcaatgtgctccctggcccctcccaacccagtcctctaggcgttttgtttcacagcgttaatattcttaccactattttttaaatcaacaggttatgacatcataatttttacttatttctttgcccaactttgtatcatctgctcttgtatttctcatggatttcttcatgtctatttctgcaagacatctttaaaacagagtttaggagccgggagccatggctcacgccagtaatcccagcactttggaaggcagaggtggatggatcacttgaagccaggagttcaagaccagcctggtcaacatagtgaaaccctgtctctactaagaatacaaaaattacccaggcgtggtggtacatgtgcctgtaatcccagctacttgggaggctgaggcaggagaattgcttgaacccgggaggcagaggttgcagtgagctgagatcacgccactgcactccagcctgggtgacaaaagcaaaactctgtctcaaaaaaaactgaaaacataaaaataaataaataaataaaacagagtttagggtagtaatgtgtctgagtccttgctctgaagatgtctgatttgggttttttttctaggtataatctctttccctcctcttcctcctcctcctcctctcccttctctctctctctgagcctgtagtattttccctttcgtgttctgtggtatcctcctaatgtccctagttaacaggacctcatccatccatccctggggtgttcagtggcctcgcaatccacgtccccgcccagatccgcagccttcctcctgtgacctgagtgtctcctcctcgctgtccctgttctgtcccctcccgccctcacatgcaggtggatgtcaatgcgtgcacgcacccaggttttcttgcctgttcccacctctttatcctccttggctggttcctccgctccattctctggctcaggaatttgctccccagggtttttcattccgctctgtagcagaatgtgctactgttgctttccagcatcaaacttttcactcccatggcctctgtgttcttcttcctaatgggtgccctttctgcctggcgctcctggaggccgggcccctctcccaagtgtgaatctgatggaagcaggtccttctcgccgggacctcatgtgagaaatgacatgtcccacctgtctcaaggggccgctctctgacatcagagctgctgtagagcggagaggggcaggggtgaagggccacggtggtgcaacccaccacttcctccaaggaggagctgagaggaacaggaagtgtcaggactttacgacccgcgcctccagctgaggtttctagacgtgacccagggcagactggtagcaaagcccccacgcccagccaggagcaccgccgaggactccagcacaccgagggtgagtgtgcagaggccccgctatgtccacggtgatttttggagggaagcactctcctgccccagcctggagtgaccctggtggccctgcttatagccccggcccaggggtgtctggcaggaaggggtctccagaccgtctgctccagggtcccctttgagacccggcaaggggaagtgcctgccaccaagagcagagccacatggtgtgctgggagcgcttgcggctgaggatggggccggcatgggaggacaaggggctgtgaggccggcaaggccaggaagaggctgggcccacaagcccctagggggacggctggggggtcctggtgctccgggctgggcaggaggcaggttcccggggcctcctctgtgaacctgctgcgcctgcctgtgttaggccctcctgtctgcatgctgccccgcctggctacagcgattccatctccagatcgactcgcagtgtgtggtgtgtgatatggtgtggtgtggttcgtggtgtgtagtgtcgtgtgtgtagtgtggcatggtgtgcatgtatggtgcacgtgtgtggcatagcgtagtgtggtgtgtgtgtgtgcatgtatggtgtgcgagtgtgcgcatgtgatgtggggagtctgttgtatgtacatgtatggtgcacatgtgtaatgtagtgtggtgtggtgtggcacatgctccatgctcctctgggaccctcgagcttccctgcctcctccgtggggacccctgggtgacgtcttgctgtaggggagcgggcaccgctgtgcgattctggtcgagttggttcagctggtgaccctggcctccccacaacaggctcctggaggccattcccaaggtcctggtgggagggggattgaagccacgcccctgggtcccaggcccacctggcccccttcccccaacactgcactcttggggccagccctccccatgcatcctccacccctggcaccaccccttgcaccaccgtccccacacccaatcccccctcccctggatctgggagctgggattctgccctgctgtccctgtccatccggggcccctctcctctgtcagttcctgggtggggagaaggaggggtggcatggctgcaatggggaaggggggggatggccggagagctcagcctgggagcgagctgtgggggcataggggacactcgctgtcactcgccttccccgtgacggtggcgcaacgcctgcgggtttgggggctgaggccggattctggaggcttcacagaaatgagctgctagaagctctgggctgtctgccgtcaccccagcgtttcaccatgagtgaagcccagctcactgcagaatccatgcccagctcactgcagaatccccgggggccagcactttaccaagagtggcctccagactccacattttaggaaggaactccttccccatccagctcacagcagaatccccagggtccctgccagcctggcacccagcgtgcccctcagtattctggggatgagtgggggagtccctctgctgggaagaggtccctggctacgtccctgcagggcggcggctgagcccatgcctcggccccagggccagtccccgccgggtgccatcctgagcagggccacagaacagatgtcccacatggccaggacccctgtggccacctgaccccgggggggctgtggccctcggtgaagcaggtgaccgggcgggctgtggggtttgtcagctccgcagcgtcactgccgctcagcgtatgagtttccactcccagcactcaatgaacagctgagcaactgcaggtgcctccgagtgctgggagaggggaatgctcagctccgagtgctgggagaggggacgctcagctccgagtgctgggagaggggacgcttagccacccaagggcctttgcctcaagggagtaaataggggcatttcctggtgggcgtgggctgggctggagaagcagggcctcctggcaggggctggcatgagatccaaacactgcccaggcagctggacactcctgagcctggagcttctcacctgaaccacagggtggtaacccctgcccctcaggcggcatcgacgtgacctgcctagtgcacagtgagcctgaggcaacacggccaccaccaggagactccctggggaagaggcccccagacagcgaggtgcccatgaaggaagttctgcacaggggccgcggccatccaggagatgggaggggccctatctgcaccctgtctggaaggggcatggggtgagcaggctatttggtcccccgtgactcagtttccccatctgtgaaacaggaggggtggtctggccaattgtgcgcactccagctgtctctatagtcaaccgtgtaacttgaactcacttccccagggctcctgccaggcccaggtctgtccactctggcccaggccgggccccaccaggtaccagggctgtgggacatttgcctctgtggatggggcagcgtgacgcctgtggcgattccatggaacaggtcctgtgtgggccccccttgctgcactcgtgtcctgtgtcagagaaccgtggtcctgcctgaggccatgtcaccggaggctggctcccgttcccggaggagaatgccagctgccacaggggtcagtgacacaggcatttgcccagcaggtacaggccaggtcgctgggaagccccaactcaaggggctctgcagtgggcgcctagcaattatggagctgtgggtgatacccaccccaagccggacctggtgccagcaattatccctcccattctgcttggcacaaactggcactgacacggggcattgattaggtggttgcatttgtcgattccgagcccatgtgtgtggagcccaggccctgagcaagcacagagggccctggtgctgtcctgagctgaggcccctgcccaccccgggctgcgtgttctctccggccattcagggtctgagagtgcagaagagttagccccaggggaacaccttcctgcccagctgatttgtaaacagcctcgctggggacacatgttggtgttgggagtggtggaggtttctgtgtgtgatggaaacttggggtaggtgttggggaaaagaggtgctgagagtctcagcagagggcagagtccaggagtcctggagtgcagctctcagcccctgcgccgtgcctagaggagaggctggcaagcccctgtcccatggatgggtgaatgggtgagtgacagtggcaacaagcccatgccagcagggaggtcccactgccatgaagcagcgtcctcatcaacgtcacagtgggaacaagaaagccagtagctttggaatccgaaggagcaatttcagcataattcgtcggccaccatgaaattccatttttaaaatgtcctttattcatttatcacaaaaagggtggaaaatacaaacaggaataatgaaaattgaaaatactcatagtgccaccacccagagaaatgcagaatattttggaactgtgtctctctttttttccccataaattcacttttaccacgaagccaagctgccctgagcagctgtttgcatgttttcgttgctgtgtgggactccatagcgcaggcaccgaaaccgccaaagcatcttacacgttgacggctacacagggaatcaagatattttggctgaaatccctggttctttcctggggtgactcatatgtttcttagccagttttcttccttcttttgtgaattacctgctcagggtgccacacccttgaaacatccttgaatggagtatttacctttttgttattaatttctaagatctctttagagatgaagattaccatttaccttttgcactagagagataatagctatttcctctatgcaatttgttagtacaacatgtgccatttttagagtctgtcttcttgctattttcccccttagctttttttttttttttcttttgagacagtttcactcttgttgcccaggctggagtgcagaggtgagatctcagctcactgcaccctctgcctcccgggctcaagtgattctcctgcctcagcctcgcgagtagctgggattacaggcgcccgccaccaagcccagctaatttatgtatttttagtagagatggggtttcactatgttgctcaggctggtctcaaactcctgacctcaggtgatccgcctgcctcagcctcccaaagtgctgggattacaggcatgagccaccatgcccggcctccccttagcttttatgctgaggtttccttactcttagatacctattcttctatttcctttattgttttattccctaaaactgaagtcctacacatttgtggccattcttttatgtccacagcaagagtgtccggggcctcggcctcacgtcgccacccaggaacagacagtctccttcatgttagatggaggagtggtgtccccttgtctaaaatgctgtaaatatcatttgatttccctttgacttcaggtatttagcagagtactttagcattccttattaatatgtgtgtgtcgggggggtggggtgtctcattttatttcatttggccagaaattgtggcctttaaaatttgtgctatcaggccgggcgcagtggctcacgcctgtaatcccagcactttgggaggccgaggcaggcggatcacgaggtcaggagttcgagaccagcctggccaatatggtgaaactccatctctactaaaaatacaaaaattagctgggcctagtggtgtgcacctatagtcccagctactcaggaggctgaggcagaagaatttcttgaacatgggaggcggaggttgcagtgagccgagatctagccattgcactccagcctggatgacagagtgagactccatctcaaaaaaacaaacaaacaaacaaaactgtgctatcaaacttcacagatagtcaaaccaacagtaggaacacgtctccctgacccttgggaaaatacgcttttgcagggtcgcaggttcagaggcgacatgggctgggttttcctgcatcctctctgctccgacttgttcctatttgatctgacctgtttttgtccctggatttcctggagcctctgtgatccaaggacagtgttccagtccccacctgacggcacttctctccagttctttatcacattcctacaaagcagaaatgagtccatcttgatgctctggcttttggcttaaaaggtggatgcctagtttataatcatcccttgagccttcagttcccagcgcaggggttggctcccatgtcctcttccttccaaccttgtcccctggcggcatcgtccatcacttcccgcgcacctccgagtcactttgatgcgagtgcctctcctctaggacagcgcaaggtgggtttcagcacaggcaggaggaagctctgatgcaaagttccaatgggtctgcggggcctctggttcctcaagcagtctcgtcttagggttttacggggttgcaaaaaggaagcctgagactgggcacggtggctcacgcctgtaatcccagcactttgggaggccgaggtgggcggatcatgaggtcaggagatcgagaccatcctgatcaacacgatgaaacctcgtctctactaaaaacacaaaaaaattagctgggcgtggtcgtgggagcctgtagtcccagctactcaggaagctgaggcaggagaatggcatgaacctgggaggcggagcttgcagtgagctgagatcgcgccactgcactccaggccggtgacagcgcaactccgtctcaaaaaaataaaaaggaagcctgaccccgctggattcctctcccagcataggctctgccctctctctgctgtcttgcttaaagtttcctttctttttcttttcttttttttttgagacagggcctcgttctgtcaactaggctggagttcagcagtgccattagggttcactgcagtctctccctcctgggcgcgagtgatcctcctgcctcagcctcctgagtaactgggactagagatgcatgccaccatgtctggctaatttattttctatttttattttttgtagaggtaggagtctcactgtgttgcccaggctgctctcaaactcctggcctcaagtgattctcctgccttggcctctcaaaacactgggattgcaggcgtcagccaccaggctggcctcttcctttcctgtgtttgctcctgttctcctgtcctcgacttctgtgaaagggtgtgtgtgatttggcccggatctgctgcaggtctcttctgacgccgctttcgtgtctcagagcctgaatgttcagagctttgctcaccgtgaagtgtggttcttgttagctgtgtccatttggtgcccgggagggaagggcgcccggcccctgaggggttctccggggaaggatgacctcgtccccctggtcctgccccctcagccccctgcttcccctgtgcaggggacttggtgacaggtaccacttcctgcagctgggctggggttgcaccagcacttccttctcgggcagggttgaggtcaagggcgactctgatgcaaggttctgagaggcctgtggggctgtggattcctaagcagcctcagctttgggttttgcaccttaggtcttggtaaggggacccgcccgcccttagatgggggatgtccagagctggaggatgaggagggcacccgcccctggtgtggggcagcagggagggccttggagaatgaggagggcacctgcccccagtgtggggcagcagggagggcctcagggtgatcaggctccaggccagagctctggggccagctcaggggctggggtggggggtgtctgtgctcttcctcccctcctgccctgcagctctgccggcttagcctcagggcaccagaggtgacagtggccaggcacctgtttgcccgaatgctgccctacatctgtgccttacccattcccatcccccagggagctggcacaggcccttcgaccacctccaggcacatggaggaaactgaggcagataggcctgatggggtcttggtctctcaggcctcaggtgaggccctggacctccgtgggccatcctggctgctgggcagaggggctgccctgccctgttctcccacagaagggaggctggctgccaggctcagtgcactgccttacctcctggagcggaccttcatccccagctgtttgtctgggctcagccactggcattggggggtggggcagggcctggcttctcttgtgcccccagctccaagccccccagggctgctcatggaggagcaacagtggggagaaggtggctccccaccagcccccttcctgtggtcaaggttggggtgccgtggtctctgagccaatcctgctggaatcaaggtgcaccccctctccctgtgggcaggtgggagtgcccggggtaactgggcaccaggtccatatcttgctgctgctggggccctcagtttccccatttgagggtatgaagtgtttgcatgccactggtcacgactgtgttaggggcggagacctcatgtctgcggccccagggagagcgtggagctggggtgtgagtccttaccagcctggctggggctgccaggggaggtctgcaccccctccccacttggcgcagctgcgacctgggggagtcctgaagccggctggaccctgcaccctgggggagtcctgaagccggctggaccctgcaccctgggggagtcctgaagccggctggaccctgcaccctgggggagtcctgaagccggctggaccctgcaccctgggggagtcctgaagccggctggaccctgcaccctgggggagtcctgaagccggctggaccctgcaccctgggggagtcctgaagccggctggaccctgcaccctgggggagtcctgaagccggctggaccctgcaccctgggggagtcctgaagccggctggaccctgcaccctgggggagtcctgaagccggctggaccctgcaccctgggggagtcctgaagctggctggaccctgcaccctggggtagctccagcacgcacagggcctccgatcagctgaggggctggtgggcactcgtggcaccgaggtcagtccaggcgcaggactttgagggggcccagatggagagctggaactggcctcggcctgaaccacaacccccaacgatcagagatatgggggctttcagacacagggtgggcccaatgtgaaccaaaaccacctcctccaggaagttacagcagggtgcaggttctgtttttgaccccaggacgggaaggatcaagggttcccttttgacatttttgtattctgattataattttgctgggaaccagggaatgaggtcactgccaaaacaacaggaccttggggcttgttggggcgtctaagctgtgggatcctcagatgggcccctggtgggtgttccgttggcctcagagcccccagcacaggtgcagggctttcgggggatggaggggagccagggcctgtggctgagggcacccgagcctcccgggccacagcacagcacccagcgctgtcttcaaagccggcaggccctagtttggggctctgctggcttgggtctgcccactgaaccttgggtggccctgccagcaccacccgagggaagggtgtggggcaggaacgccccagcagcctgggaggccgtgacaggaactggcatttgctggaggaggtgtgttgatctttgcttctgacaacagccccagggtaacggaaatgtcttcctgcccaccatgacaggaaggctcctgggtaccccttctcagtacctctccaccttcttggtgccagataaaagggtcccagccagctataatgttctcaggtcctgggaggtcagacccaggggcccaccccacctaggaagccctaagaccccccaaggagccgacctaggcctggtttgggcacctcccggatggagggaagggaacccaggggtggaacggccctgctgcccgctaggaggtgctgccggcctccagcaccaggctgaggcctgcttccgtcattttgcctctggggccgagggcctgtgagtgaccactgagccgcccctggctgtggatgcgtgggttaaggacggggtgggtgtgtatctggaaacaaaagggcaggaccccggcaactggtggcttgggcaagtcaggtgactttttttcccacctggcagggactgcagggctcctgggcaggcctagcacacagcttggcacccgcgggcatcaagccagctttctcttcctggcacacagcctggcacccgcgggcatccagccagctttctcttcctggctatgtttctgccacagagagacagggccaagcccagctctcctccaagcacaggctctgctcacggaggacctggggcacactggggcagagtgcacacaccgggtgtgtggggttctggtgtttgtgtgcgtgtacatttgcacgtgtgtatggtgtgtgcgtgtggtgtgtgtgtctgtgtggtgtgtatgtgtgtgtacgtgtgcatgtgtatatttgtgtgtggtgtgtagtgtcttgcggggagtatggtgtgggtaaggggtgtatacatctctgtgtgtacatatgtgtggtgtgatgcatgtatatgtgtggtgtgtgcatgcacgtggtgtgtacatgcagtcaggcacacatctgtatgcacgtacacgtgcatgtgtggtgtgtgtacacgtctgcatgtgtgtgtgtgcctgtgttgtgtgcctctgcaggggcccgctgcagctgtcctgggtgcctggctgagcaggtgtgctgcccgcactgctgagcccgggatccctccctccctggctgttggcagctgggcccagtgcagctgtgctggcctgaccctaacccaccccctgcagcagggacagggccccagctccttgtcccaggccagctggaggggagcttcatgggtggtcagccccaggggttgggcctgagaccgtcaccaagaccccttccctccacaggacatgctgggcctgcgccccccactgctcgccctggtggggctgctctccctcgggtgcggtgagttctgtgttccacggaggggactccacgcgtgacattccaatcagggagaacagggcctgccctcactttcccatagacagaagttcccgggaggctggggaaggaccttgccactgggggtaggtcggggactcaggcctcgtctccgcacgtgccaggaggctgtagctgtgctgtttcccgagggcccctctttgcacctgggggtggtggcgaatgcggggtctcctcctggaggctgcctccctgtctttttgggcctcctctgaccttcctgctctactcccccttgggtgtgggcagggcggcccagagcacccactcaccagccggcctcgtccctcagtcctctctcaggagtgcacgaagttcaaggtcagcagctgccgggaatgcatcgagtcggggcccggctgcacctggtgccagaagctggtaagtgcctcctggacccctccccacctgcccagctcctgggtgagggccctttcctgcccctgaagccagtggcacccagaggaccaacaactccattttctttttgagggggtccccagaccctggcctcaccctcccctcaaggggcccctgaggttctgatgtgtggtctgtttggaaacacacacagaacacacacttgtattttttctcagccatttccgagtaggttgtagacatggagccctttgtctcttagtacttcaagggaggtctttcttaagaacaaggttttcacttacaaaactacgtaagcaagtgcagaaacacgcgcgcttctggccccgcatcgccagcacgctttcctgcagagtcagcaggtttggggccagtgacgggacccaccaaacacagcccttatcagaatccaggggctttgcagggacaaggtggccaagaggaaatgtactttgatgtaaatgtattttgatacatgtatatctatatttgataaattcatgtatcaaattcaggaaattcagcattggtatctcattatcatcaaacctacacactacgcatattttattggttgtcccaatgatgtcttcgtgagcatattttcctggtggattttgtcacccaggctcaccctgtgctcagctgtctcaggctcagaatctcctcactcaggctcaccctgcactcagccatctcaggccccaaatctcctaacccaggttcacacactgcgctcagccgtctaacgctctgaatctcctcacccaggctcgccctacgctcagccgtctccttgggcttcttgaatctggacaagtcctcagctttctttgtctttcctgtccttgggcgtttctgaggaagtcaggagagcagctttgtagcatgaccctcgggggtcttgtctggagtttcctctgcctggactcaggtgtgctttggcaggagcccctcagtgacggtgtcctaagtgcccatgagaggcactgctgtggccccgtcccagtcttgatgaggtcagcgtggacggctctgctgagacggcatccccccggcctccccatcccgctgcatgatcccctcgcagccactgtgggctggtgaggttctgccctcatcaaatcgcacccgcaggctcagcatccgcggaggtccccgcctgaagccgccatcactgcgatggctgcagattggtgccgtgctggtccccgcctgccactcacggctgccaacctaaggaagggtctctccttctctgcagcctctctctcatcagcgtgacccacagttttattttgttcagtagtgcatgatctgtggctgtcctttcttccccgagttgctcaaatccgctgggtctggctgcgtgtcctgtccatgcatccccgttctaccgttctgagcactttcttgctttctggagcaacatgatgctgcaggcccatctccatgtcccttgccccagcctggaatcagatggttttctgacggctcgggttcctttccctgagagtctgggctccagcaccgttgtagccggacaagccgcagacagaattcctcagacactcggttaaagaaggaagggctttatttggccaggagtgtcagcagacttgcgtcttaagagccgagctccccgaaaaagaaattcctagcccttttaagggcttacaactctaaggggtccacatgaaagggttgtgatagatagagcaagtgtggggaacttgactgggggttacatgcatcagctgacagaacagaaagttttgcaatgctttttcatacaatgtctggaatttacagataacaccagtagttttggtcaggggttaataataataataataataatattattagtttaaccaccagggccgggtggtggcgccaaggtcatctggctatttatcttacttctgtttctttccaactttttgctttctctcttttctcctgtcttataaactagagaaggggagggggtggagaagaaggggagggcagcaggagaagtggtgtctcattccttaccgtcagcagcttcctcatttctcaattttgcgtcccacagggagcggctttgggtcctccagcccacgccaccgcggcgagcagtccccggaggagaagccgggtggctcccgtctgtcctcggactgagcagggtggccaggccccaggtggaaactaccttggtcaggctgggttttttccctcccctttctggaggttttcagctcctctgaaataaacacctttcagtgagatttgtttgtttctgtgtggattacatttaggctttcttttctctcttgctgggatacttgctgatgtacttttatttctggaggacttctttaaaaaattctgtggttccaaaagtcagagccctacaaagaggcaccctggggactgtcgccctcccctcccacctgcccccctgcctgcgggactcaccagcctctgggggccgggcttatcctcctgagcttccctctacgaaagcaagtgcacaaacacgcgcttctggccccgcatcaccagcacccttccctgtagaggcagcaggctcggggccagtgacgggacccaccaaacacagccctcatcagaatccaggggatttgcagggacaaagtggctgagaggaaagcgccctgggcccaggcctcccaggctcccctccagcttttgttcttctaaactttgaggggcttggcccagaaccctgcccatgttctgggtttcttgggggcctagggactgccacgttcctttgggacacagcaactcccttggacaaaggttctgctgatgaagggcttgaagcccctgggccagctgctagaggacgctgaggcctctcctcttgggtcagcctcgggctggagagtaggtcctgagtcctttctgccgctagaggcagaggaggaggcgataccctgccccccaggggtctgctgtggccgggagccttcagggaggggctgtctgggaggctgaaggagctccctgtctctgtccacagggacttctgtcccaaattccaggcgcagaggaggaggggacagggtgggtcctcagtcctccatggccagtcagcctcctgcaggtcccgcagtgtggccccctcctgacccctgactccccctccccagaacttcacagggccgggggatcctgactccattcgctgcgacacccggccacagctgctcatgaggggctgtgcggctgacgacatcatggaccccacaagcctcgctgaaacccaggaagaccacaatgggggccagaagcagctgtccccacaaaaagtgacgctttacctgcgaccaggtaggcttggcctcggtggtggtgccaggcaccgtctgtgctggttattggctctggctgggagtccggccctgctctggggtgtcagggctgcccagaaggcatgtgtccgggtcggacgggtgtgtgggccagtgaagccccaaggctgctggaaagctgagctcctcagtgcccttccgctctgtccccaggtggagctgccccagcccttaccatcggtgcccagtgtctgcactctctcgcagcccgacgttctgcaccttttttttttaaagggagaccaaaccatttgcaaaacactattccattacacactcagaaggccagggtactcttagaagagtaaaggctctgatcagtcttgcagccaagagacctaagtaactgtttaaaccagtgttgcccaaactgacttgaccagagcacctgtttcgacttgaccagagcacctgtttcagaacacagtcccctgtcagtgctttgagaaacgccctccttatcggtggctcacgcctgtaatcccagcactttgggaggccgaggcgggtggatcacttgaggtcgggggttcgagaccagcctggccaacattctcctgctgcggcaggagaatcacttgaacctgggaggcagaggttgcagtgagccaagattgtgccactgcactttagcctgggcgacagggcgagattctgtctcaaaatgaaaagaaaggaagggaagagaaggggagggaagggagggagggaagggagggaagggagggaaggggaagggagggaagaaacgaagctccctccttgctccaggaaggcaggtgtggtggtgcagcagatgggagaaggaggcctggtgtggccaccgacctgtgacctcccaggccacagtgaggccagggaaggaaggggaagccatctcccagggagagggtgcagacggggccagggtgactttagaggaaccagctggtgtcggacaggctggggctcagagctctgccctcaggggaagcccaggtcagcggccactgagttagccttggggcagagtggcccagggtgcaggcggccaggtgacagccagcagcagccgggagggaggcagctgggagacagtgagggatggggccgagccattggggaggtcctgcaggagcagggcccaggtgtccctgggggcagcaggggacaaaaccccaccctggtggtagggtcaggcctgcccctcgctgccccgtgagcaggcacaagccccttcgtgctggaacctccacctctgacctcaaactcgagggcctggccctgtggcccctggaggcagctctgatgtattttccccacgccccacttcacagtgaggaaactgaggctgacagaggtgttgcctgtggccagagtttgtgcagctctgtggtgctggaggtgtcaggaaggatcgtcctggagggtgggggtgcgcctgagtgggggcatccttgtgccgtggggaagggtgggggagtggctgcccacggcctggcatgcatccccactgtgcagggggcaaatgctgtggcctctgggagggcacaggtgagctcgggtggatgcaggtgagggtaggcaaactcgggtgagcaccagggagagatcttaacagcaccccagggccacaggctcccagagcagggcggcaggatctgggaagggactgtcctctcgcggggtcctggccctacccccgcagcctgctggcccttcgctgagcctctactctggaagggaagggacggggccccttggtcagccaccaaaggcctatgtctgtgccctttgactgcagcatggccacattgctcgtggggacatggtcttggctgcctcctccatgtcgctgcagacgccgcacggcccccaaagccaaacacatttactgtctggcccttcatagaaagtgattggggtccttggcccagaggccaagtgaagcctctgagggctgcaaggcacagcagggcgagggccagggccaggagtgccgggtgtgaatgtgggtgagtgtgtgtgtgtgtgagcgcatgtgtgtgtggtgtgtgtgtatgcatggtgtgtgtggtatgtatgtgtttagcattgtgtggggtgtgtgtatatgtgtggcacgtgtgtgtatgggtgtgaatgcatgtgtgtggcatgtgtatatgtgtgtggcatgcatgtgtatgtgagtgcatgtgtgtggtgtatgtgcgtgagtgcatgtgtgtgtgtttggtgtgtgtatgtgtgtgcgagtgtgtgtgcgtgcatgtggtgtgtttgtgtatatgaacaagtacatatagtatgtgtgctttgtgtctggtgttgtgtatgagtgtgaggtgtgtgtgtatgcgtgcatgtgtggtggttggtgtttgtggtgtgtgtgcatatttgtggtgtgtttgctgtgtgtgggtgccatgtgcgtgtatatgtgggtgcgtgtgtgctacgtgtgactgtgtgtgcatgagttatatttgtgtgtgagtattgtgtgtgtgcatatatgtgggtgtgtatgccatgtgtgactgtgtgtgcatgtggtgtatttatgtgtaggagtgcgtgtgtgtgtgtctgtgaggaggggcacataccctttctcccagggtgtggcagcaggcaggttgggggtggagtgggctctgcacttgtcctgccgcccaggggggctgaaggctggagggtggggcagaggggacaggcttcgtcaccctccctccctgctcattcattaacatgatgtgtgtttatggagagctgacttgtaccaggcacggttctgggagccagggacacaggctggttgcggtgacaggtaaacagacagctacacaaccgcacgtgtgactgagacgcgggcgagcggaagtccagggctgggatggagaaaggggcctcctggggacggcccgcgtgggccttgctgggaagtgccaggttcgtgtgatgcctgtctatgtggctgctgatgagggcgcccgtgggactgcaggcatggggccgggttaggtgtgagcccaggtgagccgctgccactctcaatgaaaggcgtccccaatgtcgctggcgtcaactctaagcaccccaggcgggtttcagtgtcactgcgaggcacatgcctgcgtccgggagtcatgtccttcctctgaaactccagcctgcctggatgtcctgtgtctggtcctcagctctcctgccaggcggggagaggggaggtcaggaggatttgggggctggaggagagggtgccagtgcacagcccgctcggggccacacgcccccagacaccctgtgtgagatgtgaggtgtggctccttttgttctgtccccaccggcaggccaggcagcagcgttcaacgtgaccttccggcgggccaagggctaccccatcgacctgtactatctgatggacctctcctactccatgcttgatgacctcaggaatgtcaagaagctaggtggcgacctgctccgggccctcaacgagatcaccgagtccggccgcattggtgaggcccaggcactgcaggacaaaacccagtcctttcccagaccctggccactcctgcctgtggcccacacaactcctcgcactcaggtccccagggtagatctgggggccccagatgcaggtccccccagggcatccacagggctgcagtcggcctgcctccctgccaggggccacacccagtccctggctccccaacacttgtagacattgtccagccctccacttccccttccatcttctacttcctttatttatttcttggtatgtttaaaagacaaaattctgacagtgccaattattaaacattaaagaccacaacacatatagacggcacagcgacggcagcactgaagaaaccacacagcaagctctgctgggccaagggctccgctctacaccagcactgccttgccacagagcaggtctccagcacacgtgtgtgtcagtcacagcgcatgtcttccccgccggccgtggcttctcacatcggcactctgccaccttccctacatgcggggatgcacacatgcacgataacacacacacacacaagcaaatgcatgctcacacaaatgcacgctcacacacaaatgcacgctcatgcacgtgaatgcacgctcacacacaaatgcatgttcacacatgcaatgcacactcacacacaaatgcatgctcaaacgcaaatgcacgctcacacatgcgaatgcacactcacacatgaatgtatcctcacatgcacaaatggatgctcacacacgcgaatgcatgctcacacacaaaagcacacccaaactcaaatgcacacacacgtgaatgcatgctcacacacgtgaatgtatgctcacacacatgctcaaacacacaaatgcatgctctcacatgtgaatgtatgctcacacatgaatgtatgctcacacgcaaatgcatgctcacacacgcgaatgtatgctcacatgcacaaatgcacgctcacacacgtgaatgcacgctcacacacaaatgcatgctcacacacatgaatgcatgctcacacttgcatgtgcacacacatgcacacacagtcatacacacgtgcaagaccacatgtgcacacagacatgctcacatgcacactcatgatcacccatgtatgtcttcactcacatgtataaatcgtacataaacacacatgcccacatatgtacctggtcacctacgtgaactaggtgtgtccatacctgaacatgctcacatgcatacaggaatacgtgcacacacagttgtgctacgcatgtacacactcatgtttacacatgcagatggctgcacacacagatacacatacgcacctgttcacatgcccacatgtatacctggtcacacacatacatgcaggaacacacatgcatacacttatgctcatccatgtacattgcacactcccaggttcacacacacgcccacatacgttcacatgtgtgcttgcacaacgcacatgctcacacacacactccacatgtgccatcttgctttctccacctccctgctaggagagaggaaacaggcttgccctcgtgcccctttgaagctggccctcccacctgggcccagcctgccacctccccagcccctccatgtgccctgcaggcttcgggtccttcgtggacaagaccgtgctgccgttcgtgaacacgcaccctgataagctgcgaaacccatgccccaacaaggagaaagagtgccagcccccgtttgccttcaggcacgtgctgaagctgaccaacaactccaaccagtttcagaccgaggtcgggaagcagctgatttccggaaacctggatgcacccgagggtgggctggacgccatgatgcaggtcgccgcctgcccggtgaggccgctgcccctgcttgggtccccacgttcccccagtgtggggggctctgtcaggcgctgtgtgggggcaggggggtaccctggccggcaggtcgtctgagggactccagcctgggcctggggagagcagctcctcaccctgctgctgcccatgcaggaaagggcaggaggaagggagggtgaccacgagggctcgaaaatcatgcgctgatttcattgtttgctgtgagttaaatttgtgaccctgggcaaaccttatgaagcctaaacattttgcgagcggccaagggtggaacagggccgctaggcagcaggtcccgtggttcctggggtggaaccaccctcctccctccaggccgggtgggcgctggctgcccagtgtgtgtcgctctccacgtcccgcccacccagtttgtgactgtcagcctaacagagcagccacagtccctgggccatgttgaggccacatgcactgtcctcccctcacaacccaccttagctctcctgcttccctgcagtcccagcgcagacacactgctcacgagtgtgaggtcacagcctaggacacgcacggcccccacatgcgcctgccaggggctgtcaatggtggactcaaggcctgctgggcccctcaggctcgttttcctccatgttgcactcgttctgcgtgtggcccacacgtctgcgagggtttttccccttggggatggtttcctgagggtttgttcccagctctgaagtgcagggaccgcagccgtgtctctctccttgcctttccacacgtgcctccactccctgcgcctcacatgtgcacggggtgtttgagggccgttgtctcctcctgggcgtggcgtctgggggaacacagctgggtccctgagacccaggggaaagggggacccacaccagcctccgggccaccccaccagctctgcatcgtctcctctgctccagagggccgggtctgggaaactgaggcaggtaaccctgccccccacgccttcttctcaggaggaaatcggctggcgcaacgtcacgcggctgctggtgtttgccactgatgacggcttccatttcgcgggcgacgggaagctgggcgccatcctgacccccaacgacggccgctgtcacctggaggacaacttgtacaagaggagcaacgaattcgtaagtccccaccccaggcacccaggcaccgcctggcaggacaccactgacggaggagacaagggtggggtctccacctgacagagcctccttctgacccaaggagcagattcctgaggaaacttctggaagccccaagtggcagcgtggggtctccccggactggcctcaggccaggggagggtagggttggtgggggcagccaggctgaggcccggcctcgcccttgtgggacacccaggctctgttggtctccagccccactgcccccctacctgggctgacagctgctgtggaggtatagtaaccgcccccaggctacggctgcaccctgccgtccccgcctctggccagggtcccatccccaagcatccgcctcctccccctcccggcctccactgtacgttccctgctgcccctgagtccgcctcctccagtgtggcccctccctgcccccattgcctgagctgggtgagcggctgcggggaccatgaggaacatgcagggagggacagaggcgagaaggagcccaggatgcacgggttaggatgagcctctctgcggaggcatctcaatggctcagaggggccaggacttctggctgggatcagccgtgggccgagaggcaaccactggtcacaaggggcttgtcctcgctggccgtagtgcgacgctcttgcagcctgacgttgtaggctctgggggccgcaaaggactttagagatacaagactcaggtcctccgccgggagccacagacgggagggacggccctcgggtcccggaactcgggtagggagagccgcacctgacactcatggcctctaccgaaactgagtgtccctcagtgcgaaagcaggtccaccgtgtggggaaggctgggattctgcccccgtggacatccccagtcccacggtgagacgcctcaaatgctgctcatgcctggactctgaaagcccgagtctatgcacacattgcccagagggcgtggcagctctctgccctgcactcctgcgtggcagcctctgcctctccagccttccccagagagggttcgaagcacgggcagggctgacgctgagcggggcagacaggggcgggtacctggaagccttgtcctggactcggggccaactgagcaggacctcctctctccaggactacccatcggtgggccagctggcgcacaagctggctgaaaacaacatccagcccatcttcgcggtgaccagtaggatggtgaagacctacgaggtgagtgctgttgggtcccgagcatccattgggtgggggcatgtttcagccacaggccagacccagcgccactgcaggtctgagcgccacctctgcatgctgggcacgtgagcaaccagccggcccaggtcctggatccccctaggtgaggagcccgaggcttcccgtcggggacaggacgcctgcgtgtcgataggaggaggaattcctccccgtccctgaaactcagctgtgttaacagcatgtcttggcattggtgatatttctgttttttcctggaatacaacacaattctttattttatggaaacacacttattttatgctcacatacatttgaacatcaacactctccgtgaagataaaattacacaaaaacgttcacaagcttggagtgcggagtgggatgaatttcacgaaggaagcacagctgataaccagcctctgctcctagaaaaagaggcccccagtgaaacacgttcatcctgcatttccgctgctagtgccatgtgttcagcctgagcaggtcagtgcgtcaagacgctcaggtgctgttggggttcccaagacctttctcaggatcagtgatttgccggaaggacttgcagagctcaggaaccagtaaactcacagttacagtttattgcagagccgaccctcctgggtgccagccgctgcccgaggtgggaggatacagacaaaagtcagcaaaggtcaaaggtgcacaggagagaaaccaggcaccagctcccagtgtcccctccctgcaggggtgtgggcggcgctccatcctcccagcgatgatgtgtggcctcatgcacagaacatggtccccaaggaggctcttgagcctcggtgtctactgggggtcagtcacagcggcgcggctgacaccccatggctgacctcagtctctagccctccagaggtcaagctgaaaactgtccagggccccaccccaaatcacactgtgggactatccggtgtgacctgaggccccaggaacaatgacacccccatcgggtaggatgtaccaagggctcagaggctacctctcaggagctcagccggggtctaccactctttggcatgtgtggggtgtggccagccaggcctgctgggtggagccctgactgtgtaacagggattcgctagaaggaaggaaacactgcacgccctcctgaaaggagcctccgcccatagcagcctgcacagtgtgtggccctgaggccacagggacagaaggactgagctggaggaaggaggtggttgtcattgtactttacacagccacgtgccccgttcttcagggtggagctggaggaacgagatagttgtcattgtactttacacagccacgtgccccgttcttcagggtggacagggccctgggtggctcacctcacacccagctctgttacttaccacaggacgccccaggcccttccttaccccgagccctcagtttcctcatctgtgaaaggggtagtggtgcccggcgggcagtgcgtcgtgggtactgagctcacccactcagggaattcacagagcagccgccctaaagggcccgattatcctcatccggacagtgaccgacctgctggccattccagggccatcaccgccatcttcttcaaaatggcacgcaggaaaccagggccccctcttccccctgcctggggctctgcccagctgggcagcctcacagcccctgccctgctgcttaggctgaggagacatactcggggtttggggaaggaaagtgcccgggagggccgctgcttttgtaaagtgaacatttgctgaactacagggatccattgtcaggcccgtatcccagctacaagctcaacctcgtggtgtgttggggccgacagcgagaccagcggttcctgccataggttccccgggctctggagtgggagcaggaccctgcgggagacacgggatgggggcaggtgtctgggggaccctccgagtgggcacccagagctggtcaggctgccgggacagtgggtcagcgcagggcagggctggggccggacatccacagagaccacctgctggtcaggatgtcacagccctgtgtcccatctgtaggtggccatgacggtcccctcctcaccagcagtagcaggtcccaatcctttgccatttgtcatggcagccagactccaggcgatggtgtggcaccagggccaggcactggaggcaggtagagtgcaccccatgcctactgctgagccttggggcacacaagccttcctcagcctttcctggtcaccttcgggggtggtcaaggcaacaggcagcgagtgtggacacacgtgccacgccccctccgagtgtgtttctgcaccaagcgcacagcaggctcagcaggacaggatgtgggagggcccagctctcccaagacagggatggccccagactgggacggatggaagtgggcggtgggcggagggcgcagaggagggtggtggccaggctgtgaccggccccaggagctccatggaagggactgggcccatgcagggcagtcatgggagggtttgggcggggaggtgacccgaccatctgctccgtgttcctggaaggtgaaatgatgccgcaatcttccatgaaagaagctgagcatgtgtgagcatgggggaggctggctgcgcccctgtgcatctggccggccagaaccgatgtcaccgggctgtttaacacccatggaaactcagtagagtgccaagagccgatggcttcctggtgattttactgtgatccaccctcgtggggctacttccgcctaccatctgtgtggtggtaggaattccctacctgtgtggtggaaattctggccaacactggccaccatgcacgtcctcccaacccagtgatattgcgagcttgaaatccaccaggcaggatcactcacaccacaggcaggagtactcacaccacaggcgggagcagtcacaccgcaggcaggatcactcacactgcaggcgggatcactcacaccgcaggcgggagcactcacaccgcaggcgggatcactcacaccgcaggcaggaggactcacacgggcaggcctggacaatgctgcagctcagggctttgctttcttttcttatcctcatgatgcaacagtaattttttttttattttttatttattttattttattttatttatttttttatttcatttcatttcatttcatttcatttcattttattttattgagacagagttttgctcttgttgcccaggctggagtgccatggtgtgatctcagctcattgcgacctccgcctcctgggttctcctgcctcagtctcctgagtagctgggcttacaggtgcccaccaccacgcccagctaatttttgtatttttagtagagacggggtttcaccatgttggccaggctggtctcaaactcctgacctcagtgatccacccactttggcctcccaaagtgctgggatcacaggcgtgagccatcatgcctggcctgggttttttttgttttgttttgtttttttgagacaaggtcttgctctgtcgcccaggctggagtgcagtggtgcgatctcagctcactgcaacctccacctcctgggtttaagtgatcctcctgcctcagcctcccgagtatctggtactacaggcatgtgacgccacaccactctaatatttgtactttttgtagagatggggtcttcttatgttgcccaggctggtcctgaactcctgggctcaggcaatcttcccacatcggcctcccgagtactggtattccaggcgtggcccctgggcagctcagggctttttacccccaagaacctcttaccacacatcactgaccacacactctggggaccaagtgcaaaactgcgttgaggaccgtcccagccattttgcaggtgcagaagcccctggggtgagcccagtgcgtggagatgccgtggcacaggtcctagccgtgccatgtctggtcttcttgcccaacagaaactcaccgagatcatccccaagtcagccgtgggggagctgtctgaggactccagcaatgtggtccaactcattaagaatgcttacaatgtgagtctcccgcaccactcagctgggacccatggggtggccagcaatctccccactgcaggtcagctcctgctgcaggtcagcaggagggtggtctgggaggaaagcccctgccccgtgggccagctgcagcctcccgacctgccctcaggcctccaggacaccctggcccggcacttccacggggagctctgggtcctctctcgttgatgttgtgggcgatgctccctgaaacctgagctccggactcttcattccagactcttctctgcgggtctctatggagaagggaggtggacagctctggtggcaaacagtgcagctggggcaggaggaggccacaggaaacccccacagtggacttgggccctgggaagacaccctggggggtggaattcctcttgctctgttcacctgtcctgggcaagctccagagaagcccttaacccctgaatttctccctggtgcacggcccatcgagctgcaccctgggctgctcccctggggagcccatggccctggtgggcataggtaggcataggtgcgcactaggtgccattcagggccccaggcaccagaggtcccgactgctctggaaatctacccccaggtgagagatgttctcagaattctggcctggatccttctaggccaaaggtcctgctggcttgagggagctcagcacgttagcgcctccgacaaacgttgggtcattgaattaaactgaaggcccgtggaggaggtgccatttgcttctcgtagcctcccgtgagccccaaacccccagagcagaccctcctgggtgccagccactgcccgaggtgtttctgtccttacacagaggatgcaggtgacgccactgccctggccattcacccgatgcccctatgaacctgtccctctgcctcctctcaatttccgtctgtctctcagtctttgtctctctttctctgtctctctctgtctgtctctctctgtctctgccccatctctgtctgtctctgtctctgcctctctctgtttctctccatctctctgtctctggctctggctctgcccatctctgtctgtctctgcctctctctgtttctccccatctctcttatcgcttgaacaatttatgcagctcctgccctgtgctaggtcctggggactcaaggctgaggagcagcagaagctcccacccctgaggctcacaccctggctccatgctagtccctgtggtcaggctgtctcgagggcaggactgtggccctggcagccctgccatcctcagcacatcctgctgtgctctcctctgtgtcattagctgacactggggacttgcactgagaggagaagtggagacgggtctaaaccgctgggccaggcagggccaggacaacagaaacactcgcccccaagagtaaccgctctctgcccgcagaaactctcctccagggtcttcctggatcacaacgccctccccgacaccctgaaagtcacctacgactccttctgcagcaatggagtgacgcacaggaaccagcccagaggtgactgtgatggcgtgcagatcaatgtcccggtgagcctggccacaagggtccccatcccagcttgctgaggggctctggggacagccagaaggagccagggtccccatcccagcacactgaggggtcctggggacagccagaaggagccagggtccccatcccagcactctgacgggggcagggaggggcacacaggcatcagaggctgtctgggagcaggcagcatccactggaaggaccctgtttctttccttcacatcctctctgccgaggccagacgctttccttgtgaagctgatgtcaggaacgtcagtgagagggtgccgagagggtgcttctcagtgagagggtgctgggagggttcttcacacacgccttggcccccaagagtcctactcatcaacctggagcccaaatccctgggtcaggccactgcagactgagggatggagtgatggctgcgccccctgggggcagacgccggacacacagaacaggcgcaaacggcaaacctgggtagggttagttgtcatgattttctgcgtgtttcattctgtttttttgacagaaacattaaggcatgggccacacaggtggttaggaatggacactgagttccttctctaatctttcaggtttaagtttattatccaatcatttgttgtttctttttgttttttgttttttgtttttttttttgctagctgtgaaataatattcagcaagacacttgctttcattgcattttcttaatatgactttggaattccttcaaacatgtttcttggtaaatgttgcctgtggatttttttttttttttttttttttgagatggagtttcgctctgtcgcccaggctggagtgcactggtgcgatcttggctcactacaatccaagtgattctcctgactcagcctcctgagtagctgggactacaggcgtgtgccaccacgctcggctaatttttgtatttttagtagagacagagtttcgccatgttggccaggctggtctcaaactcttgccctcagatgatctacccgcctcggcctcccacagtgctgggattacaggcgtgagccgcggcgcccagctgtcccatggattctcaccagaacgtttccctcatgttgggtggtctgagtgggagtgtgctcagcttctcctgatttgctgtctgcgtgtcacatgtctctgctgatgtgtggccggggagatcctggtgccggccagtgcgggagtgcgggcagagcacctccttgccggctgactttggctctcggatctgagcatcagctcttcctgctcctggtcaccccttcctccccacgctgaaccccccaggacccctgcagaggccaggaggtgagggttgggagctgggctgccaccctggccaccgagggtccccacctgagcccagcactgccctgcagatcaccttccaggtgaaggtcacggccacagagtgcatccaggagcagtcgtttgtcatccgggcgctgggcttcacggacatagtgaccgtgcaggttcttccccagtgtgagtgccggtgccgggaccagagcagagaccgcagcctctgccatggcaagggcttcttggagtgcggcatctgcaggtgaggcgggcgcaggtccctgttgaaccatccccgagccccaccccacagggcaggtgtcggcaggtgaggtgggtgcaggtggctccatcccttcccccaccccacggagcaggcatcctgggggcccccttctgcaggaggtggggagatttgggattggaacccagaacccctcggcaagccctcacccgtgctcctgagccagggcaccagcaatgccagcctgtactctacactctctggccatggaggacccaaggcaggggacttgtgggcaggaggaccccctcaccagaggatggaggcccatctcaggggcacaaggagtccccgctgggcgtgcccatggccttgagtgggtcactttctctgcccgaccttccttgaccctaggagctggcttctctctgaccttggggacccaaggccatcaggctggcagccctggggcatgggtggctagagagcctcctgggacaggtgatggcttctgggagcctgggccccataggccacctcttgggcgtgcacaccccctgccaggcgtgggcaccccacctcagggagaagtgggggacaggtggacccagtggggaggttcacatggcactcagccaggcggcctgcccgggggctggatggctgtccccctttccttgcttgcctggccagagctgctaggctgacctcccaggactctgccccctttgctctggtcacctcctcccctgtcctgaccgcagtgccaatccacgtcctggtggcagtgcccttcctcaccttcaggtccctgctgcccccagcctcctcccatatctcaggacaatgatggtctctgtggtcttggtggtctctgttgctgtcctcgtgcctcagtggccaccccgcccactgtcctgggtgtgcagccctggggcggcctcttcacgggactgtaggggtgactcagtcggaacacttggcaggtgtcggggggtgccctgccacaggtactcagacactcggtcctgcagcttcctcctctggggagcaggagagcccgtggcagtgccgtctctgaggatgcctcagggtgtgtgtggctcctgcctgccagcggcttgatgccagcttccacatctgtaaaaaccccttgtccctgcattctcccacaacctggcctgtcagtgcacgaacgcaggagggagggcggggctgtggcaggaggcagtgccgagtccccactggccaccatgtggggcacgcaggagcagacaccagccactcacagagcaccggtatcgcagcacaggccatgtgcatggctgcaacacagctccacagtgagcctgccgagccactgcatgcgcaggccaaggccaggtgtctgctttcccctcgggacatcctggggagggaacgcggggcccctgcacgttttgagcacatttagtccgtggcaagtgctcagtaggcctcgaggaaagcaaaatgtgccataggggtgttctccaccaagggcaaggggcctggaggacagggcggctgtcccttgtcccacatcactggggggagcctgaccttggggcccctcctgtccccaggtgtgacactggctacattgggaaaaactgtgagtgccagacacagggccggagcagccaggagctggaaggaagctgccggaaggacaacaactccatcatctgctcagggctgggggactgtgtctgcgggcagtgcctgtgccacaccagcgacgtccccggcaagctgatatacgggcagtactgcgagtgtgacaccatcaactgtgagcgctacaacggccaggtctgcggcggcccgggtgagcccgtgggtccctgctggacaacggccgtcctgcggcacagacttggtgttggggggtgcgttctggaccattcaacgagtggaacagaaaggggggatcctgaggacagacagtgcaagtctcgcccagccaccgggcgtcagcaggaacttggatggccctgcaccccgccctgcctcagtttctgtgtccatgaggacaaggcgtccttgtggggagggcccacaggaggaacggtcatagccctattgaggtcccattcacagcagggcaggggaggtccagactggccaggaggcggccacgtggctggcgggggcagaagggcctggctagtggccccatgccttttgctcaggaacatcccccaggctggaggaggcaggcgggccggagggagcaaccgcagtggggtttcgggcgggtctcggttcccaggccaagcaggagcttagccgtgctgccccgtcttccagggagggggctctgcttctgcgggaagtgccgctgccacccgggctttgagggctcagcgtgccagtgcgagaggaccactgagggctgcctgaacccgcggcgtgttgagtgtagtggtcgtggccggtgccgctgcaacgtatgcgagtgccattcaggctaccagctgcctctgtgccaggagtgccccggctgcccctcaccctgtggcaagtacatgtgagtgcaggcggagcaggcagggcgggcagggatccccactccccggccacctacccagcagccgggctcactcggggaccccagtgagcacctctgcaccgcggggttctctgcgggtgcgtctggactgaggggccctccgcggccgccgtgcccctgtgtccctcctccctcctgtgcgcacctgccgcgggccctgggatcaggcttccagttcacccgctgcacccgcatctgccccacttgggccccctccttggcctgagggcgccccaaccccacctgccccccctggtggacacacacccaagcccgagcccccgttgccggagcccccgcacaccctggcaccgatgctcacacctggctccccgcagctcctgcgccgagtgcctgaagttcgaaaagggcccctttgggaagaactgcagcgcggcgtgtccgggcctgcagctgtcgaacaaccccgtgaagggcaggacctgcaaggagagggactcagagggctgctgggtggcctacacgctggagcagcaggacgggatggaccgctacctcatctatgtggatgagagccgaggtgaggccgctggggtgcagcggggaccggctccagagctccggctgcggggtctccgcagaggcgagggtggtgcggaaggaggatctcacctccagtgttgtgggcccagcagggtggatgagccatgcgggatgcccttggcattgcaaggaggccagaggccggtcccctcacccccagcagcctcccctttccctcccctcctcacctgaccccacatcaagctgggcagcagacggcctgctccctgggggcaccactgctccacaccgggcaggcccaccagcatgccacacggcccgggccatctcccgctggatgcctcatggggcaaggcttgcagttgcaggtccccaggggtggcccgcggtcaggttgctgcgtgaggctcctttgaggggattgggagatcctggtgctcggctctcagccctggaggggcccagggccaccaggcaccaccgtccccatcactcgttcggctccagtccagtcggaaccagtcccagccccacagtgaccttggtggcactgaccctgtctcattcggctccagtcggaaccagtcccagccccacagtgaccttggtggcactgaccctgtctcattcagctccagttggaaccaggcccagccccacggtgaccttggtgacactggccctgcttcttcaggtctcatgttccacaggctcctgagaggcagaggggctggggctggggggccgctggcggactccatcaggcatggccagcagccggccaggactcttgcagaactgagacctgggagctcctccctcaccaggaagggacccgaggcaggcggcgggggtctctgagcctgtaggtgacatgcctggagctcacaacccacatgtgggcctggggctgcagacccccacctgccagggcaggaacccctgcgggccactttgagggacagacttgggtcacgtctggtttgtgcaatcctggccaagtcacttcacctttgaggacaggtgaaggaaggcaggtcccccaggaaaggcaggatggcaggagggggcacggggagtgagagtgcaggtcaggatggcaggagggggcacagggagtgagggtgcagatcaggatggcaggagcaaccacagggagtgagggtgcaggtcaggatggcaggaggggtacagggagtgaggatgccagaccaggccagggactgcactgaacgctagtgtctgtcccagggtcagcagctgtgggcctggcccactatggcccacagtccccatgctcaggaggtgggcacagctgccgtgggaaccaggaccttgcgttgctcatcctggcaccggcctcacctgctgagctctggtctctggtcttgtccttgacgaccacaaatcactttcacagtatggggagtgaactccagcagggaccctgagcctggttctgaactctgctgtaggagagcggggtccctcgcactgtgtcctaccccccagtattagcactctgtcctggctgcccggtaccctggccctgccttcttctctgtcagcaggggtggtggcaatggcccttaggtttcatttggaaccacagggcctggcctggaatccagcaggggctgggccaggttctcactgacccctggccatggtgatggatggtgagccggggccctgggaacctccgtctctctaagtgctgtgttgtggggtgacctcggacctgtgggcacacggctcagtgagatggggctggactgacgctcaggtgtgctgcttcttccctagagtgtgtggcaggccccaacatcgccgccatcgtcgggggcaccgtggcaggcatcgtgctgatcggcattctcctgctggtcatctggaaggctctgatccacctgagcgacctccgggagtacaggcgctttgagaaggagaagctcaagtcccagtggaacaatgtaagtggccgtccttgggggtcccacgcagaggggcacgtgcgtcccacactatgcgacctcctgctgcgggaggccgtggacacccgtgtgtggctgcaccccggcctccccaggcagcttgtcctctgggcgtccgccgctgtgggtgagcttggctgccggtgctgggaccctgggggggctgccccacgtctagctcttcctcaaagtgacggcttccatgcggggagtgtcctcagggagaaagattctgctctgaaaacctcccacactcacaagcccctgtttgcatttcccaccaggataatccccttttcaagagcgccaccacgacggtcatgaaccccaagtttgctgagagttaggagcacttggtgaagacaaggccgtcaggacccaccatgtctgccccatcacgcggccgagacatggcttgccacagctcttgaggatgtcaccaattaaccagaaatccagttattttccgccctcaaaatgacagccatggccggccgggtgcttctgggggctcgtcggggggacagctccactctgactggcacagtctttgcatggagacttgaggagggagggcttgaggttggtgaggttaggtgcgtgtttcctgtgcaagtcaggacatcagtctgattaaaggtggtgccaatttatttacatttaaacttgtcagggtataaaatgacatcccattaattatattgttaatcaatcacgtgtatagaaaaaaaataaaacttcaatacaggctgtccatggaaa

SEQ ID NO: 234 - DNA, 10500 bp, Homo sapiens
acttttgggacatcctgttctgagtcaagattcctccttctgaacatgggactttccagaaggaccacagctcctcccgtgcatccactcggcctgggaggttctggattttggctgtcgagggagtttgcctgcctctccagagaaagatggtcatgaggcccctgtggagtctgcttctctgggaaggtaagtggggcaggcagatagcctgtcctcggagagctgaaggcccctccccagctgcctatgccagacgtctgggcagggatccctcgacctgggtgagaacccagaagctgagggtgggtaggaaagactagaacaagctcttgggcaacattttaagctaggcagatacaaagagatgcagggtcctgggagggaggaggtggcagcttgaggggtattcttatctgtgagacatgagctgttttgtggcccagagcagtaaaaacggagccagtgggtgatactgctggtttggagagaaagtcggctgtgagaatggtgaggacccggcagtgttagcatgcagaaactctgcagagtttgaggagagtagcagagggcagggcagagcagggttccccacaatcagcagagtgtgttttcaacagcctgtgggggagctgaggtccctccctacaggcctttataaggggaggcaagtactaagtagggatgagagaggctaaatgtggcccacgtggacttaggggtggccgacggtggtgtgatgttgggatggctgatacacggggtctcctccacaccgggcgatccctctatccatctgatgcctgagttcccttccttggtcaacaagcagccaacatgacatgggtcaacactgccgggccatggatgagggtttatggggtgcagcaaagattaagatgatattgtttacatcagaggctcatagggactttgggttgctttgtttcatctccttgcctgagttcctggccctgagagctccaaagcctgcagatttcttcaatatttctaaacatgtgcaggaaatcacaccttaacctcaaaaaaggccttggtctgtttggtgagacaaaaataatttgccttttttttttttctttgagacggagtcttgctctgtcacccaggctggaatgcaatggtgcatctcagctcactgtaacctctgcctcctgggttcaagcgattctcctgtctcagcctcctgagtagctgggattacaggtcactgccactaaacccggctaatgtttgtatttttagtagagacagggtttcatcatgttgaccaggctggtctcaaactcctgacctcaagtgatccgccctcctcagcctcccaaagtgctggaattacaggcatgagccaccacacccagcccaaaaataatttttcaaatggcccttaatgatcaaagatctgtgtgactgacctggtacagaccccttatttttcagtggtactgaagcctggggcagggtgatgtgtggaagggcacacagctgatctgtggcagcaccaggaggagcaggtaggagcagctaggtcttggctgacatccagtgcaattctctttgtgtgttacattcctgctctgcattaacactgaagtcatctccagtgtgagaggaggttgttgggcctggaggacagtgaggcagagggggaccggaattatcatggccgactgagcaaccatccagatcatgtctcattgaccaaaacttcatcacctcttattcttccctacaccctgtgccagcgacaggcatagggtcagtcctcagcagggtaggtcatttattcaataccatttactaggcttctcccacagtctgttcttaaacagtggtgggcactggaagcaaacgatggggagaaagagctcacggtctagtgggagatgctgactcataaacaggcaataagaatagagggataagggtagtcagcatggtggccccaggccactgtgagaacacaagagagaatatgtaacctctcttggttacattacctatgagggataggggaggtcggaggaggcagtgatgctacaagagtgggcagaaattagtcagcaaaggagtcaggggggcacttcaaggagaagcgtctcccatacacgtctgactcaaatatagtcccccaaaacagcatcttgctttctcaccccctgtctgtttctcctcctgttctggatcacagagaataacatccagtggatcccaaggacctgggagccgtcctcgactcctttttctccttcactccccagagctaatctattaccaaatcctactgattacacaccatcttcgtgtttctcaattcctcccacttcttcccatcccggttgctcccttcctcaattcaagttgccgtcacttctccactggactaacatgaacagcctaagtcctgcccacctccagtgcattctccacatccctgctggagtgatctttctaaccatgcatctaatcctgttacgctcctgcttaaaacctacctgagacgccccattgctctacagataaagcccaaactccagtattgctttcaggtctctgcatgatctgactcctaccaactctgcagtgtaatttcctactcctcacacagagaactactctcagttcccctgggcaccaactctccccctccaggcctttgtcagtactgtgccctctgccggtgacacttccctatcctgctccaggccgccctcggcttggcctggctgattcccattcctcttcaaggctcagcttaacaatttgttttctgagcccatcaaggctgggtgagatcccctgtcaccctacctgtgttctcccagggcatctcatttttcccttcatggtatttaacagaattcatttttattgatttcttgaatgtctggcttcctctgtaagttccatgaatgcagagactggggttatcttccatatgttttatccctggtacctagcacagtgcaacctcaacttgagtggagggaatgtcagtggaggggccccaattcaccctatagcagctcagatgcatgcaaagaaggatgaggagtgtggggcaggcagagtgaccaggggctctgttctttcagccctacttcccattacagttactggtgcccaagtgctgagcaaagtcgggggctcggtgctgctggtggcagcgcgtccccctggcttccaagtccgtgaggctatctggcgatctctctggccttcagaagagctcctggccacgtttttccgaggctccctggagactctgtaccattcccgcttcctgggccgagcccagctacacagcaacctcagcctggagctcgggccgctggagtctggagacagcggcaacttctccgtgttgatggtggacacaaggggccagccctggacccagaccctccagctcaaggtgtacggtgagtgtgtctgacactggctgcctggccctcttcccccacaaagcaccagacgagcatcctgagtcatagcagccagggagagctgggttccagaaagctctggtctctgaccatgttgccgactcagggaacagctgctccctggcagtcacgtctaagaaaattcctcctggctgcagcagccaggctttgccatttcacagtgcttgcctgaactctagctcagtcttttcttggctcagtggccttggacacaatgcttagcctccctggccttcacctttctcctttgtaaatgggcattgtaatattaccatgtagagtacccacaggatgaaatgcagtggcatttgcagtggcatccaggacagagcctggcctgtgcttcctcagttctaaaggatcatcatagactataagatgtgccactagtctatgtagtctatgtagtctgtgtagactatgtgtcattagtctaaaggaaaaaaaatgatgtaccatactaaactatgacataatgggtttatttaaaaatcaaattataatgaaactgtaattaaaagtatagaatttacacatttcttaaaagggcttcttagagagatcttaactatatatgattcatgggttctctcagtcattcatcattgcaaaacaaaccatcccaaaacttactgactgaaaacaacaacgatgtttacttctcataattccgtgggttggcaggcccagctgggtgcgacttctgcttcgcatgggtctgcagagccattcgcgcagctacattcagcacctcggttggctgcatggactgggggctgcgtgggccttgtttcccaacaactccacctccacctccaccacagccacctccaccaccttcatcatttgtcttctggtcaagaaagagtggctttcagctctcatttatctacctaatgggctagaaaagaggcatgggtgaccctaaatcactgtttcagtaaaaccttagaaatttagatagagtggaagagaggggagtccagatttaagaatggaaagcagaggtagcagctgggaagagggtagccatgagggagataaagattgtaagcaaattggggagatgtcttgaatccccccgagacagctaactggctgtccttgggcgagccactcagggtgccgatgcaattgcaaggtgcctttctggatgcacgcagccctgagcctcatcttggcaagcagagtgctggctggatttcagcaccccccaccccctgccacctgttaccctgtgaccccccttagcccaatgtccttgtgtagtgaataacctaccccaccatacaggcagccctggagcccctcctctgatctgagtctcagctgccgcacatgtgaaatgaggacattgaatgtgataatacatgcagcacccacaccactaagctctaaaatgccttgttctcagcagctgaattacagattttaaggaaattgctgttttattgcttccaaatacatagcgtgattagaactaattgcacgaagctgccaagcagccgtccttaggagttctgctttgacaatagataagaacgatttgaattagcagatcagttactagaaatgtcaatgggtgtttctactgtgcttgatcgtgtttggaagcagcttgtcctcttaagtgatgtaaatatcccccctgtaatctttgtttatactattagtgtgcccagcaaatcatttctctttcatatcacaaatcccaccagactgaactggcattaacgaggtttttctctgcttgactttggaatgctgtcagagactgagccctcctgttgtcaccagaatgctctcccactggcctcatttccactgagactcaggatttactcatcaacctgtatagaaaggggaatccatggctaggacaccaggatatcagtttgttcagtgaccagatatcgagcacccactatttgccagcactacagagctaagtttactaagctaacaagacagagcccccacctctgggcccctccttcacagcattttgcaccctcataattatttaattaattattcataatcattttgtatttgtctttctcaccaaactgtaagctccagaaggctaggaatgtgtttgttttcttgcctgacttaataaatgcttgtcatctcttgttgactgactgacatattgtgagagaaatactacaaaaagagatagagtgcttggagagctcagagccatgcctgggaaggcttcacagtcaaggcattaagcaatgtgttcaagctgggccttgaaggatgggtagaagttttctaggaggacaagaagggaaaggcatctgtgtgcgcagatgaattatgtgaaagcatgaaagatattcaagagcatgacatgtttgggaaaactgcaaattaattaggatgagcagggagaagcagcaggaggtacagctggagagatgggcatgaatcgtttcctgaaaggttttgaatatcaagctaaggaattcagcttctgtcctgtgggcagtggaaagccagacaagattttggaacaagagaggcctagccagaggtggcatctaaccctgggtagatcccagagccagagatgtgggccctgcccagcatccctgagacccataccagctgtacttttctttcccagatgcagtgcccaggcccgtggtacaagtgttcattgctgtagaaagggatgctcagccctccaagacctgccaggttttcttgtcctgttgggcccccaacatcagcgaaataacctatagctggcgacgggagacaaccatggactttggtatggaaccacacagcctcttcacagacggacaggtgctgagcatttccctgggaccaggagacagagatgtggcctattcctgcattgtctccaaccctgtcagctgggacttggccacagtcacgccctgggatagctgtcatcatgaggcaggtatgctaagggccagcagtcagtggttgagggcttatgaagcatcaagtccacctctaaccccacccctccatgttcagcaccagggaaggcctcctacaaagatgtgctgctggtggtggtgcctgtctcgctgctcctgatgctggttactctcttctctgcctggcactggtgcccctgctcaggtaggagtcctgcaggtgcaggaggtaggtggaggaagtggagttcctggggaggagggggtcttggacctcctcctatttaggcttcagatggtctgccccttcctacctctcccacctcatctcttggccttctctagctcatatcttggtttacaaccagactcaactacttgaagtctcttatgtggttctccaaatgaactgttctctcacatccatctgcagacctttgtacattgtattccctctgcctggaacacactttccatgatttcccacccagcctccccccttcatgtggctatctcatactcagtcttcaaggtgtgcttgctccagaaagccttccctgattgccccaatactcaggctgattaacatcctttcttcaatctccattgcttaccccaatcagagaactacttacatttacttccccactgaattctgagcccttaaaaggaggatgctgggtcaacactgggcatgtcagtggttcccagaacacaactcttcctgaaacatagctggtatcgacaaacattgttgagtgggagtctaaatgactccgaaccccttcttgcctgagatttctacaaaatggctccctaagataagctactccctggccagtggctgatagggttgccttcttgagaagaggaaggaaggggaaactccaagatcagacctggttctaagctctacatacagctcagtcccttcctctgccgcaggatgccctgcccctgaaagaactacccgactgaccagggctccgtggtcatttccatgccaggctgtcggagctggcttgtcccaaggtggagaaagggagtcagcaaggaggagtcactgagccctcactatggtgggtgtgtcccagaaggcagggtctgggtccagcctctaagcatggggacaggcaatgctgattcctgttcattctctccagcagagagaagggcaagagggaacagctgagcctgcactccacctgaaggccccatctgctgtgggagggtattgccctggcccctggcccctggcccctgccccaagagtccccaggatttgtgataagaaagtggaagccaggaaaacagcagggaaaaaatacctttattgagatataattcacatagcatacaattcacctatttaaagtatacaattcgatgccttttagtgtattcgcagagttgggcatccaccttcacaaccaattttaaaacatttctattacctcccccaaaaccccataaccccttagccatcacctcccaaatcccccattcctcccacagcactagtctgctttctgcctctatgcttttgtctttcctggacatttcatataaatagaactatacactatgtggccctttggccaggcttttttcacttagtgtcatgtcctcaaggctcataaaatagcatctttggccactgagaagggacccaacaacctgggatagtagaaagctccatgcagggagtccagaagctggttctggctctgcctcatggcttctgtccagtgatttaactgggtccaccacagtcctaactttccataccttctacaattaaatgtatggcatagttgcaggccaaggttagatactaggaagaatttcctattcttgaagagcctccctttccagggtgttggaagaccaggagaaatgttcctttacctaaggtgaccttgggctaacacactgaggattcagaggcctgcaggcaggccaaggattccaagactccaaacactggaggggtaactttctttctgatgtccttaccagggaaaaagaaaaaggatgtccatgctgacagagtgggtccagagacagagaacccccttgtgcaggatctgccataaaggacaatatgaactgatgcctggactatcagtaaccccactgcacaggcacacgatgctctgggacataactggtgcctggaaatcaccatggtcctcatatctcccatgggaatcctgtcctgcctcgaaggagcagcctgggcagccatcacaccacgaggacaggaagcaccagcacgtttcacacctcccccttccctctcccatcttctcatatcctggctcttctctgggcaagatgagccaagcagaacattccatccaggacactggaagttctccaggatccagatccatggggacattaatagtccaaggcattccctcccccaccactattcataaagtattaaccaactggcaccaaggaattgcctccagcctgagtcctaggctctaaaagatattacatatttgaactaatagaggaactctgagtcacccatgccagcatcagcttcagccccagaccctgcagtttgagatctgatgcttcctgagggccaaggcattgctgtaagaaaaggtctagaaataggtgaaagtgagaggtgggggacaggggtttctctttctggcctaaggactttcaggtaatcagagttcatgggccctcaaaggtaaattgcagttgtagacaccgaggatggttgacaacccatggttgagatgggcaccgttttgcaggaaacaccatattaatagacatcctcaccatctccatccgctctcacgcctcctgcaggatctgggagtgagggtggagagtctttcctcacgctccagcacagtggccaggaaaagaaatactgaatttgccccagccaacaggacgttcttgcacaacttcaagaaaagcagctcagctcaggatgagtcttcctgcctgaaactgagagagtgaagaaccataaaacgctatgcagaaggaacattatggagagaaagggtactgaggcactctagaatctgccacattcattttcaaatgcaaatgcagaagacttaccttagttcaaggggaggggacaaagaccccacagcccaacagcaggactgtagaggtcactctgactccatcaaactttttattgtggccatcttaggaaaatacattctgcccctgaatgattctgtctagaaaagctctggagtattgatcactactggaaaaacacttaaggagctaaacttaccttcggggattattagctgataaggttcacagtttctctcacccaggtgtaactggattttttctggggcctcaatccagtcttgataacagcgaggaaagaggtattgaagaaacaggggtgggtttgaagtactattttcccagggtggcttcaatctccccacctaggatgtcagccctgtccaaggaccttccctcttctccccagttcctgggcaatcacttcaccttggacaaaggatcagcacagctggcctccagatccacatcaccactcttccactcgattgttcccagatcctccctgcctggcctgctcagaggttccctgttggtaacctggctttatcaaattctcatccctttcccacacccacttctctcctatcaccttcccccaagattacctgaacagggtccatggccactcaacctgtcagcttgcaccatccccacctgccacctacagtcaggccacatgcctggtcactgaatcatgcaaaactggcctcagtccctaaaaatgatgtggaaaggaaagcccaggatctgacaatgagccctggtggatttgtggggaaaaaatacacagcactccccacctttctttcgttcatctccagggccccacctcagatcaaagcagctctggatgagatgggacctgcagctctccctccacaaggtgactcttagcaacctcatttcgacagtggtttgtagcgtggtgcaccagggccttgttgaacagatccacactgctctaataaagttcccatccttaatga

SEQ ID NO: 235 - DNA, 13482 bp, Homo sapiens
atttcctgctcttgaatatctggttgaactacttaagcttaatttgttaaactccggtaagtacctagcccacatgatttgactcagagattctcttttgtccacagacagtcatctcaggagcagaaagaaaagagctcccaaatgctatatctattcaggggctctcaagaacaatggaatatcatcctgatttagaaaatttggatgaagatggatatactcaattacacttcgactctcaaagcaataccaggatagctgttgtttcagagaaaggtatatatatgttttttctaatgtgtgcctttagctctcccgtttgaaaagatataaggggaggctaggcatggtggctcacacctgtaatcccagcactttgggaggccgaggcgggtggattgactgaggtcaggagttcgaggccagcttggctaacgtggtgaaactctgtctctactaaaaatacaaaaattagccgggcatggtggtgcacgcctgtagttccaggtacttgggaggctgaggcaggagaatcacttgaacctgggaggtggaggttgcagtgagccaagatcatgccaatgcactccagcctgggtggcagagcaagactccatctctgaaaaaaaataaaaataaaaacaaaacaaaaagatataaggggagaaaatttgagagcctcgtgatgtgtatatttttatggatatacttttaaaggcttcagatgtcactgaagataaattgaatgcaccctaaaccttttttcatgaaaattattcagtgaccaattattagtgtttaaattaattatgtctgatggcagaaaatagaatttctcttttctatagatatagacatttcatcagtgaggaattggtaataagtgggataatacacaaagataaaggatttctgtatgagtgacttgttgcttgtttgatagaaaggctagattatcgaatggaggccaggaaacttaaagaagtatatatatgaacaacattttttttttgtggtaagagattaatttaaattgtttttaaacaaaaaacaattattggtataccagtgatggaaaatatatgaacatatggtagataaaaacatcccaccagcaggacatgagtcttaaacaaagtgtaaatgaaatgaaatagaaagaagggcattggaggatctctgtattcatagaatgggtgatttagcctactctacgattctcctatgtgacaattctatgaaatgtcctgacagcttagtcacagtggaaagcagaaatacattctggttatggcaatgttcatacaaaattagttccctattatctttgagagagagagatcatttgtcggttttgacaccagagtttgctttcttctgctttctggttattcacactgcacaaatattttcctctcagcactgatgtaattcttttcttgggcaacctattgaggaagcgtggaaaaagtggatgaggcaagaggtagggagacatgcgcatgtttatgcatatgtgtaggcaaacggtatcctgcaacaacacacctatcatgtgctagcagtctctaaacaaggtgcttttatatgtgttagctcgtttaattcccgcaataatcctttgagatattattaccccagtttcacaaagaggaataaaaaacaacaaagggagtaatttgcccagggtcatgcaacaaacatatgaaaagggaaaattacccttagtaatcagtgctatctccccaacattaagctatttcctctaagaatcagtgggatttcagggatcctactaatgtcaagacctgtagatgtcaatgtggaactgaaattaggagcatacagttatcaagccaatgtgccgaaattacaattccagcaattgaagaagaaggtatccttactggtggagaagcacagcaaatcctaggtgaccaggtaacctaggcagtgattaataattcacttaaaaatttgccagtattttttgttgttgttgttggtggtgtgtgtgtgtgtgtgtgtgtgtgtgtgtgtgtgtgtgttttaacagggtatcacttttttgcctatgctgctctggaattcctaggctcaagtgatcctcctgccacagcctccagagtagctgggactacgggagctcaccacaatgcccagctaattaaattttttttctttctttgtttttcttttttttttttggtagggacagggtctccctgtgttgcccaggctggtcttgagcttctggcctcaagcaatcctcctacctcagtctcccttctgggattacaggtgtgagccaccgtgcaaggccagatttttgatgaactgtagaattaaactgccccaccatccgtcattctctttctttattccatttctgccccctctggctcctcaggatcgtgtgctgcatctcctccttggcgcctcattgctgtaattttgggaatcctatgcttggtaatactggtgatagctgtggtcctgggtaccatgggtgagtatttggtggaggagattaacaacagacaatttagtaagcaattattatgtgccaggcactcttttaagggcttgacatgcataatctactttaatttgtatataatctggttttatctgtattgggttggtgctgttaatgcccatttcacttataaagggtgtgagagactgagaggttattttacctttccagggttataagctagttagtggtgggaccatgattagaaatttgggtgatctgtctaaaaaactcatactcttaactacattgctctcctacctcccttacatagctggtttcaaagctgtggaattcaaaggataaattaatgaagaaaacaagcggagctgaagaagaaagtacaatatggtgctgtcttcctaatgaaataaattcactaaatggacattaagctatttttatgattcacattatttaaggaaattatttccgatctttaatataaacacctttgaatacaccagaaatttcctgaggcacttggtcttaagtcgatattttgtaatggattaatattttttttacattttatatcacatgcaatctgttgtcagtcaccttcagagagtcttcatgacattccttaattagtcaaatgtttattgagtgcgttctatgttataggtactgggcagtttctcaaggatctctcatttttaaataacagaagaaaggtgaaagatgttgctatttcaaatctgtcatgggtccaattgactctatgacatttgcctcttgctgcctccctcattctatttcttcttctccaccttcttttttcttttctttttttttttttactatacctcctttataaaagttatgtatttcttttcatctattctatcaatcgtctttatctctccacagcaatatatcatctatttatcattaatcaataatgtattcttttattccaataacatttgggttttgggattttaattttcaaacacagcagaatgacattttttctgtcactattattattgttggtatgtgaagctatttggagatccaattcaggaagcaacacattggagaatggctactttctatcaagaaataaagagaaccacagtcaacccacacaatcatctttagaagacagtgtgactcctaccaaagctgtcaaaaccacaggcaagggcatagttaaaggacggaatcttgactcaagagggttaattcttggtgctgaagcctggggcaggggtgtaaagaaaaacacttagattcaatgattgtaaatttaaggcaaatacacatattagtattaccttagtgtaatgtatccctgtcatatatacaataaggtgaaattataagtaccctatgcagttggctggacagttctaaattggactttattaatttttaaaatcagtaactgatttatcactggctatgtgcttagatctacaggagatcatataatttgatacaaataaaagaaaagtgttctctccccttacagaattgacattttaaatgcgatacagttagaataggaaatatgacattagaaaggaagaatgacagggagaaaggaaagaagggaaaatgttgccaagaataaggaagctatattaaaaatatacaaaagaggtagacctaatacacatgtccctgaaaactcatcaaatttgtttaatcatacaatttcatttacttaattacaattctatacacacttgacttttacttctaattgcatcataattgactatgacttaatgttttcagttcaatttttcatctctggacccataccttctcactatttttattaagtagctaataatatataacagagatagtgtataatatgaataattggcctatacttttctcacttggaaagtcacattatgaagtagatcttacatcataaaataagtagcaatatgaaattgctgtgtacctcaatgactgattgtgagtggacttattttaaggagttattaaggagaaaggtagttttgagctgaattagaaggaatagaagacaagtgaagaaaaaaaggatggttggctgcctaaaatactatttatagctagtttgtttttaaattttaaatgaataggaagattttaatgtattctcatctgtaaaatcatatccctgtagttcgaattgacaatgaaatataaaaatggcaactaattggttatttcataagtgtccttaagatgaatggtgttcacactaaaagagtgaattggtatgctatgaacctcatggtactaatcttttatttccaggggttctttccagcccttgtcctcctaattggattatatatgagaagagctgttatctattcagcatgtcactaaattcctgggatggaagtaaaagacaatgctggcaactgggctctaatctcctaaagatagacagctcaaatgaattggtaagtgtagacttctgttatgattatctgtggtgtgtatcctgaaggaagatagagggagattccaggtaatgacaatttttcctaaaatgaagtctttttttttttttttttttgaggcagagtctcactctgttgcccaagctagagtgcagtgaagccgcgacatcccaggctcaagtgatcctcccacctcagcttcctgagtaggtaggactacagggtgcaccaccacactcgtctaatgtttttttgtatttttcatagagacgaggtttctccatatcatctgggctggtctcaaaatcctgggcacaagcgatctgcctacctcgatctcccagtgttgggattacaggtgtaagccaccatacttggccaaaattcatttttaatatctctataattataatcatagcatgccttaagcacataaagtgcatagtatatgcttttatttttaactaatttaaaaaactgtgtttcgccttaaaacaaatcctttcaaacatactccatgtatgcatgactacaataatcaggacactacccatttttgtgagtttgtatttcaatttttaaatatggtggaagtaaagtagaaaattcttctccttgtcatcataattatcaagaaaaatggcaacaatgataatatatgtttagaaattatttactctttgcaagatactgggaaaggcaaagagggttaaaacataaccctgctatcacaggacacatataatcttttaagtaaaaaaaaagcaactcagcagctattaaaagttaaatatctggcattagcaataaattctataggagtttaaagagatccccgtgttcctaagaagttttcagaaaaagtggcacttataacacatcatgaatgaagggtagagcttcaatgaggtaagataaggggttaataggaaaaattctatgttataaatctaaaccagtctataacttctacacctactttcactattcttattttgtttttgtttctgtaatgtcttacccagtagtaataatttatattaaagttaatggaactagatatatggcaaagaaagagtactggattacaagtctatctgacttttaggccagcctataattgaaaataaattgttatagatttgtaaacaattcagatatcttcactgaacctcagattacatattcataaaatatacagttggactaaattatttttaagttgttacctaactctgagaagtacttcttaacgaaagtagcgtcaatttatttcttcaattggaggagaagacaatggctaatcatccatgaaaactgcctagggggactgtcatctgggattttgtcagataggttgaatggaggcagtacagtcctcacattacaaatctattcttttggaaaattaaatgataattactttaaataaataagataggccttttgagacattcaatgacattcaaaaattggcacttctctctaggttgatgtcaggttaggcatgcattcttttttttttttttgagacggagtctcgctctgtcgcccaggccggactgcggactgcagtggcgcaatctcggctcactgcaagctccgcttcccgggttcatgccattctcctgcctcagcctcccgagtagctgggaccacaggcgcccgccaccgcgcccggctaattttttgtatttttagtagagacggggtttcaccttgttagccaggatggtctcgatctcctgacctcatgatctacccgcctcggcctcccaaagtgctgggattacaggcgtgagccaccgcgcccggccttgcattctttaccaaagtgattcaatcagttgtctttttctcagcgtccatgataatagtttctttctctctctctctctctctttattatatatttgtatatgtttcattacagggatttatagtaaaacaagtgtcttcccaacctgataattcattttggataggcctttctcggccccagactgaggtaccatggctctgggaggatggatcaacattctcttctaacttgtaagtgtttggagagacaatgcttcatcctttttctcagagaggtttccatctcatctatgaaaacctctgtcgagcagctaagaacctgatttgctcaccatatatgagaaagagagggagaaagatatagaagaagagaaagagtgaactaggacaagaggagaaagatgaggaggaccttagagtgaaaaagagtgaggccatctagtagcatcaacacagatattcttctggttttcttactagggaggcatcgacatgtttgaagttgtccaggcaaggagcagtcactgtcagtcagtgtaactccccggttaagagcatgggttttgaagccaggcctcagtttgggttaatgattaccccactcactgattgtgtgacactggggataagtcacttttcctctctgagtcccattttccataaacaagaatagaaaggtgctcttggccaggtgtggtggctcacacccgtaatcccagcactttgggaggcccaggtgggcggatcacttgaggtcaggagtttgagaccagcctgaccaacatggtgaaaccccacctccactaaaaatttagccgggtgtggtggcattgcctgaaatcccagctactcaggaggctgaggcaggagaattgcttggacctgggagacagaggttgcagtgagctgagattgcaccattgcactccagcctggatgacagagtgagactccagtgagactccaactcaaaaaaaaaaaaaaaaaaaaagaaaaaaagaaagagtgctttcctcttagaattgtgagatgggtataaaagtaaaataatttagcacagtgtcttgtacatagttaatgtgtgagacttattattaagttaaaaagcaaccacattttcacattttgcattttagaaagatattttaaacgtatttcacatttgcctgatgatacattattccttattatgtggtttctgtcactgctgttgtcattcatttgctttttaatatctgcagaatatgaaatatgtctcttttaagttcttattattagtgtgtgtgtgcacacctgtgtgtgttttttcatctgtctcagtaggagtaccgttcaatttggtttttcaaagaaagtaacttttgactttgttgactctgtctttttattatttctttcattaacttttattctaatctgtattacttccttccatctaatttatttttattttattttgttttattttttgagacagagtctcactctgtcacccaggctggagtgcaatggcgatctcggctcactgccagctccgcctcccgggttcacgccattctcctgcctcagcctcctgagtagctgggactacaggcgctcaccaccatgcccggctaattttttgtatatttagtagagacggggtttcaccgtgttagccaggatggtctcgatctcctgacctaatttatttgttttaaatttgctattccatctcaaacttctcgtattgggtgcttgcctcatgaatttaagccttcctttatctcaagtatgtagacttaaggctataattttaatgtattttcattgtctttcagttcaaaatactttctgatttccactgtgagctgctctttgacccaggagttatttagaaatgcatttcttaatttacaaacatatgtgtttctggttatctctttgttttaggtttcaggcttagttccactgtgatcagagaacatgctccacgtgcttgtagttctgtgatttttacgtgcttcttcctctttccatatgaaaagaattgtgttgaaatcttccgctgcgattctacttacagttctgtaaacattttattcgatgtgttgaagccgtgttatcaggcacataaagatttagaattgttactttttttcccctttctttcctcctttttggacgatttaacactttttcttattctgttttttttttctgttcatttggaatgtgctctttcatgtcttttacatctcttttactaatcttttagtagttgttctaggaattacacatgtatacttcactcatcaaagactaacattaactgacatttttatgttcttcctgaccaatataaaaatcatagagcattcctttactctgttgactctctcctcaatttatatgctattatattaatgtatttatttttatttatttatttttattttatcgcccaggctggagtgcagtggggcaatcttggcctactgcaacctctgcctcctgggttcaagcgattctcccacctcagcctcctgagtagctgggactacagctatgcgtcaccagctgggtgtggtggtggacgcctgtaatcccagctactcagaggttgaggcaccagaattgcttcaacccgggagacggaggttgcagtgagccgagatcgcaccactgcactccagcctgggtgactgagccagactcagtattaaaaaaaaaaaaaaagaaaaagaaaaaagaaaaaactagcccttgggccgggcgcggggactcacgcctataatcccagcactttgggaggccgaggcaggcggatcacttgatctctggagttcgataccagcctggccaaaatggtgaaaccccatctctacaaaaaaaaaaaaaagatataaaaattagacagacaaggtggcgcacagatttatgcagttagtattcatttcaatttgcccacatatttatgattttagttgtttatttctttcttcctttccaactgtacattacaggtattttttcttaagactgatatttccagtaagtatagaattagaggtttgttgtttttcctctcagccactcaaatatattattccactgttttctattttttactgttgtttttgagaggtcatctgtttgaaggtaatatatgttttaaaactaatgtgtttactcagcactgaaaaattctcagccatacttgcttcatattttgcttttccccatcttttttcccttctcctggaatcccagttacattcattacagacccattgacaccatcctatatgtttcttttgctttttcctgtgttttcattcttttttagctttttgctccaatctatgtaataacctttcacatatcttccggtcatctattttttctcatctgtggctaatctaccattaaaagcctctattaagtcttttattttgtttggtgacattttcagttttataattttagtttagttctttctcaaatctattatttcaacacgtatacttctactttttcttccaacattcttagtattgtcttctaactttcagaatacactaaccatagttgttttagcttgtgtctgataattccaattttctatatgtatctgtttctgtttgtttttttttttactatttttcttttgtgttgattagttttctcttatgtcagattgctttttatagtgttgttaacattttatcttaaaatctttgtagaattaatttgaagtgttttttcatttgcctctgttctcaccaccaggtctgttcacccaatagtgtgaacagtacaaactgctgagcataatcacttaactgttttacttctactaggctaagtacagtgaatttattatcagccaaatgtattttctactttcttatagtacttgtttgtcttgagttttctcttgctattttaaatgtatgactagaggactctttctataatcacaagtgggcccaagttaacattttgatatgttactacttttttgttttccgggtggcatttatttaatctagctgtgtctatgcccccaaaacacttataggtcaaggaaaatttttaaggaataatgctggtcagagttctccctgaggtctgaatctaagtagttaatcttagccttagtcatcgctaaagcaaagttttctcaatcttccaacctcagggtcaagagggagagatacataaccaggacaaagagtgccaagtcatagcttttgcactgacggtcagtgatgctctttgagcttgactcattaacactgctacttaaggagattgaagaccaaactgaacaggaccatgcctgcatttagcagtgttgatttccataactgtcaagcattgtattgtaatataattctgcttccaggatacattaaaatatacagagttgtttgccctgcctttaaatggcctgggcatctctgattctctttttagttctagatctgttttagcattaatgcttctgcttggtctactcattaagtatatccagtaataatttaattaaactgttacttgatttgataaagaaacatttaagtaataggctgaaagatatataaagaactttttatagaatattaaatgatttttcttctttgtcaggaactttttttttagtttatgcagctagtagcagttcttgaaaaaaaattaagtcgtttttctgccttaataatggagactattcatttaaccacttgagattcacaacaatttagatttaagcctccttttccaataatagaaacacttcagaactcttttcaccaatatccttactaatttatttgtgcgccatgtagacagtattccttaacatttgttctaattacctcactgtattctattttaacagatttcagatcagaaccacagctacccaagaaaacccatctccaaattgtgtatggattcacgtgtcagtcatttatgaccaactgtgtagtgtgccctcatatagtatttgtgagaagaagttttcaatgtaagaggaagggtggagaaggagagagaaatatgtgaggtagtaaggaggacagaaaacagaacagaaaagagtaacagctgaggtcaagataaatgcagaaaatgtttagagagcttggccaactgtaatcttaaccaagaaattgaagggagaggctgtgatttctgtatttgtcgacctacaggtaggctagtattatttttctagttagtagatccctagacatggaatcagggcagccaagcttgagtttttattttttatttatttatttttttgagatagggtctcactttgttacccaggctggagtgcagtggcacaatctcgactcactgcagctatctctcgcctcagcccctcaagtagctgggactacaggtgcatgccaccatgccaggctaatttttggtgttttttgtagagactgggttttgccatgttgaccaagctggtctctaactcctgggcttaagtgatctgcccgccttggcctcccaaagtgctgggattacagatgtgagccaccacacctggccccaagcttgaattttcattctgccattgacttggcatttaccttgggtaagccataagcgaatcttaatttctggctctatcagagttgtttcatgctcaacaatgccattgaagtgcacggtgtgttgccacgatttgaccctcaacttctagcagtatatcagttatgaactgagggtgaaatatatttctgaatagctaaatgaagaaatgggaaaaaatcttcaccacagtcagagcaattttattattttcatcagtatgatcataattatgattatcatcttagtaaaaagcaggaactcctactttttctttatcaattaaatagctcagagagtacatctgccatatctctaatagaatctttttttttttttttttttttgagacagagtttcgctcttgttgcccaggctggagtgcaacggcacgatctcggctcaccgcaacctccgccccctgggttcaagcaattctcctgcctcagcctcccaagtagctgggattacagtcaggcaccaccacacccggctaattttgtatttttttagtagagacagggtttctccatgtcggtcagggtagtcccgaactcctgacctcaagtgatctgcctgcctcggcctcccaagtgctgggattacaggcgtgagccactgcacccagcctagaatcttgtataatatgtaattgtagggaaactgctctcataggaaagttttctgctttttaaatacaaaaatacataaaaatacataaaatctgatgatgaatataaaaaagtaaccaacctcattggaacaagtattaacattttggaatatgttttattagttttgtgatgtactgttttacaatttttaccatttttttcagtaattactgtaaaatggtattattggaatgaaactatatttcctcatgtgctgatttgtcttatttttttcatactttcccactggtgctatttttatttccaatggatatttctgtattactagggaggcatttacagtcctctaatgttgattaatatgtgaaaagaaattgtaccaattttactaaattatgcagtttaaaatggatgattttatgttatgtggatttcatttcaataaaaaaaaactcttatcaaaaaa

SEQ ID NO: 236 - DNA, 30038 bp, Homo sapiens
tgacataatggggtttttttaattatagattcacactgcatttattcatcacccctgtcctctcatccataactcaaatttactaccagcaacacaaaatacaaagatgtgtccagtttcactacagctcttcgcgtttacaagtgtcgagcgcttgctttcggaacgcccttgtgattggccgagccaatgccagtgacatcaaccaacttacttttgattggaaggctggttgctgggactgtagcgtttgcaggaagtcacttaactgtttgggagctggaaaaccgaagctgaagttctcttttgccataggaacgagcgcaactgactaggaaagatgtgtcccaaagctccgcaagctggaacgtgagccaggaggcccggaccggccacgggaccgcgaggcactccgaaagtgtgcggctgccccttccctgcctcccagctgttacccttttaaatgtcagtgttcgaggctgtaggggtagcacgaggcagcgaaacggaacagtcggattggccgcacgcctcagttctagacgcacctctccaccgaaggccgttctgactggcagggggagaaagtaaacagagttgaatcaccctccccactggccaattggagggggtttggtttgtgacgtgatgggattctgcgaaattgttactgagcaagagaatgccggaacggtgcggaccggccggagcaggggttcagaagccgtcagtggactcgggaaaaagtgtctcttagacctggcgctcggcgggaccctcgccacccgcgtcggggtgatcgggtgaatgtcctggggctttggctcgacggcgaggcggccgagggcgtgcacctctcttgcagtttcctctcccagcgcctcgggggcgttttcagtcgaataaacttgcgaccgccacgtgtggcatctttccaagggagccggctcagaggggccggcgcgcccgtcgggggatcgcggccggcgcggggcaggggcggcggctagaggcggcggcgcggcggagcccggggccgtggatgctgcgtgcggaggcgctgccggttacgtaaagatgaggggctgaggtcgcctcggcgctcctgcgagtcggaagcgccccgcgcccccgcccccttggccgccgcgccgtgccgcgccgcgccgcgctcgtcgtccgaggccagggcagggcgagccgaacctccgcagccaccgccaagtttgtccgcgccgcctgggctgccgtcgcccgcaccatgtccgcggccgcctacatggacttcgtggctgcccagtgtctggtttccatttcgaaccgcgctgcggtgccggagcatggggtcgctccggacgccgagcggctgcgactacctgagcgcgaggtgaccaaggagcacggtgacccgggggacacctggaaggattactgcacactggtcaccatcgccaagagcttgttggacctgaacaagtaccgacccatccagaccccctccgtgtgcagcgacagtctggaaagtccagatgaggatatgggatccgacagcgacgtgaccaccgaatctgggtcgagtccttcccacagcccggaggagagacaggatcctggcagcgcgcccagcccgctctccctcctccatcctggagtggctgcgaaggggaaacacgcctccgaaaagaggcacaagtgcccctacagtggctgtgggaaagtctatggaaaatcctcccatctcaaagcccattacagagtgcatacaggttagcggcgtcgccctctcccccggagctctggggttagttaacctttggccaggcagcgttcctgggcgttcgggacactgcactcggccgaaagggtgcaaacatgttggataagatgcggtttaactctttaaataatttaaatgtgcattggcggaaagctcactctctccttaattgtccccggcctccgggagccacggagagccttaaactggcgggcagagcgagtgcggtgcgtggcttcgcggggagtggtgtccgcccctcccctgtcccgccccgcccccgggactctcccgcaccccgcgacggtggggccaccccacctgggagacgctggcagcggggaagtcagatggcgtatcttttatttaattctcttgtcgggttgcagagaagtggttgaaaccgaggggggacgcggcgcactttacttcgagccttttagggatgactaaggactcatttaactggatgcctgctacttttttgggcttgccaaggtggttttaaatttggctgggagtcccccgagaggtttaaaataacccggcttcaggcagcataggagtctgatcaagtaatggtggttaacttcactcatgagtcctcctgatgagccaggtttcagagctgacttttttttttttttttttttttttttttggccatgtgacttaggtcgcaccctccacccctgaatcgcggtttgcagggaggtgtggtccttgccggaggtcaaggcttggtaatgaatgttgggcggttctggaggcctcagggaatagttcctcccagggagggtgagaggcatggccgtacaaatgaatgtggccagaaagacatctatctgccttttaaaatgggctttggagacttccagggacctgggtcatccaattctgttggttgtgtttaacatgaacggtaaaagttggaaagcattcacatttggacatgctgtcttgaccatcttcggaatggttcttttacaagcgccattcagaggtagcggggcttggtcctctcagataagccttttgcctctgtcttgtgacaccgtgtttgagagggtattgttggagttagttggaaaagtgttgtcattttttggtgtaatacctcgatacttttaagatgaggtcttgggcctgtggtttaaaaatgatacatggaaaaaaatgatacttgattggggttttttgttttgttttgctttcctttttaaaagaaaggccacgtaactgcttctcattccatttcctttggaaacttgttcttgtggaggtggctgctggcaccggaatcagactgaatttcctccatggttaatgcaaaatcaggttctgtttggggtcatcatttaggttgccataaaacagcacattttaaggcttgtatctgtaaggttgctgaaaggcatgtgcctgtgttgggggatgtgacctttagtgtggctctgggggtgaagtaggggtatattaactggagggtgttactcaccaacagctgttgggcgggcctggctgtgtcagccatgttcccggagttcagttgttcccatcgacacccactgccaccttgagcaaaggcattttctccttcagggagctgcccagtcgtgcagccagggaggcctgcagttcctctgtgagctgccagagtctgtccgactcaggaatagggtttccagcgttctgggccattcggctgagtgatttttctcaggcatttatagaaatggctgcttctgtgtgcgtgcatgcgtgctgctccttaattctccataaggcaagtcattcggctcagctgtttcaggagaacctttttcccagtcaggagtggaaaacgaagtgagatgttcattcagctttaagtgctacagtcagtgctttgaacctagggatgtggtgattgcaggtgcctatgttttggggatctctaatcttagtgcatggttgaacaaaacctcagcctgggttaatattgtcggaagtgtattcctgctagaggaggtatgtgttaaggttactttaaataagagacttggaggtctcatgcatttggaagtttcagatacaacttcaatttaaattgactttagggtagggtaaggagcttttctaattttctttctgctggtgttaaatcaagaaggtgggcagagatggcatttggaatgtctgcattctgtgaagattttaggagctaaactccctgccacacccccttgcttagtgctgctaacattccctcaagaaaccctccagcttgctcacttccttatagagacacatacagctgccacttcatagaccacttctacaccagctttagaagttgaatcattcaaacagattttcttctaattcagtgctgctacttctgtagtgtgctgggaggaacgacacagttgaggccagctaagctgggttctgatttgtcctattgttttctcatttgagaccataaggaagttactttaattcagagtttgcaaactggaggcttgctgctgaatttgctttgcagatttgtttggcttggccaacacagggtttataaaaatttaattagttaccaacatctaaaaatcagaggattatagcatgaatccagatttctggcttgtctggaaaaatcaaaagatctggcaaaactgggcctgaattcttgcctagcaacaattggcttgaactgatcatgatatggggcagtacctcgtattttaatcatttacaggatctcttttggcatttaagtttgcaacctctgctttgtttaagcctcactttcttaatccacaaggtagggctactatcctcaagtcacaggttcttgtgcaaagataacatctataaagcacttggtagggttccacacacagtaaccccttgagaaatgctgggtcctgtggtttgtgtataatgtacagaacgtcaccttaaaaatcaggaaacactggataaacttatttttaagcagtatgttaatttacattttcaaatagtatgttcagtttgtttttcttcaaccagaccagatcttttcaggtgacatacctctaaagtttaagcagtggatccattgttaatctaaagaaaacaaaagatgcaacaaatatactatttttcctgtttccagactttttggacactttatgatgtatttatttgtactgtttcagattaattttagaactattagagtattttatatgaaaatatatcaagcatattatttgaaaatgtaattaacatgaagtttatcctaagtctcctgactttgtggatacctttcacatagagtatgggcagattttggggggcgggtggtaaaggcagtgttataaggaaacaactacattctaattccagctcggaagtcatcagaacaggctgatgttgaatcatgctgggttgatatctggatgacagaaaccttaggccttgtttctgtgccaggtgccatcttattctctttttggaggggcttaagtcagctatcgccaagtggtgacaatgggttgagtttgataacactggttataggattctgaagatcagaaaaccccaaattccaaccatgacaccccagttctatgaaaaaatatttttcagtatatatatatacatatatgtatatatatatacatatacatgtatatgtatacatatatatacatatatgtgtatatatatacatatacatatatatgtatacatatatacatatatgtatatatatacacatatatatacatatatgtgtatatatatacacatatatatacacatatatgtatatatatatacacatatatatatatacatatatgtgtatatatatatacacatatatatatatagtgcaaaaggaggctcacataaaaaaccaggagaggtgggggctacaaaagcccggagtggcggcttctgctccttagcctcttcgaacacattcttgggatccttggcatacttggtgtgagggacctggatagcctctgtagtagaagttgtcctccaatatggaaaacagatttttttggtccctctaggaatgtccatcactagccaactctaacttaggtgggaattttgcttaaaggcatgaggttgccctgagcttcttgcactcttctcccttaattactgtaaaaggttttggagtcaactgtttggtcaaggagagtctgatgtcatcggaggtatcaggaaaaactcacttcattgcctgggaggtggggccttagggacagagcaaggccttgccctagactaaggggccttagctcactgggctgcccattaagtaggccctgcccagcccttaccaccatctcttctcttcatgagtggaacggaagccctgtacctggatccttagggacacattctctctaccccattcttctttccagagggctccccagagtgatgtggaatggcatttcataacccaacttgcttcatccaacatagatgtacaactaggcctgagtggggcttgcacaggtaactgtttctctaccctttttccataattgtcccctccattactgatcctcctgcctcagcctccagagtagctgggattatgggtgtgtgccaccacactcggctaattttttgcatttttagtagagacagggtttcaccatgttggccgggctagtctcgaactcctgacttcaagtgatctgctcacctcggcctcacaaagttctgggattacaggtgtgagccactgcgcctggcctcccccattacattttaattccacagatacacttgagctgtttatggactatgccccattccgaaggcgacaaatcgttgtaatagctaagacttttttcacctgtcacagaaccaatttttgccccctgggagatgatactgcctcaccccactcagcaataggagtgatatcaagtatcctgttagggaagaataacaatctatgcaaaaggctgcatacacatggcttctagctatagaggatgggtttctaaggctgcaagggtttgctatagggtttgtttctgggttttagacaagagggtaaaactcccttgaatcaagtgaaagatgcccagactgttcttcagcccccagcccaagctctctgcagaaatctgaccctggggctggaggctgttaggaccctatagctcttattgctagtcacaaggtaggagccacccagttgcctttctttcctcatttcccatttgtcctgtgtcatcctccatctatctgccctagcaaagacagtcggggggcctctgagaatcttctgctggcaagattacagtttcacgatagaaaacataagtggagtcaaattacagagtacgcacactgtttcccttgattttcctctcacatcttctgtgcgtggtgagaagagagaggggaggggtataagtgggttcctgggtgagagagggaggtaccagagtaaatacagtgccacttggatggtgacaccccattaccttcagacacaaagatgtaagctgagggaaatgaattcttggattcagggaaatgaattcttggattctgaacatgagggtcagatttacattcctgtctcaattgttgacgcttatcccaaggactagtcattctgcaacatctgtgggaaattcccagattgaacttcccagggagaaacatcatatgacatattgggaaaatggctgacaatggttttccttagtaagttcattgagaagaaaagtgggcggatgatttcccagtcttcactctttcagaagcccctaaaacaatctgacatgctctagttggagcctgctttctatcccatcagtttgatttctgaatgccttatgatcattagcattcttcattaaaaaaaaaaaaagctttgtcgcatttgttagtcttgacttccaaatcttccgtgttctttttttttttttctctctctctctctctttccctttggctgttctcaggcttggagaaaaagcttgtagcatgccattccttcctccactgctagaatcctcccccacatccgaccctcccaccttttcctaatgtttctccagcaagcccagcgcccactgaagagcgtaaattagtgcctagtaattggtacaaaggcactttctgtttctatgcaacacacgcagaaaggaggggcaaaaggaagacgaagaaaaaaaccccacagatggttaaaaagggaaagaagtgagatcctctttcagtggtctttgagcaatcctggctctctttctccgccccactttttgttgaaagttagtcacaggcctaggcctaactcagagcacttggtggcagcagttgttagtatcaaaagaatagcacttggaggttggaagtgaccttgggaggtcatcacatccatcattttgtctttaagaaagcacatccccaccctttctcagagagatggggattgttctcttgaaatgttttggggggacttgaagggctttgaagcacaccaccaggtttcaaaagctgcctatctgccttgactagcatgtgagtggtcatactgtgtaatctcccagagcctcaccagctcatgagggtactaggtagttggaagcatttgtcagcagaaaatgctaaagcccctagcttcaagcttggctctgcgggtgcctaggaatttttccttcattttgaattctttgcagtactttcatttgaattctttccccccacttgctctcctgggacttcagtctatggttaacatttttctttttcaccttagtttaaagggctgcttcatggaattaaccaagtgaaagggcagaggtggagtgagctggggtggcctatgccctttttatgggagcagcactctctttaacagcccaaggcagagctgctgagaggtttcctaccactccctacctggaatcgtcctgaaactttaatacctttttgatgcattaaggccacgagtaaacatttgttttatcccagtgtcaagcagtcccctcagcaaataataggactaacattattattcataagaatgtgatcccccctgagggagtgagaagcacccattttttttttaaatacatgggaccttccaaggccattcattgccatgtgtgtccaaagcctttttgatggtgtgcccgaagccttctcttttaatctcagtttctagtgtggtataattgactttggaatcctgagatgagaattgaagaacctggatctgaaatctaaaggttctagagctgagagaaccagtttgctcacgatctaagccagagctgctgctgctgggcctttgaatttgtttattttttaatgaaactgagaatgatcacaaatttgaacaggagaaaggaatctaggagaatttgaacaggagaaaggccaatccttaactggccagattgagtctttttaaaaagtgaggacatttatttaaatagattaaagtaagagacgggagcttaagccatacaaaattagtgacaaggatttgaaatgcagtcagtggtgttatgtattcaatgaagtttgaacatttttccaagctgagcctccgtccttgtggaagggagtatctcccaaagggcctgacttgaaccaaagtgggaaccagtggaataggcaatggtcaaaaacacaaaagtctctcttgggagttttggacattttagaaccgggagcaaaattacagatcatcttggcccaaagaaatagagggagaagaaaatgtttcaccatctctgtcttccagagagctagctttcataagacaggcagttagaaatgaagagtaaggcctgacctatttcatattgaacagtcaaactgaggaactggaatgtgagggggcctttaccttcagtacagagacagtagatagagtcgtcagagcacaggcttttgggtccttctgacatgggtttttgaatcctgtctccaccattctatttatgacaactcaggctctacttaccttctctgagcctcaggtttctcatctgtaaaatggagctcagtaattatatatttatgaagttgttatgaagcttaattcagatgaggtgtttaaatcatttagcacaccattataattaaaaataaagaatttatgtgtgtgttccagaagcccttgattcctagaatttttgtttagaattccagattagtccagcactgcctcattcacttcaattatttattattattattattatgattttgagactgagtctcactctgtcaccgaggctggagtgcagtggcatgaaggatcttggctcactgcaacctctgcactctccccgcctacttccccctaccccctactcaagcaatcctcccacctcagcctcccaagtaactgggaccacagatgcacaccattttttgtagaggctgggtttcactatgttgcccaggctggtctcaaactcctgagctcaaaccatttgcctgcctcagcctcccagagtgttaggattacaggcatgagccactgcacccagccatctcattcacttaaattatttattgagtgacttacatgcaaaaagctgtgtaaaatgctggtaccaggcactttggattttgtggctaatagtgataataatgacaatttctaacatttattatatgtcaggttccaagctaaatggtttacatgcattgtcacatttaaactcacagcaatcctgtgagatagaaaggtgctgttcttctcatttaataggaggaatcagactgggagttagttaacgtagttcaaggttacactggaattttcctagtctgtctctaggtgggtggagttgggcatgaatgcttgctgatctggaccccttgagtttccgccagtgggaagagaccctgtgttttacgtggttctcttgggtttggtcccagagccaccagtcttcagctgtctactcttgttgttctgactctggcttatggttggttttcatgaacctcggttaggagtgtcagcagaaatcttggactctgaccatacctactctgtattttccatagttatccagaagctgcttccttcccattgaaaaataacctggttgtgggcccaaagctgtattagtcaggacaacagaatccaaacagggactggcttaataaaaaaaatgaaactttattggttcaggttacaaacacatctaggggtagctctcatttcggtgtctgtggatacaggcactcagtttctgcctctccatggctcagttttgctgccttttgctacagcctcattcatggggttggtgggggctgtctccaaatagtggtgagatggctgcccgcagttccagactcatatcctgccacttaagcaaaccccaaggaaagacagttttccattcccaaagattccagcaaaagttccaggctttaagctccatgactagttcagattgtgtgccccatccctgaaatgaatcactgtggcacgactgggtcacatccaatctctgggtctggaggtgtggggtcaccctccctggaactacatatatccagaatggggaaggagttgttgccaaaaggaaatttaatgtgttatttattatccagaagggaacaaatgccagacaggcaaaaccaacacccattctctctgtcatcccatttagttagttatttatttttatttgtatttttttgagacaaagtctcgccctgctgcccaggctggagtgcagcagcacaatctcggctcactgcaacctccacctccctggtttaagccattctggtgcctcagcctcccgaatagctgggattacagccacaccccaccatgccaggctaatttttgtatttttagtagagatgggttttcaccaggttggtcaggcttgtcttgaactcctgacctcaggtgatccacccgcctcggcctctcaaagtgttgggattacatgtgtgagccaccatgcccggctatcatcccatttataactaccaacaggattttccaaagaacagagtttgacaaaatgagaggcaaacagtacgatatttttttttctatatatttttcttccttttggtgggaaggagctccgaactatctctggagttcaacccgaaagataggccataagtgaatgtacagaagggtctttgcagaagatagatgattttgacaggtattacatacgcttaggcaaacacccactggccctcctgagtggatgttctagaagccaataataaaagcctcacatggaacaagtataacagcagcagggtgaacttcaaagccattgacttggttttaattccagtctgtccattttaatgtccagagaaacaaatcatgtttacaggaacatttattaccctatatgctaataggtaaaagcctagtctatgcaaagacgagctgtttatatggcagttcccactgggattcagaagtgtattcagtgtgcacaatgcccaagaaaaacactgtaataaatcataagaggcaaaaagtagagcttaaaaacaacttaacaaaaacacataaaagtgacttaactccctgtgctctgtaattctacagtagttttgtaccattaccattttaaggaaaataagcagaatgacaaccaaacagctggctttctctcgtattgtaatccatactcatggccagccccaaaatgcttgttcagtgagcattatcccactgaagcggggggttcccagtgtgaaaaacataggctattttctctaacctgaggcatttctttttctttttcttttctaattgattttattttattttatttttatttatttattttttttgagacagtctcgctctgttgcccaggctggagtgcagtggcatgatctcgctcactgcaacctccgcctcctagattcaagcaattctcctgcctcagcctcctgagtagctgggactacagggacatgccactacacccagctcatttttgtacttttagtagagacggggttttaccatgttggccaggctggtctcaaactcctggcctcatgtgatccacccaccttggcctcccaaagtgctgggattacaggcgtgagccactgcagccagcctaattttttttcttttcttttcttttctttttttttttttttttttgtgaaggagtcttgctctgttgcccagactagagtgcagtggtgcgatctcagctcactgcaccctctgcctcccaggttcatgtgattctcctgcctcagcctcctaagtagctgggattacaggtgcccgccaccacacccagctaatttgtgtatttttagtagttgatagggtttcaccatgttggccaggatggtctcgaacttctgacctgaagtgattcaccggcctcggccttccaaagtgctggattacaggcatgagccaccgcacccagctaatttttgtatttttagtagagacagggcttcactatgttggccaggctggttttcctgagatggggtctcactctgtcacccaggctggagtgcagtggtgcaatcacggcttattgcatcctcatgctccttggctcaagcagtctctcacctaggtctcctgaatagctgggaccacaggcacgcaccaccatgcccagctaatttaaaaaatttttttttttttttttttttggagatgggatctcgctatattgctcaggctggtctcgaactcctggcctcaagtgatcctcctgctccagtctcccaaactgttgggattacaggaatgagtcactaacacccagcctaacccgaggcatttcttcccaaagccctgcttgctcctaaatttcaaaacaccctctagaaatacatgcccaaagaggggactatattccttttctgagatctcagggggagggttgagtggggactgttttgtgaagggtggacagctctgacctgcagttctttgtggtctttggtgccaaacatcaagccatgtgacttagtggctcactccatcccaagagtagaagggttaaaagcttgaaaagctgctggtggcccatgtggcatgtatgagtaggatttatggccactgcagccatactgtggtgtgcatacagtgtgcagaggttgagcccagagggaaaaacctggatggaaacacttgctggagtggcatcacttttcaccatgagtccttatgaatgccacagcctagcaggtagagtacgtgttgactaatcaggcatcagtctctccatttctgctgctgggggacaatctttttcttggcatttcagggtctcagttacttctgcattaaattgtattctcttttggctaaatgtttgcaaaatcagggttctctctctaattcggggtcccttgcctttcctttccctgggagtgatcttctgtttggtgggcatggggctcatctcttgtttcagcctcgtgggagagccatccatgttgcatgctgtcctttgaccttgtggtgatgtccactgagacgtctgtcatgcacttgcctgtgtccccatcctcacaggctgacatcagtggctctgggtgttagatccttgcactgtgacccagtcctcctgtggatttctccaacagcacagttttgggctcaggaacacagtccttttccccaccctgcactttagaagggtgcgcacactgagacccctctcagctgtagctccccaactcctcaggtgttatggcctgtgtggggcttccaagaggaccttatttgtataaggcacttcctctaggcatgtctcgaaggctgtctctacaaggagaataaagacctggatatttcttagagacctctgtgtctctaatacagtcctaccagctctttctctttttctgcccctcatgtcttggttggaagatctggcaaattgagagtttttttaagctcaaggacttaggttttctaaatgctactttgaaaattaaagctcagtggcaacttatttatcctaaactatgtctgatccccctgaggcaatgcatttggaaggaagggcctggaaggcagagaattggaaaaaaaggcactgtgaaaggtcagtctctgtgcttttagtttgagtccaggctcttctttcacatctaatctcattttgtgcataaaactgaaggagcaatttgaaacctggttttaatctggtcacacactattgtgcagggcgtccttgggcacgtcatctgccctctgagttggcttcatctaaaacatgacaggtttgaattccatggtgataaaaatcaccaaaattgcaaagattcaaagaatctgttcttgggatagctttgccattaggcatttatatcttgttcaatatttaatgcctaggtagatatttattatctatgtttcccacaaatagctgaacaaaggcagcatagtctgggatggcaggaattacctagtctgggccagggtctggtctttgaagggctagctatgtggttgtggggaggttgcatcatctttctgggcctttggaggatccctaagatttcatccacctctaaattctgttactctgacttttatgatcttttatcacactacaccaagaggcagatcttcattgtgttaaaaatttatgtttagggtccacattttgcctctgcactatttttagttttcaggcagggccatataactgagacttcaagacagctcttggccaggtgcagtgtctcacggctgtaatcccagcactttgggaggctgagacaggaggatcacttgagcccaggagtttgagaccagcctggactacatagtaagacccctgactatacaaaaaataaacaaaattagttgggtgtggtggcatgcacctgtggtccagctacttgggaagctgaggtgggaggatcacttgagcctgggaggttgaggctgcagtgagccaagatcacgtcactgggtgacagagcaagaccttgcctcacagaaaaaaagaaaaagaaaatgtatagtttttgctgaatcaagaacctaaagaggcaagaatctgttgtcagctgggcacagtggctcatccttataatctcagcactttgggaggccaaggcaggaagatcacctgagctcaggagttcaagaccagcctggccaacatggtgaaaacctgtctctactaaaaatacaaaaattagctgggcatggtggcaggtgcctgttgtaatcccagctacttgggagactgagacacgagaattgcttgaacccgggaggcagaggttgcagtgagccgagatcgtgccactgcactccaacctgggtgacagagcaagactccatctcaaaaaaaaaaaaaaaaattctgttatctgctgtcttttgtttgaggtctgctggaactgcatgtgctgtctcacagatagctgaggttgggaatgtgtgcacgatatttggatatgcttgcttcttagactctgacatgcttaaatgaggaagtgctgcatacagatgtcagagacacacacccacttctcatttcagaacctaaagcataggacaagttgctttctacagataaacacagagatccggaagtaaaatctcacacctaagccctacactgtctctgttgtatcaacaaatacaatataaacggaagccaaatcacaagcaggattcagtgagaggtcagaagcaaatggtagtaatatgatgggatggcattcaggcaggattattctttcaaagcctatttaacatttttattcgttcagaacatctacatgcaaagcaatatttctgataaacaggagacttttgaatgaatgatttttgagttcagtgttcattgaaatgatgtatgcagaaaaatgtggacttctctgtacccaggaatggcctgcacacctcttccgtaatgtgtattggtggttctgcacatgagggtaatggagaatgggaaaaaagcaactgttcatgtttcgtacctgcatgttgacattgctttttggtgaggagagaagccagatggtgatggacaaatggggtgcttgaggcctagggtcagggcaggtctatgtggatgcattccccaccagtctggtccatgaatgctttcttagactcaaatctttgcacttcttcatgatctgactcctctcacctgctttctaacaaggacactcctttgttgggcaaccctactgttactgtttgtgcatttccacctctgaaggaaggttcctgtctgttcttataagagggccatgtccctttcacatatggaaaaagtaggagaggtggaaatagaggagtgagaagacagatgtagtatattcaggaagtttctgactttctccgttttgtttttttttttagtcagagtctcactctgtcacccaggctggagtgcagtggtgcaatctcagctcactgcaacctccacctccagggttcaagcgattctcctgcctcagcctcccgagtagctgggattacaggcatgtgccaccatgcctggctaatttttgtatttttagtagagacagggtttcaccatgttggccaggatggtctcaacctcctcacctcaagcgatccaccccccttggcctcccaaagtgctggattacaggtgtttacaagtgtgagccatcacaccgggccaggaagtttctgactttctgacaattagtttgagaagaagacaaaatgactcttctctctttggtcatggatcacttactgaagtgtcccagtaatttctcaatagaaagtaaatcacctactgccctccacttccatgcccatggaatatattccttttaaaatttttaagagatgaggtttcactatgttgcccatgctggtcttgaactctgggcctcaagcagtcctccctcctcagccttccaaagtgctgggattacaggcataaaccaccatgtctggcctggaatatattcttgatcaagccatttgtggaatggtttaaactcagatgtatcgctgttttctgtaagacttttaaaaaatattaaaataactttttctgactttttctcataaaagaaatttatactcactgtttaaaaaatcagaaaacatagggaaaaattacaaaaggaagtagaagttattctttatctcctcactggtagatagtaattgttcaaattttgtatatattctttttacttaatatttttttaattttaaattgtagtagagatggggtcttactgtgttgcccaagctggtcttgaactcctgacttcaaatagtcctcctgcctcagcctcccaaagtgttaggattacaggcatgaaccacctcagccagcccatattttgtgggcaacaggatttttttctctccatatatattcacacacttatgcagctgatcatacattgttcttctcagttagcagtgtatggctaacatctttccatttcattatataacagtctggtacctttttcacaggtacatattagtcccctgtaaggatatactttatgtattaaaccagccctttatttttgagcatttaagttaccaccttttagctctcataagcaatgctggtatcccttttcatgtctctatctaattattatcaaattaattgccaaaaataatctgcaggagaatattgccagatggccctggattaattataaatcccaccagtgtggtagagggcctgtttcctcatgcctccaccagtggtcggtatgaacagattttttaacgttttcactagcctcacagatatcttgctggtgtcttaattggcatgttttgattacttgtgagattgaatatatttttgtatgaaatattaaatattttcgtatttatttcttggtcattagtattttatttatgtatttatttatttatttattttgaggcagcgtctggctctgttacccagactggagtgcagtgacacaatctcagcttactgcaacctctgtctcactggttcaagtgatcctcccacctgagtagctgggactgtaggtgtgcaccacacagcctggataatatttgcatttttagtagagatgaggtttcgccatgttacccaggctggtctcaaactcctgggctcgagcaatctgcctgcctcgacttcccaaagtgctgagattacaggcatgaaccaccacgtctggccagtatttcttactttataaattatttatttgcatccttgcccacttttattaagttgggctgttcctttttgatttgcaagtcctttctgtgttacagattttaacattttgtcatatgcttcaatttcttttaatttattttgattcttaaatttttctacttatatatatttttaacatgcagaagtttaacatttttacgtattcaaaactatccttcaagtaggattttgcttttggtttcatgtttagaaagtctctattccaggattctaaaaatgctcacctatattttatcgttatggctttattttttacatttacatttatagcccatttggaaatcatttgagtgaaaagtatgaggtagggactaagatttaatttttttcttttacctgacatctaagccacttactgaattaaacattttctgtttcactgatttgaaataccccatttaccatgtacagaatccctatagattcttaaggttattttcagaccctactctgttccactgatttgtcttttcctgtgctgctatctcactatcttaattattacagctttaataatccattttaataactagtattgcaagtgctcacttattatttgttcttccgcaaaattttcttggcaagttgggcatgtttattcttccaaatgaacttcagaaataactttgtcaagttctagaaaaagaaattcttacggtgtgtgttaattccgtagatgaatttgtacagaattgccatattcacaccattgagccttaccatccaaaggcatggcaagcattttgtttgttcattttcttttatattgaggctttatgcatttcttcaccaaggtcctgaacttttattgttaggcttattctgactggttatggctggcatataagaaagccagtgctcttttgtacagttacatctgtgaatgcacctttaatttagattagatttttcagttatcttgaattttttcaaagagaaagttgtgtcaactgcaaataattcttattttataacccccccttcttctcaccatttacttcttattttatctaattgcactcattagtatttcctggaaaatgttaaattatagcaatgggagcgggtgtccatttatgctttgggctagactttagtagttatactacctttattttactgttgaccttgcagaggaaaggtttcagagctgatcttttatactgctgaggaattattttattttcctgaaagcttttattagggatggttgttcaattttatcatatactattttgtacacgataagagtgtgtatatgatattaaatgatactaaatgtgtgtgtgtgtgtgtgtgtatgagctgttaaatgggggaataatatcagtatgatttaataatatcaaattgtcctttttaaaattacatttcttttgtagagttggggtgttactgtgttgcccagattggttttgatctcctgggctcaagcagtcctcccatctcagcctcccaaagtgctgggattacaggcgtgagctaccacagccagcccaaattcttcttttatctatggaatcctagtgctgtttttgcaatcagaaaccactcttttttttttttttttttttgagacagggtctcagtctcactctcacccaggctgcagtgcagtggcacaatcatagctcactgcagcctcaacctttgggctcaagcaatcttcccgcctcagcctcccaagtatctgggaccacaggcaagcaccactacgcctggctaatttgttgtatttttggtagagatggggtttcaccacattgcccaggctggtcttgaacttctgtgttcaagtgatccatcttgagcggctgagcattatttttcttctagaagaagtcttgattttctacatctgcaagaaactttaattcttaattggcactgtttgagctctgttctgaaaaggaggcctaaatcccttagatttgttttttaccagattggtttacttttgctagatgcaatggaagcttttgattttgtatttttgactttcctgtctccattaaagttagacccatccctggacttgggtggggcagggaagatgagaagaaccaggtaggaaagagacgacattcagatggcaggcctccctgaccccaggcaggacttcagtggcagcctggacagctcagggagtctggggagggttgcctatgtccagtgagcaagcttggcacttggcaagtacccggtctctgtcttctctatggagaactcacctccattcgtttcaggactgcccacaaaaaaatgggcttcatttggcatcatcaactaatcagcagtcgaggaggctccctctcaaaagcagcaagtgtccttttgtgctaagtaggcaagcacatagccagggggccccagtccactgttcttgcaccctccgtaggcccaggagaattctggaggcctgatgactgtctctgcaaaggaagtcttttacacattgtgcgcagtgttcagtagcttttttgatcacatttattttatactctgagctgagtcagtcagcaagaggtgcttagcttgttactgaaaggggcggggagtggtatataaataatgagaactcagagaaacttgtgctgttaacagctctgctccagtaaagtggagtttattgtgtcactgcctctgggtgtgttttcctgtgaaggccagaaataatgcagtggtacaagtgtgttgggtatttttttccctatccccaggaggatggtaactctctcattaatactaaagacaggtttaaagattctctaattgatagttgcattgctgtgtgatttgttcagcgtgaaggctgaccattctcctttagaccttagcaccgagcctcaaagagagggcctgacttggtttcccccaggctgccagacgaaggtggagtgaccgtctctctaggccagtcctctcctcctctgtagatcatctctggtcccattcagccttaattctgttctcgtctacatgtgacttccccattccatgctttcttaagtgcaaaacatctatcattttctaaataataccttattatatgactgtcattaacttatatgctgggatgttagattcaacatcatggcatgttagatccaaactctccactgtattaaaaaggtgggagatttttcaaagggctacaaattgtaggtccctaagcagaatccagcctgcgtacacaccactgggtggcaccataatttataatgttgaaattgaatgcctctaagtaggggaagcaccctgttcagttcaccatggaatccattatgatccatgattgaatgcacctgctcccaccctgtccccgacctgtgtctggctcctgaagacatttgaatttacaaattctggtggccagttagaagttcaagtcctctgttatttgtttatttacttgagacagggtctcactctgttgcccagactggagtgcagtggcgtgatcttggctcaccacaacctccgcccctcgggttcaagcgattctcatgcctcatccccagtagctgggattataggtgtgcaacgccacacccagcttcaagtcttttgattgagatcaggaatcaaccaactttttgcaaaaggtcctgatagtaaatattttcagctttgcaggctgtacagtctctgtgggcaactgctcaacactgctgttttgagaatgcagctgtagataatacttaaaccaatgagcatggctgtttccaataaaactatatgcagacaaggaaattttaatttcatataactttctcctgtcatgaaatattcttttaatttttttcaaccacttggtaaaaaccgaatataagaatggtataagctattcttagctcatggcaggccagatttggccagtgggatgtggattgctagcccctgatttagatcactgaccaaaaagtttttaaagttttccaaaggatgccagataaatcaaaatgatcccgggccttttatactagcaactcacttccaagcagatcttttttaaatgcgtaaaaatggtaaacttgaattatacaagttacatgagtctaacgaagcttctatttgctcttgattttctcggggctctgtgggtgtccctctctgctctctgtgaaacacttcagggataaggacgctaggtcaatgacagcacttggattagaagcaaggagaaccatcacaaaatgacagctccaaggggcagtcaagagagtatcactgtcagctaggtcgaaagtgaattcagtgggaacaaaccctgattacacttgaaatatatgtaagtcacaagcatagaaacttaatagttctcctattctgatggcttcatgccagttttccatggtcacttctagaaagccatcttcctaacacagcgagagtatcttactccttttccagtcctagcccacagctgaatggtcttctggtccattttccccacagtggacacagatcccccaactaaatgaaccccctcctctcatgactcacttgaaagaaatgagtacacatgccagtgaggaggctaagccacattagcactcctccaagaaaaccacttctaatgagtttttgtcttaacaagcattgagaaaacactgagctcttcctttcattgttttcctcaccgccacatcagaagggagtggagaaagggctccaaaaaggaccgagcagagagggcgttttgttttggtttggtttggctttttgcaacttaaccattctatgagttctgaccccttgttatatttttcatagaacatgtttagaaaaacatttcccccataactgcttcactggggttaaagaggacttcactgcagtctaattctgcaatagctcaggtttctccagtagccagtaatatctgagcagatttcaatgtgagtgaccaggaggaggacgagagagagagagagagagtgtgtgtatgtgtgtgtgtgtgtgtaaagtttgagcatttaccaaatgcttggcaccatgagtaggacaaaagtcatacatgacattatttttgcctcaagaagctcagccttgatggggttgtaacaatctgtattttgacttttgctcaaaagtctgctgaagtgggttaaaatcctgtttatctaatggaagttgcagaagtgtagttttcaactccatgtctttattgagtttttcacgggaaactcttttttttttcctctttgcagccccatccccgagcatcaaaatgcatcaataaccctagctcttatccaccttgagtagggcccagcattcattggtttgctattgccttttgctgccgtagcttttcagctcagagctccataagggtttatacgtagatctgcacatagagaatcaactgctacagattcgttttacccacattgggtttcctcgaaaagtacgttgtacagggtgttgttatgactattgctctgcttagaaaacagcagagagccttcatcatgaatagattatcacaaaggtgatagatttggttgttttatcatatttctgcatctcatcagcacaggttaagagacgctggggaaaatagaatgaataattttggatgactcaaatgcaccacgctggacagctcccagcctctgcagtttctctatgggttctgggaaggccgggacaggagtgagaaaatattcactcctcacacctagccaaggagtgtctggagagttctgcggaaaccaggaggctgtgtgtcctctgtctatgcagcagctattgtcagctgtgcttggaaaggtgtgaagagtaggcagaggcaggctcttgggagccagggcgatggcagtcacttataagtggaacaagtgtggttctcatcttcaacagctcgtctgcttgtctgcctgtgtatgtcctccccaaacacagacatggccttcacctcccctgccttcatcttgtggggtggggagcagcaggaggttatggatgctggcctgataacatctggcaggcaggacttagctgcattttcagtgggacacagacattagtgtgaatccaaggaaagcaatcggaaagagggatgtggaaattgtcaagtccccaggacccccaggagtcaggacagccaagtggccaagagcacgggccttggtagacagggccagttcattactctgctttccagttatgtgaccctgagtacagagtttaaccctccaagtctcagttttctcatctgtgaaatggggcaaccttgtggagtgcttgtgaaaattcagtgagaagggcacgggaagcccttagctttatgcttagaacaatgttagttcatcttttatgaggaatatagaagaaactggaattgtttggaaatgggagaagagattaaagaaagacatatctgtctgcagatatttaaaggattatgatgtggcagaaggaacaaacatttcttttttttttttctttttgagacagagtctcactctgtcgcctaggctagagtgcagtggcatgatcttggctcactgcaaccttcgcttcctgggttcaagcaattctcctgtctcagcctcccaagtagctgggactacaggcgcacgccaccacacccagctaatttttgtatttttagtagaggtggggtttcaccatgttggtcaggctggtctcttaactcctgacctcaggtgatctgcccgcctcagcctcccaaagtgctgggattacaggcgtgagggattacacacctggcacaaacttacttctagtgttaagacaatatgacttaaagtatggcctttgcaggaaggcagattttatatcaataaaagatgtgacagagatgctcaggaacaaccagatgctgagtggcccctgcactcaggagctcagggagaaatgctcgttccaggtaggaggctggttggacccaatgccaattcttttccatcctacaacaccaagaaatttagcaaaaaggctcagcttttttactcttgaaagaatttatgaaaccagcaattgtgtggaataaaacagaaaaaatactttccaggggacccatagggtaccaaatggcaagctcatttgcttagagatgttagcaactttctcattgtattagtttgggctgccataacacacaaccacagactgggtggctgaaacaacagaactttatttcctcacagttctggagactgggagtccaaggtagaggcaggggacgggttcgtttcattggaggcctctctccttggcttgtagatggtggcttcatccctgtcttcccaaggtcttccctagtcttcacatgtctgtgtcctcatctcctcttataaagacaccagtcgtggattaaggcctgccctcatgaacttgtttaacatcagttgcctctttaaaggccttaacttcaaatgcagtcattttctgtggtgctgggggttaaggcttcaacatagggattttggggagggggacacataataatcatctccgagggatttatcctttgagtcgtagggactattgaccatgaccgcccttcggaatttttttcatgttctttgagctgtatcctttctgattcctttctcttaggtgaacggccctttccctgcacgtggccagactgccttaaaaagttctcccgctcagacgagctgacccgccactaccggacccacactggggaaaagcagttccgctgtccgctgtgtgagaagcgcttcatgaggagtgaccacctcacaaagcacgcccggcggcacaccgagttccaccccagcatgatcaagcgatcgaaaaaggcgctggccaacgctttgtgaggtgctgcccgtggaagccagggagggatggaccccgaaaggagaaaagtactcccaggaaacagacgcgtgaaaactgagccccagaagaggcacacttgacggcacaggaagtcactgctctttggtcaatattctgattttcctctccctgcattgtttttaaaaagcacattgtagcctaagatcaaagtcaacaacactcggtccccttgaagaggcaactctctgaacccgtctctgactgttggagggaaggcaaatgcttttgggttttttggtttttgtttttgtttttttttctccttttatttttttgcgggggagggtagggagtgggtgggggggaggggggtaaggccaagactggggtagaattttaaagattcaacactggtgtacatatgtccgctgggtgagttgacctgtggcctcgcacagtgattctgggccctttatgcttgctgtctctcagaattgttttcttaccttttaatgtaatgacgagtgtgcttcagtttgtttagcaaaaccactctcttgaatcacgttaacttttgagattaaaaaaaaaaacgccatagcacagctgtctttatgcaagcaagagcacatctactccagcatgatctgtcatctaaagacttgaaaacaaaaaacagttacttatagtcaatgggtaagcagagtctgaatttatactaatcaagacaaacctttgaaaggttacactaagtacagaacttttaaaccttgctttgtatgagttgtactttttgaacataagctgcacttttattttctaatgcagaggatgaataagttaaatacatgctttgaggatagaagcagatgttctgtttggcaccacgttataatctgcttattttacaatatacacgtttccctaagaaatcatggcagagatgtgagggcagaatatacacaacagatgctgaaggagaaggagggtagtgttttgcaaaagaaaaagaaaagaaccaacagaattttaactctattaacttttccaaattttcctatgcttttagttaacatcattattgtatcctaatgccactaggggagagagcttttgactctgttgggttttatttgaatgtgtgcataacagtaatgagatctggaaacacctattttttggggaaaaaggtttgttggtctccttcctgtgttcctacaaaactcccactctcaggtgcaagagttatgtagaaggaaagggagctgaaataggaacagaaaaatcaacccctataactagtgaacaccaagggaaaataccacaatgatttcagaggagactctgcaaaatcgtcccttgtggagaatgcaggcaacatggaatactaggaatgaaatcacatcactgtatcttttacatcaatagcctcaccactaatatatcttgtatctaggtgtctataatggctgaaaccactacatccatctatgccatttacctgaaaacttaactgtggcctttatgaggccagaaaagtgaactgagttttcgtagttaagacctcaaatgaggggagtcagcagtgatcatgggggaaatgtttacattttttttttcttcagaagtaacgctttctgatgattttatctgatatttaaaacagggagctatggtgcactctagtttatacttgcgctctgaaatgtgtaaacatagggtgcctacctatttcacctgacccatactcgtttctgattcagaatcagtgtgggctcctgcagtgggcgcgggtcacggctgactccaacttccaatacaacagccatcactagcacagtgtttttttgtttaaccaacgtagttgtattagtagttctataaagagaactgcttttaacattagggactgggagcagtccatgggataaaaaggaaagtgttttctcacgagaaaacatgtcaggaaaaataaagaacactttctacctctgtttcagatttttgaaacacttattttaaaccaaattttaatttctgtgtccaaaataagttttaaggacatctgttcttccatacgaaataggttaggctgcctatttctcactgagctcatggaatggttctgcttatgatactctgcacgctgccttttagtgagtgaggagtttggggttgcctagcaacttgctaacttgtaaaaagtcatctttccctcacagaaagaaacgaaagaaagcaaagcaaagtcagtgaaagacaatctttatagtttcaggagtaaatctaaatgtggcttttgtcaagcacttagatggatataaatgcagcaacttgttttaaaaaaatgcacaatttacttcccaaaaaagttgttacttgccttttcaagttgttgacaaacacacatttgatattctcttatatgttatagtaatgtaacgtataaactcaagcctttttattctttgtgattaaatcctgttttaaaatgtcacaaaacaggaaccagcattctaattagatttactatatcaagatatggttcaaataggactactagagttcattgaacactaaaactatgaaacaattactttttatattaaaaagaccatggatttaacttatgaaaatccaaatgcaggatagtaatttttgtttacttttttaaccaaactgaatttttgaaagactattgcaggtgtttaaaaagaaagaaaagttgttttatctaatactgtaagtagttgtcatattctggaaaatttaatagttttagagttaagatatctcctctctttggttagggaagaagaaagcccttcaccattgtggaatgatgccctggctttaaggtttagctccacatcatgcttctcttgagaattctatttggtagttacaattacagaaactgattagtttgtcagtttgcagatagatttagcacagtactcatcactcggatagattgagatgttctttcacatcagatgatctgtaacactgtaagatactgatctttacaactgtttaatcagttttatttttgtacagtattagtgacctaagttattttgctgtcccgtttttgtaaatcaaatgaaattataaaagaggattctgacagtaggtattttgtacatatgtatatatgttgtccaaataaaaataataaatgataaagactgaattgttctagc

SEQ ID NO: 237 - DNA, 116368 bp, Homo sapiens
gtcccccgggacagcggccccctgactacatctgcactggagaaatcccaaaagcaaacggccagtgcaaacaagagcagtccgcagcagccgtcccgagcacagctcccaggtcgcggggctgcagcccaggccgcgtccgcagcgcccgggcaggaacagacgccgagactcccgcagcatgacccgccacgccgatcgggtacggtatgcgcctctctctacccgtcctccattgcttgggctcccaggtcacagctgccattctgtcaagcagaaaaaccttgcaaagggcctccaggtttgccggaaagcagtccctgttgggctgtgttcccgtgcactcagctggagcaatttgcaggcgcgcaaatgcggagctcaactcatttcaagttttcattgccagagaatgagtttgtaaatatcgagtttgtctctggtttctggaaagcgagcccgtccaacttgcaggactctcggttcaccacggctcgactgcaagcgggcgaccctcagccttaccagccgcagggcactgcaagctctgccctcctgggcggcgagacgggcccggcttcttgtttattacctgtgggacaggggcttggcaagaaggacggggatttttaaaacaatatgtttagtaaagtcctctgaactcccacacttgcctccaggagacagaatcatctccctgaaggagggagccccttccccacaacgcgccgatcgcaggctccacaaagatgttgattgacgtgcacaattcggcacagccagtttcttggtcctttgtccttttctatttgaacaagcctttcaaacggatagggctaattttggataagactagagggagccctgggtcttaactgattatgggtgctttagatctggacttggaaatctccaagggcgaacactggggagcgtccgcaggggcagtgggcacagccggtcttcaggtgcggagagggggtcaaagggttccagcgattgctgggcttccacactctggtttcattttaacaagtgaagcaagagccgcttctcactgatagagggaatggaaacaaaagccgctctagtgcccagcaggatggagagggaacccgattctggtattgcttatgtatttatcacatacccagttccacggagcacaggttttctgcacttctgctcatcaggtatttaatggagcttccggtttcccccgcagtggtcacctctggctgccacctcagttttctgctcctcttcccaccaaattccttgaaagagtgggtggcatttgctgtctcccgacatctcctcactaccggtttgctccttcacacccagtcacctggcgtccgccctcacctctgagggccaacctttggcaaggccgccgaagacctccttgtagcaaaaccatagagcattttcaactccccccctcccacgcacacacacagcctctgtgtcattttgaactattggtcctttcctttctctttttgactctgtcctggatcctgcaatcccatgcttcccgggcttccttctgacctttgagttacaatttaatacttaaagggcttcacttcataagtgtttgtgtgcactgctctttcttcttgactctcttcccttgtcatcctgcagtctctctggataatctcattcactccagcggctttaaccactacatatacatggtgtctcccaaacgtagcctaatctttctcctaaaattccagtctctactttgatgttccatagagcaccttaaaatcaccgagttaggacctggatctgtcttctcccttcttctcccaggcctgctcttcctcttttctttgccactgcttaaatggcatttctcaagttgtccaagtcagacacaacagaatcaccctaggtgacttcttccctttcattcatgacaatcatcaccaaaccctgtctgatctcattgctgagtataattcatacacatacctgtgtctccacctcccccaccactgttatacttatggccagtattccctcaaattccattctggccacaacttcccattagtctcatctggggccagtcctgcccagcccatacctccactttgtttctgcactgtgtcaaatgatctttctttcttttttttgagatgtagtcttgctctgttgcccagactggagtgcagtggcgcaatctcagctcactgcaacttccacctcccgggttcaagcaattctcctgcctcagcctcccaagtagctgggattacgggtgcctgccaccatgccaggctaatttttttttttttttttttgtatttttagtagaggaggggtttcaccatgttagccaggctggttttgaactcttgacctcaagtgatctgcctgcctcggcctcccaaaatgctaggattacaggcgtgagccactgtgcccagactgtgtcaaatgatctttctaaaatataatatgatcatgcagttcattttggaaaagtcttcagcagattcccatttttattttctttcaagaataattttggtggatacacattgtccacaacttgccttttaccttcctcttcattgttatatcttactactcactccctctccacattttatgtaccatttttgtacattttatatacattttgtccatatcatatatgaatttaggcgtgttaaactatttattaaataagactttctttctgtacatctgtgaggtctgtgtctaacctctgtttttatttagacccagctgaaagcccctttctcttggaaacgatgcagatcatccttcctaatgggttaggtggccctctcttgttcccccagagcttcctttatttctgtgggtcagagcacttaccattctttattacaaatatctatttacttgtccatcccacaccagtccttagggatcaactctttttgtcttagtatgattacagttagtgcttagacccaggtgggatgctcaatgaatttttgtgcaatttttgtgaatgaccatttatgtttaagcattgaattagatgacagagatacagaagctttcaggaaattatcatctataatatgctaaggaataaaggttaagcatgattatcagggaaaacatagttttctacttatttagcaatggaaggctttagactttctggatatttgagaataatgcctcgagtctgtgggtctatcagctccctctctaattcacatctcaacaggtgggcttctcctattgctactgcacctatcctaaccttccccaagaaagagctgcaagaaaggccttttgcagttttggctctgttgactttgtgaaggcaaaggaatcctctttagcctggaacctggcatgggacaaggacactaaaggcctagataggtgggcttgtaagagtccttggataagcttgatccagagaaggcatccagaacctcagaatgggccagtgggcaagcaagccctctaaaaactctgtagaaagtgatggagaatttgggatgctagagataagaaaatgcagttttgatttcctaaaaagagatgtgtgcaatctaaaccttcagacagaaaggtgaatgatgattaactttgatagggagttatttaaacttgaagttgttctcaagctctttgagaccaaggtccttctcaggtatagatacacactactcttctcagaaaaaaatgcaggatacaccacatattgcactttgtatgaactttcagtgggttcatgacaagtcaactctgagactcctttgagttgtaatgaacctccagttaggaatctctaatcaaaggaattaattaattccacagacatttgggagagtgaagtaggtggcgaatagtggagccagcataagtcaaattaggcatgctttcttttttgagatgatcccaatatcatgtgtgctgatgaccatgaacttggagtcacaggacctgggctcacatccctgctctggcaattgctacttgtgtaattttctaagagatgattttattatctattaaaaaacagtaataggtgctggaggatttaactaaaataaagtatgtgaatgcacctgaaacatggttatactcaataaactttaatcagttcacaacattgatttcaggaaggcacagatttctgtgatcttcttctagattagaaaagtgcatatgggctggattaatgactggttgaatgcatttattaaaggagagctgattaacagatggattgacatgtgaatgtctttagtggcatgctactggcctctgtcttcattcctgtttattcagcatcattgatatctataaaggcataatataaggctcccatttgctaagagaaaaggcataaggattaggagtccaaaagttatcaataagttataatctgttttgacttttaatttttggggtgtatgtgtgcagagatggatataaaaagtcttatgcatggatcccaaaattaaattgcaaattactaggtatgtgtgtatgtgtatgacagaggcagatgggaagtagagggagagggaaagcggattgagaaaggaagagacagagagaggaagagacagaaagttagagagaagtggcagctttatatagttaaggtttagagatttaaacggatgataaaatcaatagtgatatgtttcttttaaaatagaattttgttgtagtaaaagaagtctagaggctgggtgcagtggctcatgcctgtaatcccagcactttgggaggccgaggcgggtggatcacaaggtcaagagatggagaccatcctggccaacatggtgaaaccctgtctctcctaaaaatagaaaaattagctgggcatggtggcaagtgcctgtagtcccaggtactcgggaggctgaggaaggagaattgcttgaaccgggaggtggaggttgcagtgagctgagattgcaccactgcactccagcctgggcaacagagtgagactctgtctcaaaaaaaaaaaaaaaaaagaaaaagaaaaagaaaaagaaaaagaaaaaaaaagtatagaacatgagacatgatagtcatcgtactctgtattgttcagaccatatttagaacaattgtatctagttctgggtgctacacattaatttattagcaactgtattggctattattatttgagcacctaatatgtggcaaccactctgctagatgttggagacaacagtgctgaagaagacctgatctcacggtatttacaaaggagcagaggtgttaggtgaggaaccaggtgattttaattcaatattatacttgctttgataggggaagcttaggtcctcgtgaaaccacctgagaagggatatttaatctagacttaatgggaccagggtaaacattctttaggaagtgatgtctaaattgagacccaaaggctgagtaaagatgaggaaggtgaaggtgatggagggaagagagcttcaagcagaggtgtcagtaccttcagtgagctgtgcaagggactaaagaaggaatgcaagagaggggatgagagaaatgagactggagtggtggctgaggccagaatggcatgacactgtcctacttgaagctgtaattgatctttacgaaaatggggagccaatgaagcttgtaagcagggcagtgtcataatcggtttggggtcttggaaagatcaatctggctgcagtatgaacaatgagttggaaggatggctggtaagacagagaccacttaggaggcactgtgtcatataagcaagaaaagatggtggccctaaaccaaagggtagcagggaagatgacaagagtggattaattcaaaagtgaattaggagttataagagtatggtgacagactgcaggaatgctctaggaaagatgggtacggatatttaacctgcaaaagagaagatttagaaggtcacaatgtctgtctttccctctaatgtggagggagataatcattgtgtttgtctttgagagggcaggatgaatgaatgaaagagccaaatgaataagagacacaaggagatacatttcagctcaatacaataaagaattttctaacaggcatcccaaggcaatgagttctttgtcacagagaaatttaagcaaaggcttgatagcaattcttggaaaagttggagaggcaggaatatggttagccaggctggaaggcattgacatttcttttcaaccctaggatttcaagattctgtgtataaagttcacatatctgagcttggtatttaaggcatcctgggatccagtcctttgttgggtggccatatgtcctggtttcctggtatggtcctagctgtttcctgcagctattaacagcagcctttttcatgcttgaaggggtcttagtttgaacaataaattttatgaccatccagccctacgacttgattttcctacctcgacccctgacattcttttagaactcccatgaactactcatactaaactatttgttgctctcagagtagaccaggcattttactacaagttggtttacttatgccatttcctgtgtcaggaatacccttcctctccattgtctgtgtacctcctggaaaatataccttttcattaagtcctaatctaaatcaaatgctaagtccttcattaagcttttttttttttttagacagttttgctctttttgcccaggctggaatgtaatggcctgatctcggctcaccacaacctccgcctcctgggttcaagtgatgctcctgcctcagcctcccaagtagctgggattacaggcatgtgccaccacgcctggctaattttgtatttttagtagagatgggttttctccatgttggtcaggctggtctcgaactcctgaccttgggtgatctgcccgcctcggcctcccaaagtgctaggataacaggtgtgagccatcacgcccagccttttttctttttaaattgtctttttataatgtgataggttgcattatattactgaatatataattatttttatacttttttgagccctttccctaaattatcatctcctaggagtaagatactaagatctttgaaaaatacagtaacccattggaatgaatggtgctttgtttgaagcaataatctttcagaggcaaattttcgatttttaaaaaaggtcatattttcattatatgagtgatggatgcattttgtggaaaaaaaatcaaaaaaggaaagtacaaagaagaaacaaaaattatctacaatctcactatttagagataagtatattaactcattaatgaatatcccgtctatattcttttatgtgtatgtagtcttaaaattggaattgtccatagccttgtgtaacctgcttgtctttaacagcataccacgaatattgccccatgccattatatatttttcaaaaacataatcttcaatgggtgtattgtattctagatgtagctgcctcatgatttgtttggcaaactcctgcttgatatcaggctatttccacatttttgatgttgcaaaaagagctataatgaccaactcccaagacaaacatttatgcatccatttggtctgggacatttatatttttctaagatggcaaggcaattattgatggaaagaaggatattgagtcactaagaaagcatgagttaaaaaaaggctaactttgcttttaaaatgtcatttttattttatgttacatatatcaattacatatgagatttttacatatgtgtatatacttattagtcctataaattaatgaaggtgccttgtccaatttggaaatgtgtcaacaatctgtaggcttagtacagaagggattgataactgataagtaaacttcttgaacaaaaaattgagtttgaaatctaaaaacttcagtgcctttgtatcaatgtgagacataatttcattcataagctaaatataagggaaaatgacatgtttgccacagaataaaggcatttctgtgaaaagaggggcattgcactgcctagtgttttggtgtttggagaaggtatgaggccacagacttgaaaccttattccaaagtaaataatttatcgtcttaaagacccaacaagcaggaaggtgtccattgtagagtggaatatttttatctgaggagaagcaggctttgggatacactgtgaacccatttgaccactttttaatagaataaacgaaagatgttgttatgggttgaattgaatcctctcccaattcaaatgttgaaatcataatccccagttccttagaaggtgaccttatttagagacagagtcttcagagaggtattcaaattaaagcaggtcatgaggatgggtcctaacccaatatgactgatgtctgtataaaaaggagagatttaaacacgggaacatacacagggaatagatggccatctaccaagccatggagtgaagcctcagaagaaaccaatcctgctgcccgacaccttgatctcagacttctcatctccagaatgtgagatgatacatttcattgtctttttttgttgttattgttttgtttttgttttggctcactgcaacctccacctcctaggtttaagcgattctcctgccttagcctcccaagtagctgggactacaggcgtgttccaccacacccggctattttttgtatttttagtagagatggggttttaccatgttggccaggttggtcttgaactgtgacctcaagtgatctgcctacctctttctcccaaagtgctggggtaacaggtgtgagccaccgtgcctagctgatacatttcattgtgtaagccacccactactttgttatatggagttaactaacccacatttcttgaaagcataatgtccttagcatggtttcagctggtaacactcagtacaacattatttcactttctagtcaccacagagtttgctcttcgtcatggaaatgatcgggacagacagtgctttgcagtttcacggcttgcaaatcattttcatttccattatctccttgaccctgaccaaagcgtgtgagatgggaattctcatcctttctgttttagagagagacaacagaggttcagagaggctaagtgaattgttcaaggctgcacagcttggaagtggtagcgctgaaactcaaacatggatctcctgatgcgaaatactgtgctcttttaattaaaacttaatgtgttcgtcttcatgaacatgtcaaatatcatcttccttctctgaagtttgaaaagacatagtttgtagcatgctgagccacttttccccatttttataactttcataagaatgattttataagccctcttgttggactatatgtgaagcctgagggcacctactctgcctccgtcatcattatcaaatatttaccaggaatccttgatttatgctcctgtgtttacttgcaaagaaaatttcgtctccacttaggagctttgtttactaacaaaataggctttctcagtacacagtttgactacccacaaatccaactgcaaaactttggatattttggatatattcgagtttttccatcattaatactcttcagatattaattcaacatagtggcatgagggacgcctacattttcctggaagctgcttgactttaatcagcaggtacaaatgcaagattatcgtacttttcccttgggtgacctaagctttttcttggcacccgtgagtgcagagcacttggttgtctcagagtgtttcagtggcttctacacaggggagttattagtttttaaccttggggataattccataagaatgcaattcttttcctccctgacagaacaaaatattgcttgtgttaggttatccctgttatgcaataaaaccagtggttcccagatggtgaaactataagagatctataggtagggctgttagatttagcaaaaaacaacaaaacaaaagagacaaaaacaataaaatcccaggatgccccagttaaatttcagtttcagataaacaatgtatacttttttaggataaatgcatccctgatattgaaaatactaaaaaagtattgtacctggcagccctatctgtaagataattttgtgggtggagtcttaataatttttcgatattttaaaagtctatgaaaattatgcatttacctaagtaagacttcagaggttactgacaatgtgttaaatttcctcgagtttggttgggattttgttttttgacctaacttgaaaaagcactgctcatctcgtgggaaccacgacaattatactacccattttcttttcttttcttttttctttctttctttttttttttttttttgagacaagagtctctcactgtgttgcccaggctggagtgcagcggcgtgattttggctcgctggaacctccacctcccaggttcaagtgattctcctgcctcagcctcctgagcagctgggattacaggtgtgtgccatcacacctggccaatttaaaaaaatatatttttggtagagacggggtttcaccatgttggccaggctgatctcgaactcctgacctcaagtgatcctcccgccttggcctcccaaagtcctgggattaaggcatgaggcactgcgcctggcctatactacccgttttcaatgacttagattctaggggtcatgcaaagcccatgcattatctcttgcaacgctcaaaatcagggattggttaactatggcctgcaggccagatattgtcctgcctgtttttgttgttttctccagcacgtgtcaaagttttgtttcacacttgcaaagcaaaagacagtgaaaagaaaaagctggttcacagaaacagtcttaggaaagggccctattagaaatagaaatatgtagatctgtaaatctcaaatttcagctgcatcagaatcacccggagggcttgtttgaacacctgctgctgagccccacccctaaagtttctgatccagtaggtctggtgtgggcagaggatttgcgtttcgaactagttcccaggtagtgctattttgactggtttgggttcacactttgagacccattggtctagattctaaataaaattatttatttatatatctatgcaatttactttattgtttatttatttaattgacaaataaaacattgtatgtatttacgagatacaacatgatgttttgatacatgtatacactgttgaatgtatacatataaaacaaactaacattagtttatcacctcacatccttatcattggtgatgagaatatttataatctgttcccttagcaattttcaagtatataatacattattatgccctagtcaccatgctgtataatagagtttgagaacctagtcctcctggaggaataagatatcttttctaactaaaactttgtaccctttgaccatcaacttcccatttctcccacccctaggctctgtaaccaccatcctattctctgcttgtataagtttgatttttttagattccacatataaatgcaatcatgtggtatttgtctttctgtgcctggcttatttcattaagtatcatgacctccaggttcatccagattgtcgcaaatgacaggctgtcattcttgtttaaggctgcctagtattccattgtgtatatataccacattttctttatcaattcatctgttgatggacacttaacttgattccatattttggctattgtgaataatgctgcaataaacataggagtgcagatatctcttcaacgtgctgatttcatttcctttggacatacacctggtagtgggattgctagatcatatggcagttctatttttgattgtttgtgaagtccctacaccgttttccttaatgattgcactaatttacaattccatgaagagtgcacaagggtttccttttctccacacccttgccaacacttgttgtctttctttgttgttgtttttgatagcagatattctaacaggtccgaggtgatatttcattgtggttttgctttgcatttccctgatgattagtgatgttgagcagctttcctgtacctgttgaccttttgtatatcttcttttgagaaatgtctattcaggttcttcaaccattattttttattttactttaagttctgggatatctgtgctgaacgtgcaggtttgttacataggtatacatgtgacctggtggtttgctgcaactatcaacccgttatctaggttttaagccccacaagcatgaggtatttgtcctaatgctctccctccccttacccctcagcccccaacaggccccagtgtgtgatgttcccctccctgtgtccatgtattctcattgttcaaccctcatttaggagtgagaacatgcggtgtttggttttctgttcctgtgttagtttgctgaggatgatggtttccagcttcatctttaaatcaggttgttttcttgctattgtatattttggatcttaggcccttatcagatgtatggcttacaaatattttctgtgaatatttccttgggttgtcttctcactctgttgaaggtttcctttgttgtgcggctgccttctgtttgtgtaaataaaattttaatggaacatagctacccaatttgtttccatacagttcatgaccactttcgcactacaacagcaagttgagtcattgtgacagagattgctggatggcacacaagacctaaaatgcttttctggtcctttacagaaactttgcctacaactgctcaaaactctcattgaagctgtactgttattctcatttttagaatgaaacaagtggaaaactgaaacttgagaaaggtctcacggttcttagaattcaaactaagatctgtttgaattccaaagcttctgctcagaagctgacccaagaggggctggttgtttgttacctttgtcctaaattgataaacaaaggggaaactgatttgtgacttcttgttaaatactgtccttttcaaagacaagacagatggtatggtgtagtggtaaagtgctcaggctctggggccacactgcttacatcccagctcccccaatacattcctctatatctcagcttctacccctatgaattacagataatgatagtacctatttgcatgattgttgccaggtttaaatgagatcatgtctgaaaagaaattacaagagcacttgacatgtggtccacaagacatttgttattttaatttcaaataactgttttttcaaagtaaggacgtctatggaaatgaaaacaaagagtgtggaaaggttgttaaccaaagcatctcctgtggctggttgttagaacatctccactaggaagtttctacagcacagtggcccctcctttttagacgatagctaggagagatacattttcagcttctcaatatttatatttatacttatactttggcctgtccacatttcttagtcccttggccagccagggttgccttgaaaaggcctgtggtgagataagatgtttatccagtgattgctggaccctgaacctcttattattgttacccctgatatttatagtcccaatatccattcccagtgactccagattgattaaaaatgtagtcagggctgccagaaaatggccttcttaatacaagacaagcaattttcctcagaaacacctccatctataatttgatccttaggcaaaagaaagaaaagcaatcagttttttcaccaatattcttcaccctttgaagcatattttcttatggaatcactaggaataaaatctgtgtgtggtgtgttaagcatattagaatggccttgatcatctgaccagattaggagataaagttgttccctgagagggatgggaatggaaggctcaagacattgtccatgaactagtcaatggatggatatgatgtagtcaaagtcctggcagggaagcctggaggctttgctgaagtgaagcctcatgaatgcatgaatgtgtgtggataacatcagcagggttttgtaatttttccagcatgttttgggtgccttggaacaggggtaagaaaatagtgttatttttctagggttagggattagtaccactaggaagtgagaaaattcttaagaactctggtttttttttttttttttaattgagacagagtcttgtcctgtagtccaggctggagtgcagtggcaccacctcggttcactgcaacctccctctcctaggtacaagcaattcttatatctcagcctcctgagtagctgggattacaggtgcacgctaccacatctggctaacttttgtgttttttttgtagagatggggttttgccatgttgcccaggctggtcttgaactcctggcctcaagcaatctgcctgccttggccttccaaagtgctgggactacaggtgtgagccactgtgcccagccaagaagtctggtcttgggtgcctaggttggggagggatggaggtagaagggcccagcaaccctgctgccactgacagagaataaagctgcaggcagttgcctgatcccttttctcctctgcctcaaccctccacactccagttatattttccttcccttttcttcggcattctcttcctttgttaaattgttcaagcaatattagttgaacatccctgtgtgccagggacagtgctggggtttggggacttaatgggagggacatagacttggtgtctacactggtggggcttatagtcctgtggcctggggtgcagaatgtcaggagttgggtaagtgctcaaggcataagcataggggagagaaggatgaatgggaggggataaggtggtcagggaaggtctctgtctggtctgagaactgaggatcctctgaaagcagaggtggagaaataggaggagttatattttccaaaattagccagctagtaaagtggcagtgctgaggtttgaacctagatgtgcctgactctaggaaatgtctgcttttagcctgggcaatacagtgaaacctcttctctacaaaaaattaaaaaattagctggcatggtggcacatgtctgtagtcctagctactcagaaggccgaggcaggaggatcccttgagcccaggagtttgaggctgaagttagctatgattgcaccactgcactccagcttgcgcgacagagctgagactctgcctaaaagaacaacaaaaacagaagccccagtccctaccattacacaggcaatatccacataacaaacaagcacgtggaccccctgaatctgaaatacaatttttgaaaaaagaaatataaagtatttaaaacaatacctggcacatagtaaacacataatcaatattacgtgttattattttaaaaactgtttacttttcactaaatcttaacaaaaacattaaacttcctctgcaagcatctatatgtaactgtattgtgttgccgtgaaggaacttgaacagcaacaagacaaaaaatcattcattcacccattctaatcatttactatggatgagccacgttgtgtgtgtaaatgcacaaggcaaaatcctattgtgcagctgtgagcaccaatgctgaggaatgctgagaaaagcattgttagcctgaggttggggcaagacagcaagagtccacacactcttccaattcatcacaatgaccccttcacgccataggatgacagctctcattgaaatgcagggcatgtacatcccacttgttgattcctttcattcctagacaaacacacgtctaataaagaggcacacatgtctgtccaggtcacaagcctggttgggaatgcgggtatttcagagaggttaggctgatgctagcatgttgctattgcatcgtgaactttgaaagtcctttagcactaagtcatgttgaccgcatcgctaattacatgctgcagcccactgctaagggacgatgagaagaactggaaattagaattggcagacttcgacatacaaagttcaacactttctaagccagatattgtagaactttcgggagatgatggagatgaaatctctgttcttgggaaactttcagtttagtaagaagaatttccaatagaacaaactcaatagaggaggcatggtatggtgtaaaaatcatggactttgaacgatgcagactgggtttaaatcatttctctaccacagactatgtggccttgatcaaattatttcatctttctgcgtcttggtttcttcactcataaaacgagattatagtctagcagcggtggctcatgcctgtgatcccagcactttgggaggccgaggagggtggatcacctgaggtcaggagttcgagaccagactggccaacatggtgaaaccctgactctactaaaaatacagaaattagccgggcatggtgggtgcctgtaatcccagctactcgggaggctgaggcaggagaatcgcttgaaactgggaggcagaggttgcactgagccaagatagtgccattgcactctagcctgggcaacggaatgagactccatctcaaaaaataataaaaataaaataaaataaaaaacgatattatataaatacttcatgcaattctataactaccttaatagatggtaactattataatcattgctgtgatattgattactgttattatcagaatatagcaaattcctgctgtatcactgatgtggtgactgcacaaattactcaaactcttcacctataaaatatgataattctaactgccttatttgtgtaattcaggagataactgtattctgccattaccaactaatatatttatatattttctgttttattccatccaataaaatgtaagctctctgagcagggacttggattcttgtgttagttactggactcttgtgcctagaacagtgcctaggccatagtagattctcaataaagtatgctgctgtttaaataagtggacaaggaaataaatgaatggtcaatcttatgttaaatgttcagcaaatggtaggctcttggtacatggtagttgttactgcgcttagtatcattattatgattagaatgtggtgggtgccgtgagaggaacgaatacagagagatcgctcccagctctgtcagttggtgatccttgttcttagcactggcatgtcatcaattgtgttgtagttgggagaaacaaccaggccattgtcaatagtaaggtcacatgagattaattgcaaaaataagggtttctgaatttttatcagttcttaggaggaaagggaaatagctgcagaaagggagggaagattgaaaaaaggagaaaaacatcatcttttgcaaaatattttattacatgaggccataggctacaagtctgtgatcaggatttacccagccccaaacttagaaggcatgcaaaaccagctgcaccagtcagatgacacaaagacagtattggtatagtggctccaacctgcagctgggagcaaaatgagaaactgtccgtaagagaatcagttctgcttctgaacttttaaagtgactagggaaaaacttctcaactgcccctcacttgagagattggaggagtttcttttaatagtaataaaactaaatgtcccattgcatagtgtgctgttgcaagaaatacctagaaactgggctctggctgggcggacctgaatttgaatgacctgaatctgtcccgtgctaggtatgtaaatttgggccagttacttaaacttttgtgagcccctgcaaaaagagaaaccagtatgtattttgtaagactgttgagagaattcagtaagataatctctgtacaacatctgtgacattttagttcttcgaaatatggtggctactattattagcaattagtgctacatggattattgtatttaattcccacagcaaccctatgaggaagggattatatgcattctcatttacatatgaagaaatgaaggtccagagagggttcctaactcagtcaagtccatagagctagtgagcatccaagtcatgattctaaacaagccagagagtccagattttcagcaattaacaagttgtatagcatctctcataagagcaatggaagcttagcagggcaacataaggtccagaacttccggcattctcttgcataatactctgttggcaatctgaggtaattgtatttcaaatatgcggtgactctctgtttacaaaggattatgagagacacagacgtgtcagagaggcaatgtcaggtcaacttggtcagcttatcgtatgtctgtcttcttgatcaatccaaaaaaccattgcttcatctcttgcttaagtccatcataggattttgtgaaatgtgtttctttcttcttttcttagcttacccttgacaagtgttctgtgtatttggcatacattaaattgtgcataccaatattttctttctctctctgtttccttcaggaggtgaaatagtaagaacaaggtatgtataaagatccttacctttccttttgatttatccaggaaaaagtaagaccaaattctgattatttaattgaatttgagtaactcttttttggttattatagggagaggactcagctctctgagagagtttaaagaagacagagaaatagtagatgcttagagttggaaagaagcttagatgttgtatagccaaagtgcttctgaattcagatactttttaagaaatcctgactaccaccacctagcctttgctgaatagtgactgttagttcattttttataactatttcattatctctttcatgagacaaaatatgcttctctgtaacttctagttttgcctagaaaaagcatgcatgggagcctgggtatggtggctcatgcctgttattccagcactttgtggggctgaggcgggaacattgcttgaggccaggagttgtagacaagtctggacaacatagcaagaccctctctctcactctaatatttattatatatattaaatatataacatattatatataataatataaatttatattaagtttataaatataacaatataaatttatactataaatattttatattatatatctagatattaatatctagatatatctctctatataatataattatatattaaatattatacagagatatatctctatatataattatatattaagtattatatatagatacatctatataatattggtattagtattataatataatatagatatagatatatagctatatcttttatatctatacataatagttatatatctagatatataatacatgtaatatatatagaatacctaatattatatatagatacttatatattatatctctgtatataatattatatatctctgtacatgttatatagatatataacacataatatataatataatatataatatgtctctctagataatataacatataataaaatattatacatatataatatatttaatatataatattttctatagatatataataatatgtaatctattatattacatattatatatagagataaaaaatatatagagagatgcataataaagcctgtgcattttgcattaactttcaaacgtttgaggaagggcaatgcacacccaccttctcccctcatctacgccacacgttcaggctgcacagtcacaagcgtgctcattaaatatccatttcctgaacagcagtaagagtgagacttttgaaacataaattggaccatgtcattgtctgattaaatccctccagtggcttttcattacatccaacatgaaacatgaagcctccattatggcctgtagggtcctgcataaactagctcccaattacttctttgacattgtctcttactgctgcctcgtctctcactctgctccagccacactggcctcactgagcacattgggctgctcctacttcagggcctttgcacctgctattttttccaagacacctggcttccccctcatgtcatccgggtctctgttcatatgtcatccctttggagagatctttgttgctgcctaactgaaaatagctccactcgttactcctctgttttcttgctcttgtgctcttttttctttatcgtttatcagctacttgacgttattttcttctcctactaaaatgtgggattgctggggcagaggctgcatcctcaatgcttgacgtatactaggtgctcaatagaagtttgctgagtaaataaacaaatgaatgagtgaattaatgaattggttgggtgataaggacctctcctcatcctggtcatgcctctcttaatgctgtccagttttgtagtgacctcttaaaacgagctatccagaggtgaacacaatctagacggagtctggctaggctcagctgaaacattcccctcctggatgtgggcaggaatcattattaaagaagcctaggataaaatgaagtcatttagggtggtagccaaacatgggcttctatagagcttgcaggtaacccaaatgcctgggtttcttttacaagaattgctgttagtgctggtctctcctagtgcaaagttgtatacctaaattttgtattctgcttcaagaatgttgtcccagatagatagatctggctgtctcgctcagatcttattttttaaactcttgatttcaacctgttgatatatttttgaattttgatacagtccatggtacattgtatgtggcagctacctatcactggaatattgagttcaagaacatatcttacatctgtgattcaggaatcaggaggctaccatctgtgtcacctccacaggtgtctcttgatgcttaggaagctggagaatagatactgaaataatattgcagaaaacctatcatttctgatcttgtttgcacagataaccagctgaaagggacaggaagagggatctcaattctgctgtccaaatctcatgtgcataatgacaatctcaggagcatagttggcagagtctataaactgtttctataacgatttctgcaaaaaatctgcaggacactaaggcagcctggatgtgggatgaatagattgagggagccaattctcaggatatggcatcttaacaaactgctgacttcctgctatgatgtgaatgtttatgtccttcccaaattcatacgttgaaatcctaactcccaaggtgatgatataaggaggtggggactttgggaggtgattaaatcatgagggtagaggcttcatgaatgggtcaatgttcttatataaaagaccccacagagacccttacccttccataatgtgaggttacagtgagaagacagctttctatgaggaagtggggtccttaccagacacagaatctgctggtgccttgatcgtaaacctcccagcctccagaactatgaaaaatacatttatgttatatataagccacccagtttatggtatttttttatagaagcatgaatggactaagatactttaccatctcccaattaaaacacacctttcatctcactatccttgatatcaagcggtacttgacacagcgtaagctttcaataagcattagctaatactgcagtggatgcttactaaatctgtattgaaccactattatttgaatttggaaaactctggtttccaaaatttaggcaattgtctgataatgaccagcattctctctgagatcttaggattttgaaatgacatgtccaggatgcccaaggttctggtcactttttcatttgcaacctattctttttgggggtcacaagaaggtcagcttacaacaaaggttaatctgtggctcctattatcttctgaattaggaaacattatcaagtatcaagactcatcaaacatttactagatcctctgcctttagtagactcaggtttctttcagcacacagttgaaattcccattcctttgaggtcttcccagttttgtaattcttattgggaaatcaagagaaaagatgattcccccacttaataggcacttgaacttgggcaagttgtttgatatatttgaagttgttttcatatctattcacaatgataatactgtgaagattttataaatattaaattatgcactatgtaaatgtccccagtaggttgcctggcaaagtgcaaacaattaccgaatactagctaccacttaaaagaatgtctgttccatgtcaaatgtggtactatgtatacatgtttgctttttcctttctctactccctttctgaaatttttgagactttgctcctggaatttcctctgcttgcaatgcccttcccctctttatcaacttaaaaatcccctatctataatttaaccattataatacatgcccatctgccatatgagctgtcctgatctccctgtcagaggtcctttagctctgtgacatatctatggacagcctttctgttttattgattgcaaagttggaagagtgagtgagccttgatctatctgacattaactctagttcatagggcttttttttttttaaagaagtattctccaaatgaaaggtattattgttcttaaattctcacaactgccccacaaactctgtttacagtttgttgccattaagtttcaggatacttgagatgtgtacgcaagaactagggtctcttctaggctgttttatttaaaagtaaaatgaaacagaaaacctgatgaaagagatatggcagagggccaagttgctctgacaaactcccagttcttctaattctgggggatgcagagggtttcatcacacacacaggggctcgttaagagcagtccacaccatgactcaaatgcatcagtcctcctgttaatcatcaggttcagaggataaccgggttgactctggggacaacgttgaatgcatgaacctgagaactgaaaatcagggttaatgttccttttctgtgcatccagatgctttggaatttgcttctctgcaggtataatctcggttcttttttaaaatagcttttttgggatataatttatatattatacaattcactcttttaaactgtacatttcagtggttttaaatatatttacagagacgtgcaaacatcaccattatgcaattttaggacatttcatcactccaaaacaaaaactcatacccgatatcggtcaataccccatcatctgacaactgctaattgaccttttatcccctgtgggtttgcctcttctagatgttttatataaacggaatcataaaacatgtggcttttgtggctagcttctttcacccagcgtaatgttttcaaggtttgtgatgctgaagcacatataagggcttcattcctttttattgctgagtaatatttcaccgtatggatataccccatttcgtttatccattcatcagttggtaatgctgctgtgaacatttgtgttcaagttttgtgtggatgtatgtttacttcctcttgggtatatacataagagtggaacttttgagttatatgtgtaactctatatttaacattttaagaaactgccaaactgctttccaaagtgactgcatcattttacagttcatgtttccacatccttcctaacagtttgtattaactatcttttaaattttagcatcctagtgggggtaaagtggtatctcacagttttgacttgcattttcctaatgatgttgaacaaactttcatttgcttattgttcatttgtgtatcttctttggagaaatgtctattctaatccattgatcattttttaaaaattggattatatgtctttttattgctgagttgtaagtgttctttaaatgttctagatatttgaacattatcagttatatgatttgtaaatattttcttccaacccgtaggtcatcgtttcactttcttgccatattgacaataatgtcttccgatcatgaaaaagcagatcttcccaaatttaggtcttctttaatatatctcagtgattctctctaatggttagtgtgcaaatctcacttattttgtcaaatttatttctaagtattttagacctttgactattataaatgcaattttcttttcttttcttttcttttttttttttttgagatggagtcttgctctgttatccaggctggagtgcattggcacgatctcggctcactgcaagctccgcctcccaggttcacgccattctcctgcctcagcctcctgagtagctgggactacaggtgcccacgaccacacccggctattttttttttttttttgtatttttagtagagacggggtttcaccgtgttagccaggatgctcccgatctcctgaccttgtgatccgcccacctccgcctcccaaattgctgggattacaggcatgagccaccgtgcccggccataaatgcaattttcttcttaacttttagattgtctattgttagtgtataaaaatacaactgatttttgtatttttgtcttatatcaagcaacattcatgaactcattagtttcactttttatttttggtagattcattaggattttctatatacaagatctgtgaatggagatagctttatttcttccttcccaatttggatggcattcatttatttacttatttgcctaattcctcaggctggaagtacaaagttgactagaagtggtaaaaacagacatttttgtcttgctcctgatcttaggggaaagcattcagtctttcaccattaaatatgatgatgttagctctggactttttgtagaagccttttatcaggcagaggaagttgtcctctcttcctagtttgttgaatgcccttcactgttgtatgattgcaaggggaatcacagaaatggcagttttgcttcctccctgagagagttccattgtgctggtaagcacgtgatgacacctttgcagcggcaagtgtaaacttccttttagatttgaatcgaaacacattcattgagttaaatctcaactttttggggctttccaatccaagtagaggggctttattattgtggttgaaatgtgtccttcaaagctgtttccagaatcaccctaccctttgccacataagagctgctcattttctcataaggttaaaaagaatgtgaaaaaggtggattgaaacatttttaactttacttacatataatctctccataaataaagggattttcttagaacccatgtcactactaagcactctatgcccagcactttagaagatgctgagagcacgatagcagatgacacagaccttgctctcttatatatagagtaatggggaatatttgtttattttgtgtgttttagcactgaggtacttgcttaacatgcattattacatcatttggtcttcatatcaaccctgtgtgaaaagaacaattattttttaaaagaaactcatgttttagagaagttaagcaaggtctcatgcttgaaacaggcagactcaagtcagtgggactccagaatccaaacttttctttttttggggatggaattttgttcttgttgcccaggctggagtgcagtggcatgatcttggctcactgcaacctctgcctcctgggttcaagtgattctcctgcctcagccttccaagtagccgggattacaggcgcccaccaccatgcccagctaatttttgtatttttagtaaagacgggattttgccatgttggccaggtcggcatcgatctcctgacctcaggtaatccacccgcctctgcctcccaaagtgctaggattacaggtgtgagccactgcgcccggccacagaatccaaacccttattctctatagcacattgcttttttcccctgctctctaagaatttatgctcttattcctgagacaagaaatactgaaaaaacagggaaccctaagagagaaaagtattcattttaagattttatttggaaacaaagttttaatgttaaaaaatatggctaaaagccacttagcctgctaactctcctttacaagtgaagaggcttgggtttgcagtgacaaagctagtgaataacagaggaagtactacaagtcaaatttctttgtgccaagtagttcacttgggaaatatttattgtgttcctattatattccaggcagggtgaaaagctctgtgtagtgcaaggataattggtccctgcatttggagagatcaaaagggatggagctgccttaaaagaggttgcagacgggctgggcgcagtggctcacccctgtaatcttagcactttgggaggctgaggtgggtggatcacaaggtcaggagttcaagaccagcctggccaagatggtgaaacctcgtctctactaaaaatacaaaaatcagctgggtgttgtggtgggtgccggtgatcccagctacttcagaggctgaggcagagaattgcttgaacccgggaggcggaggttgcagtgagccaagattgtgccactgcactccagcctgggcgacagagccaaactctgtctcaaaaaaaaaaaaaaaaagagagagattacagacaatatggtaacacagttcattgttgttctgtgtgaagatgagggcaaaactggggaggctcacagcggagtgacacctgacttgaattttcataaatatgttggtatttgccagggaaattaggtggagaagggcattctaggccaaagcaacaatgtatgttaaggaatggaggtatgaaagagcacaacttaatcaaggaacagaaaatagttctctaattaagaaaatttaacatttatgaacactattctatgctgggcattgtgctaggtgatttacatggattatttcatgtaatactctcaagaatcctatgagatggaaacagacaagaaaactgagttttaggatggagaagtaatttgcctaagggtcatataaggtctcacagttaaactgtggtcgagctgggatttgaatttagggagtttagttttggatctagggtcctatgagcctggttaagcagcttgaatttaccctctaggtcagtggtcctcaaactcgcatcagaagcacctggtggagttgcgaaaacagattctgggctttaacccagagtttctcattcagtaggtatgaggcaggctccaagcatttgcacttctaacaagtttccaggtcattctaaccctgctcatccagggaccatactttgagaactgctttgataggaagccaaacagaaaagttttaagtttaggaggaaaaggctggatgcgctggctcatgcctgtaatcccagaactttgggaggccgaggtgggtggatcacgaggtcaggagatcgagaccatcctggctaacacagtgaaaccccgtctctactaaaaatacaaaaaaattagccgggtatggtgacacatgcctgtaatcccagctacttgagaggctgaggcaggagaatcgcttgaacccaggaggcggaggctgcggtgagccgagatcgtgccattgcgctccagcctgggcaacaagagtgaaactccatctcaaaaaaaaaaagtttagaaggaaaatcattagatttgcatattgtttagggctttctgggtaatgaatgggaataaattataaaagagaacttaatgaaatggtggtcagaggggacagagagtacaaacaggaagagcagttatgaaaagaccttttttttttttttttgagattgagtttcgctcctgttgcctaggctggagtgcaatggtgcgatctcagctcagctcaacctccactccccgggttcaagcgattctcctgcctcagcctcccaagtagctggaatgacaggcatgtgccaccacgcccgcctaattttgtattagagatggggtttctccatgttggtcagggtggtcttgaactcccaacctcaggtccacctgcctcggcctcccaaagtactgggattacaggcgtgagccaccgtgcccggctatgagaggaccttctaatgtgtgtccagaataatgaagctgaagggatgaacctaaacattatcacataggaagaaaatttaggaactaacagcacctgataaaggatggcagtagttgtcattattaactagaatctgtagatatggtgtctggcaagaaacaagagaggaaaggattgaaatgaacaaaaagtgagttgagtttaaggttttcctgaaaagaaatgaaattgggagggtgaacttgttgtgtaggtagctgcgttttggacgtgttgagtggaggccctcgtgtggtgtagtagagaggcatcacgctgcggcggaaagaggactgagctggcataggagacctggtttttagaactggctcagtcaattatctgaccgttctggagatgccccatactcttcgaacctccatttctttctctgcaagtggagtttgtagcctgcctatgtgagtgagactggagggtaaaatatgggagtcgtcaaccctagggtaaaacttttggtaaaacagttgtttttcctaattatcctgtcactcatttgtgttcatatatcacatagtcacattataaagtagactcaaaaatgaaaaccttcatgtggtttacaagcctgctagcgactcagcccttctgaaaggggaaattttctccattcatctggacacttagcatgcagggtttagagtagctgaaaagaaatagttacattgagttttgaattttaaaatgttttattatgagctagagttaggaacaaagctgagttatttcctagggggaatgctttttaaaacctcaatatgaataaatgcatttttagtgtttaaagtccagtatatatatatgtgtgtgtgtatatatatatatatatctatatgtgtgtgtgtgtgtgtgtgtgtatatatatatatatatatatatatatatatatatatattttagtaatctccagtcacagcagaaaatggtttaaagctattagctctgtcccttattgtaactatttaattctagggtgttagcaaatggatacctatccccatgtctttcttatgatctaattgaaaagaagtgacttcactgagtatatatatggtcatcataatcattaagtatctattaattcaggagtcatacttaataccttcctgcccctcaactcccatatccagttcattaaaaagtcttttttcctaactcccccacttgtcttcctctccacgccgccatagcctcctctgtgtaagctgtcatgatcttttgtctggcttactgccagagtttccaaactgatctgctatatccattcttgactccctctgattcatatctacaccgtgcagagattaatgcttcaaaatctgattaagcctccccctgcttaagccttttaagggctttttgttgcctttagggtaaagacaatatcacctaacatgacctcggaggccccacatgaccggcctctgttaacctctccagtctcacttctctctatactcacttctgctctccctgcactagtcaaactggctgcctttttgtctcgtggatgtgccatacctccatcttacacaggatctttgcctgttctctctcctctgtctagaagtctttgctcctttcttaatctggttactcactcccacacacccttccaatcgcagctcaatgaacacttactccacaaattcttctctgaccctcttgactaggtaatctgaatgatatttgctcaaatcatgatttacctctatatttcttcattttccacagttgtaattttacatttatttctgtgtctacttgattaatgtggagagcaggagctatgtgtgggtcagctccctatgtagtacgaccagttcccagaagagtgcttggtaccttgtagaagctaatgaatatttgtgcaacattcatacagggcagagattattctggtgtcggggctcatgtgtagattccatagggagtaaatgtaatgcataaaatttatgccataagttaaagtcattgaaagttgcaacagtgttgatgtcagctttcgactgtgtaacaattaatagcacaagtctagtttgcatttgaacaggtatatgctgttcttctactggagaatcctgtgggaccatagactacccataaaactttgcttttgtggtttagaattgtaactgtaagacttatacatgtttgcagtcctggattgtgggagcaattgagccagcttgttcctctattagccatcaaaattttctgctcagtttagactagtaaatccttttgcaaagactgttgtccagtttttatctgaattttctaatagttctcaaccacagcaaaacttaaaaacaggacaacagacttttaagatagaataagaagaatatatatggtgttttcttacttttgtagtgtatgcgctatagttactgctaaatgatactacagaaaatgacatggttaataattatctaacatcatacataatcttaggattattctgggaataatgttaaatctagtgatgtcagttctgcataatgagaaactctgggtgtagatacagtttcaatcagttcatgacaattaattacttcaggaagcaagaacgacaaccttctatcacttatctttcaaatctcactgttaacctcaagccttcttatcttcatcagggctagggaacaaggacgcatagaataatttcatgaaaagatagactgtgcatttatataaatgcaactactgtattacaattaagcaatacacacactactgctttgtgtcaccagcaaagtaaataaaatactactctgcttcttacagtttggagatgagtcccctggaagaaaagccacagtttgtttttaagagatctaaactttaatgtccaattaatagtgaatgttattaataacatattaaaattccatatgaattaggccaaacaattcaacatgcagggcataaatacattaattcagagtaatttattataatgctctacttctccaaatgtggtacttatcttttttttgaggaaacatagatattgtatttattagacaaaggctttatgtcaaccatcgttagcatattaaaaaaactaaaaataaaaacatgaacaaaaagtaaagcaaatgaagagaacaatgtttccctaaacaaagtatgtcagtaaacaaataattcaaaaaataaacaaatagaaattctggagcagaaaagtacactaacttaaataaaaaaatttactagagtgatttaacagtacatttgagcaggcagaagaaagaagtggtgagcttgaaaatgggtattcaaaagagtataccaaaaagtcgtttaaaccccaaagaaggaagtaacggagaaattgagaagcaaaacttctagatttcctagaagtctcaggtcatcatccagttataaatagatcaaggcatcaagtggagcatggcctaaaattaaagctctatattatgcgttgcctggatgtctgaaatcaggaggaccttaaatgatctaactgcaagttcctcctctcagtggataagatcctctagccatcagtttttcctatctgggaatcatagttttttgtttatccctatgttgaattttcctgccagaccacaattattgaagccagtcaatcacgtctgctgcaggaaccaggtcttatctccataaacgtggttcttatctgactttcatcaaagtaacctattgtgccagttcttgtctgacctctaaactcctctttcttctccccacctgccagacctaatgaatcaggatcttgatacgcaggacataaacatcagcattttaaacaaggctccagggtgattctgatacccaataaaatttgaaaaccacagaatgatttctagggactgagactgttgacaaatatttgtttctagttctaggttttcttctgccagggggcagtgttctctgaaatatggctgggctaataaaccatgttggaatttaatttttcagtctttcttatgcacttcttgtttactgagccagccacatgtgtccttattacaaaatcttaaacaccatagcaagtgaacttctcataatttagttttcttacaaaaggttttggactaattccagtcattttagttgaatttcttaacctactttatgcactgtgaagcttttttttgtttttttttttcagctttaggtaatgagggataattttattttgtagttaatttgatagccgaggtagggactttggtcatcttggtcattctcctgacagttaatttataacaataatcttgtagtaaaaatctgtttaactgtggcaaaatgatgtgtgtatgcacatatatgcttgtgtgtgtgcgtgtatgtgttcatgttaacatgttccttatgcacaacaagctggtaaaagacaaagttctttggcagaacggttaacagaaatagtggctgagggccaggcacggtggttcacacctgtaatcccagcactttgggaggctgagatgggcggatcacctgaggtcaggagttcgagaccatcctgaccaacatggtgaaaccctgtctgtattaaaaatacaaaaattagccaggcgtgttggcatgcacctgtaatcccagctactcgggaggctgagacaggaatcacttgaacccgggaggtggaggctgcagtgagccgagatcgagccattgcactccagcctgggcaacaagagtgaaactccatctcaaaataaacaaataaacaaacaaaaacaaaaaaacaaagaaatagtggctgaggtcaactcttttggatattgggtaacaagcagatcaacttggctattacagcttttccccctgcccagctagtctgcatataagagaaaaataaatggatgatgttcagctcctgaaccctaactttttttccaagggaaccctcattgtcttctagctaggtttatacaatcaaatatcagacaaagtcaaaagttgttagactctggcaaggcaaaagaagaggctgtttttgtttttagaacatttagagcactgtggcatataatgaaataacaggattgccttgatatttttctttggggtttattgttttcctctatcatgtctggcttgtatcttgaaatttaacataaattataggaaaatctttcatggagttaacatcttttataagccttgctaaataccctactccaaatttgttcagtatggcatacagacaaaagcaagaggcttacatataaaaatgtataagcctgtcctctttgcaacagtgcaaaactaaaaggattttagaaaggcaattaacagtttggcagtatgtgtattttctttttttcaattagatattactagattctaagaatctgtaatgaaacccaggcctactgtacaaccccctataaacaagtttttgcttttgtgctatcatgttttatttgagcagagccactactctgttactaatttgttgcatggtaagtctcgtatttgtttacgcacgaacacatgtgctgcggaagaaaagatggtcactggacctgctgaggaagaggccaaaaacaaatctttttccctcatttgaatcctgaaggcatgtaatatttaaacaactttcagatttagagcccttgattttttcttttgaaagtgtgctggttgccaaattgcttagtaaagaaactttagtacccacaatagcctcaaaggacacagtatttggtggctacatttaaccaagaaataactagggaaacaattcttgacatttcaattcttgctgccattgagatttccttcctaaattcaattgctaataaagcttcccatgccatccccttcccccacccatctgcctctcaaaaaccgccccctcctccgccccgcccgaaacaagctgacagtctttacgggaagaagaggcagagactgaagttattttgtccgtcctcccagggcagaaggactttatgctgcgtggctggcatttccagtattttgataaaagttacttctctaaacttgaaccacagcatggggaaaataatgttatcttttatgttagttacaattttgcgaaatttcatcatgagaaactttcaaggaggcagaagtagctgagaatgtgatactagggacagggtcgctcaaactgccagcaaaataaatagatgggaaagacaggaacgttattaggtttataaatgataaaactttccttgcttaaaaaaataaagtggtgaggttgacgccattgaatgactgcattgtaaaccttaaaagcttaaagctggtggaaagcccttgcacagccctgttttcatttttatcggatgaaatgcatttggtttctttttgacaaaccatgtttttgtgaggaaaggaaaatgaacatgcactgttatgggccacggcaatgtaacaaaccctcctgttgccagaggataccacatgaaagtgtctgtgggttaggggagggacctgtaagggggcggggataagggggatgatagcttaagcctcttaggctcagagctgcgatttgtgaacaccctgtgatgtaatcaagctctggacaaatcagaggagtctgtcaacctcccaggtgggattgcttatagttaatagactaaacccagagcctcaaagcagtgcactccgtgaaggcaaagagaacacgctgcaaaaggctttccaagaatcctcgacatggcaaggaggagctcgttccagtcgtgtcaggtgggagaacggaggaatgacgggggacatgcttgatcttcagaatcagtgactgattggcattttcctttttgttgtgcaaattaagatagcaccttattatgcattttggaagtggtaggattgggtgttgatattgaagccatttgaatcacctttgtgtaatttgatttagtcttctccagctgtatttgacaacttggtctctttattctcttagataatatccctgttcacttttgccgttggagtcaatatctgcttaggattcactgcacatcgaattaagagagcagaaggatgggaggaaggtcctcctacaggtaagtgtcaaaactatttgcattttcaattttttaaaaatattacatacggggtaatcaatgtaagcttattaaaatatttatttttaatacaatcttgcagtataactaagttagtcctaaatttctctgggtaaaaccacctatgtgtataattcaggtgggagagtgtggttttcattagagaacatttatgattgtttcataactggctatttccatttttgtactcaaatttgtaaatgttaggatacaattaaaactcttgttcacagacaaggctaaagtagaagtggtgagaacaggtgttggtttaatattggagctacccaaatctgatttgctgtcacatgatataggatgtagtatttgccactagaaagttctgatgtaggaaaaaggaatggaagtaaaaaaggcagtgagctatctttatgaaacttcagaaatttaggactttaagatttacttaaaattggaaaaacataaaagagaggaggtgtttaaagagttttcaggattgatttgtcctcattgtgtgtccttatggcaaaggaaaggtaagttttaatagtgtaccttgacttaaataatagaaccaaagtgaaagagtttctttttacaatacactacaccataagtagtgttcccatacagtgttcttataaaggagctccttgtgcagacagagggggcttaactgaccaggtcttaagcaatgagttggttaatttcctggaaattggagctgctgatggttttagaaataaaaaattacattttaagtaatgggcactctagggaacaatattttctggacttttcctgacattccagcatgtttgtctgtcttcctgtgaattttgtgtttctctgtatgtcttgatctgattgttatgaaagaccatcacttgcctctgtttagccagcttgaaattttattatcaaccgggttaggacacatacattgatggaatactaaatcttccttacatcaattaagttacttttgaatcatgccagtaggttgaaagaataatattagaagtgaattagtgaattgaagtggggtgtggcggggttaagagtgagaaaatagatcacaaaacttgcagccccagggagccaaatggacaaaatgagtcgtcttctgttggggaggcagaggacagtggatcactgagctagagaatgctgtttttatttgcagcaaatgctctcttcaaaggcctctttttcactcccattaacactgactgtgactgaacagacaggggaatcagatccttagcatggtcatgtgggaaagctagcaacttgagagccaactgctggttcttttcaatgaacactaaagggaactttttttttctgtttcctcttaatatattactctggctaaaactgagattgaaagaattaaatgctgtttccttaatgaatgtaaaattgagtcactcattatttttaaaggtgacttcttttggaaaacagtcattaaaatcctaggctggtaccctggagtcctgtaacttgctgtgtggtgttgggcaagtcacttgtgaagtctgtttccttagctgtacaatgaggagcagacttagatgatttctacttttctttctggattaaaaaaaaaaaatcccaggaattattctgtttcattgcctcttgaatttctgtgctcactactggaaaacttgaaaagtatagattggatttattagtctttgaaaatattttgtgtatagtaaattatttccatgttataagaatagctatatgaactaatgaataaatgccacttctagaaaagtagtatggtctatattataatttataaacctaaatggtcttaagtgggctacacgaatttgctccttgaattatttaattaagtcgttggttattttaggcctttatgatatcatctaaaataatttattaaacttctaaccacgtgaagcttagtcttagaatacaatgcaacctaactctgaattttatggtttggatatgcctgaataatttttcttttgatgtagcttatgtgctttttaggaactgtggttgatttctcctgaataaaaatcaaggatgtacttagtaaactaggtaaaagcatcctgtagacagtggaaatatctttatgcgtttaaatgctgcatatgcttagaaaggatctctctcgattgacacatgtgactggttattctgaccattagaaaagccttcccatcagaaaatactgggtgaattttataagcctgtaagaataagacactaggtggggaggaggcagccatgcctatttccaacaacatttttaggcgccaaagaaatcctgggaagctcagtgctccaagggtgcaacaaatagaaggaacacaaagggtattgatatatggctagcttcggattgatcagagtgagatccaccattcaaaagcatgcagttgtttagtaaccatagcttctcagagtcctcaacaatagctgagaatgttctgtacacatggatgccctcgctgctgtactatggactggggtgttagtttcaaggttgtggcagtgcaaacagactgtcataattaattaactaacacacttgttacctggatttattgttagcgtaggaaataatggctgaacaggattttttataccaggtcataaaagatttatagatttattaggagatatgaaatgagaaaagctacttataattctgttgggtaaatacaatgggcattcaggttaatgagacggtgagatgggtggaataaattttctaagaaaatataagccataactgtgatttagtttgacatctttttctcatatgtctgatgtggcccacttgatttgcctttaagactgcaagagactttatatgtctacaggtgtctgtgcactcatgtgcacttgcagtgtgtatgtttgtggtgttatgcaggagtctattttattgaaacttgtgatttagaaactgtctccaggtggaaatagaatatcctctttgatatgtaagtaatttaattcttaaaagacaaaaggaaatttgtgagcttgtgaatagctggctaacagagacttaaaagctcagtttaattcatcattgtttttagtggcttgaaaggaaagttgaaaagtatgtgaatgaaattcataggttcatatgaaatgtagactgtcactaacaactttatggataaagcttttctttgagaatcatagggaaatcagaaaatggaactagaagtgagaaggtttatgttcatttgataattttagaaattttgctctgcaatgaaaagctatttaaatgttggcatgggagaatgcaggaaactgtaaaggggacgtagatcagccatttgctctgtgagcaaaactcggtcattaggattatcctgtcatggggctttatgtgaaatttcaggtagaaattggggagtttgagtcaatggaatgaaattatctgaactggaagctaaggagggtacagatttttcagttctttgttaaatggggctgtagtgtagtgatttttcatctatctgaaaactgtagagactcctctatctagtttacatactcagaaatctcagtcttccatgaacttcagcctagatttttgaatcaataaaatcagcaaatcttccccaaaattatattttgaaaagaacttctaaaatttgaaaactatgtacaaaagtttgaaaaacctttcattaatgaaaaaaatactgtagttacagtgagatgatctaaaattttatccaggccttggctaactcatacaaggcctagagatctaattttccaaccaggaaaatggggataaagtcgcttttatttatctgaaaaagtttttgaaaatgcctttaaggctgatgagaactataaggtgttaagtatatgataattcatttaattaatcttcaattaggtttgaaggccagtgtttaaacttataccttattgagttaacaatacctttaattttaaatgacaacattttattgtttggtagcagatgtgcaaatcattcagatttatgctactgatggccattaaattctatttaagtggtttagatgttgaagtaaagtttttaacttttaacttcaattacgtagaaatctttttttttccttctagtttgtgagctctatatgaggacattgtgtgtatgtatgtatgtatgtatgtatgtatgtatgtatgtatttattttttgagagagagtctcattctgtcacccagactggagtgcagtggcgtgatctcagctaactgcaacctccacctcccaggttcaagtgattctcctgcctcagcctcccgagtagctgagattacaggcgcccaccaccgcgccaggctaatttttgtatttttagtagagatgaggtttcaccatgttagccaggctgctctcgaactcctgacctcaggtgatccactcgcctcagcctcccaaattgctaggattacaggcatgagtcaccgaggcaggtcagaccattgtgtttataaatgttttgaaagcacaggtgtttaaaaacttcccaggtggacctctttattaaaaaaaaaaaagtttatgaaatctggcctagcagctgtgaagaggagagaacagtgatgttgcagtaatggatatttataaaaagttatgtatttaggaagcaaagatactgacatgtagacctgtgtgtaagttctatttactaaaaaatgaggtcagaagcatcaataaaaaatggcaaattcaatacgaaaaaagtatgaccagaaagaacgaaccatatactccagaagaggcataatacagtattaactctagagctgggcagcatcttgaatgccacgcacactgtcctctgccttgccctgtgggttatgcttcaaacagggcagcagacataagggaacttgtcctgttttaacgctcttgagaaaaggagctggtataaccacagctggtaacacattttaaggttttgctctcactttcaggaaatacctgggctaagaaccaaggagaatgggaggaacagatagagagcagtatcataaacaggagcagacaaagcttagaagaaccttccccctttaggctaagctaaatgtttccaaacttaaatactgcctcttctattggccatcatccagatttgagtatttgcatctttacgggggacatttagagggaaatatgattgggagccttagatcaagtaatgttttggccataacttttgtcatcggttaggctccttccaaaaatttaaatcatcaatagttttgttgtatcttatggaacagatggcactagaattcttttgttgttgttgttttttgagatggagtttcgctcttgttgcccaggctggagtgcaatggcatgatctcggctcactgcaacctccacctcaagcaattctcttgcctcagccctagctgagattacaggtgtgcacccccatgcctggctaattttgtatttttagtaaagatgggttttctccatgtttgtcaggctggtcttgaactcccaacctcaggtgatcggcccaccttggcctcccaaagtcttgggattacaggcgtgagccaccgtgcccggccggcactagaattctacaaccctacctctctatacatattgtaagatggaatattttagacataaagttgacttaagtaaaagtaattgtacctgtttctgtcagaattatgaatttgaatgaaataacgtatgttttacattggtgtttctttaaatcatgaaattatgcttctgtgaaaaataagaaatgcattgcattgttgttatacatgtcatatatgtacctatgtgtattttaaaatttgaggtttctattttttaaaagaacactatataaagctatgaacatttgtttttcaagattctggaactgacttgcatctttgaagtaaaataacatcatttgaatatgtattttaaaaggcggcaatagaatttgaatctcataaaggtattagcaaatgcctcataagaaatttcaagcctccatcatacttatcacatatttctgccttgatacatttggagagtactttttgtttgttttagttgttttctgcgctgttacggccatctcagtaatgatgaaaaatttgggataccacaagtttgttgatgtttcagttttcatcccgcctctcaataagttacacatctgaagtgcttacatcaatgttctcttgatttaggtcaagtaaaggaagacaacagattttaaaactcagacttctaacaaatcggataatctttccctatttgacattacgtcaggtacaataaagagagaagtcctaaaaacttcaaatgcatgcaggaacaaaggactgagggatgagcagaatgttcagataaatggcttgggcgagcctggaaatgacatttaacatcgttctccttctgcttcttgatttttcttgattttaaacatcttaggctgggtgtagggagaaggacagggaacgtgaagactccaagtatactgacttgatttttatcaactacatgaatgtattatcaccccaaaactatgtacctctattattcatccataaaaaatgattaaaaaaagaatatgaaggtggattgcagaactcctaggaaaacagttgggactagagcttgtcgtgaaagaagatggctgggacggaatagaccctggaaaggcagagtgaatattccactctattgttctattttatttatttgttaatttaatcattttgtttattttttttgtacactcatcaagatggtcttttccattgcacacaggagtgtgtggcattactgagtgtcatcatacactcactgtattttatttaaaagagatagactgggcgtggtggctcacgcctgtaatcccagcactttggaaggccaaggtgggcggatcacaatgtcaggagatcgagaccatcctggctaacacggtgaaacccggtctgtactaaaaatacaaaaaattagccgggcatggtggtgggcacctgtagtcccagctactcaggaggctgaggcaggagaatggtgtgaacccagaagacagagcttgtagtgagccaagattgcgccactgcactccagcctgggtgacagagcaagactccgtctcaaaaaaaaaaaaaaaaaaaaaaaaaaaaaagatagcagcatggctgggcgcagtggctcacacctgtaatcccagcactttgggaggccaaggcaggcggatcacgaggtcaggagttcaagaccagcctgaccaacatggtgaaaccccgtctctaccaaaaatacaaaaaattagccgggcatagtggcgggtgcctgttattccagctactcgggaggctgaggcaggagaatcacttgaacccaggaggcgggggttgcagtgagccgagatcgcaccattacactccagcctgggtgacaagagcaaaactccgtctcagaaaagaaaaaaaagaaaaaaaaaaagagatagcagctcaaatttatttgggttattggtttataagaggttctatatggctcaaactaccttccctttttctttcctgtcattctcagctgaattcaaatcatccgagaatgaattttgacataggtatatcctaatccacccagccccaggagtataccctaatttgaagctgtcaataacttgatcttaagtacagtacttcttttgagatacatcttggcattatgagtgtaaggctaactctaacaaagttgtctttagttttgcttgtctttaggtttggcaagaactgtaactgatagggaccgactattaagtgagattcaattattttccaaaaacaaagcaaaggacaaatttagagaatgattaatgttgtaagaaaatagtaaaaatcaggtgaatgagtgaagaaagattaaatgtggctaaaaattcacacagatactctgaaagtaaagaaagaaataggccggatgtggtggcttaagcctgtaaccccagcactttggaaggccaaagtaggtggatcacctgaggtcaggagttaaagaccagcctgaccaacatggtgaaaccctgtctctactaaaaatacgaaaattgctggacatggtggtgggtgcctctaatcccagctactcaggaggctgaggcaggagaaccctttgaacccgggaggcagaggttgcagtgagccgagatcacaccattgcactccagcctgggcaacaagagcaaaactccgtctcaaaaaaaaaaaagaaagaaatagggaagaaatgatgatgaaggaaagcaaggcgcgtggttgcaggacaatttcaaatgcatgcaggaacaccgcacatctgtaaacaaattgcctttagatctctttgaagtatctcagctatcagcatagctaagcttatttatttaagcagctcgtgggaatgaattctactgaaaatttactagaacgctgttgaaatgagtctatctaagcagtatccttaaggaatattcaattgtaagtactttccttatatttatttttactgtaggactttctctatttttttctgttttgtaattttttttttgttttacttctcaacccctcctgcctccatggtttcttatggttcagcatgcactgttgataggttggtcaaagacaatagaaaaatgtgctttatggaccactgcattggaaatgaatattattttctaaactgaactcgtacggtttgtatgtctttcaaaatcctaggagcaaccatgcaaaagtgtttcacatctcatgatctggtaaatctgtttgctttagttgaactgatctgatgccataaaggctgggattggatgactctgactttaagactttaacgaggacaaaggactaagggatgagcagaatgttcagataaatggcttgggtgaacctagaagtgacatttaacatctgttcttctcctgcttcttgctttttcttgattttaaaagtaaaacatgaattataaaaaatgaaaaattcataagcatgtaaataagaaaataaaattataaatcgcatgtcaataatatttgttaggatatttacatatatggtatattttatacatatatacacatacccacacacacatatattatatggtatatattttgtacatatatatacatacccacacacacatctattatacggtatatattttgtacatatacacatacccacacatacatatatgacatatattttgtgcatatgtatacatacccacacagacatatattatacagtatatattttgtacataaatatacatacccacacgcacatatattgtatggtatttatatataatgagagagaaggaaagagaaagtaagtaagcaaacaaaaagaccaggcaactacctgtgaatttgtagaatgttagaaatttcaaacatcaggaaggtaaaaatcttcttcctctttctttctcattttccctaaatgtaattccataacctgtttcttacagaaggaaaaagtttgttcacacctgcattttaaaaacgtgatgcaaacttggacattttctccctccttctgccctaccctgtctctcactcgtctctagttttggctctgtttttatttctatcttcatttctatccttattgccctgtttatctctatttttaaacacaaagtctaatatataacactctatcctgtatttattctttaaacaacttatttatatattttgtagatctttccatattagcctacaccgatctgactcattctttttaaggagtgtgcaatagtcctcttacggtgcaatagtccacttatggatatagcgattctttctttcttgacgggaaaaacaactttggttgatttcaggatctctttacctgtaataaaaggactgcaatgaacaatggacattttttgtacatgtagcttggcaaacttttgcaaatatgtgtaaatggtaaatttctagtaatagaatttctgggtgaaacatttataagcatttaaacatgttgataggtctttctaaattatattctactttacaaaaattttaattcctggaaacagttatgaggctgtttatattttccatttagcagaaattattttgtatattgagatgagaccctaacttaattatttatagtccctacttactgattggctcccatccacaacattaatctacttattttctagtatcagactactttgattatttaacttcagaatatactttgctatctagtctttatcaaattacttttccttttcagaggttttctattttaaaatattttatttttaaataagtgtttaaaattttttcaagtttcatgaactctcagtatttttggctgtgattgcactgagtcttctggtttgtttaggaagaattaatatttttataatattgatatttttacctttaaggtggtatgtctttcattttaattagatcatatatatatatatatatatatatttttaagacggagtttcactctgttacccaggctggagtgcaatagtgcgatctctgctcactgcaacctctgcctcccaggttcgggcaattctcctgcctcagcctcccgagtagctgatattacaggcacctgccaccacgctgggctaatttttgtatttttagtagagactgggttttactgtgttggccaggctggtctcgaactcctgacctcagatgatccaccgacctcggcctcccaaagtgctgggattacaggtatgaggcaccttgcccccaccttaattagatcttaaaaattttttttttggtagacttttctcatgtatgttggttctacatacatatgattaaatttataccaaataaaatacctagctattttatcatttaggccctattgagaatgaaacttctgtttaattttgaaactatattgtgtgcatattacaaatttgtggaattttgatctcactgaattctttttttccccaaattttagttgattcttttgatttctgatatacacctatatcatgtgaaaatattgatggaggagttttttgagaagcccagattatagagcttgtatttgtaaaacactagctgaaactgtaaaagtcttctattccaatctcatatattcgttctgttcttggaacatttgagctgaattttccttgtaaaaagttttggatttttaaatagggacatgctctcttgtttctaaggatatagatcaaggtactgttctctgtggtcatcgttagcacccacaggggcactaatcatcacagatttgcagtaataataattataaatagtaattgaacaaatcaccaacacttgttactctttctatatgtctgacatgcggctaagtgttttacatggattgattcatttaattctcttttcaacatagagttacttttatgagtcccccactttacagatgaggaaatcgtagaacaaggaagttgggcaacctgcccagagtacatgggtagtaagtaatggagccagtgttctcctccagagtccactgcagcatcacaccgcacagcttcccagtgccacctttccatggtgacatgaccactctccagtccattgtttttgcctcttgttctttgcagtgctatcagactccccctggaccaacatctccggatcttgcaagggcaggtgctttgaacttcaagaggctggacctcctgattgtcgctgtgacaacttgtgtaagagctataccagttgctgccatgactttgatgagctgtgtttgaagacaggtacgtaacttatgagtcctctctaccttcaagtagatggcttaaagactgcctgctattgtatgcatcctggagtggccaccctgctttggtctatccaaactgtggattctagttttgtttgttgaatgattattggttctttgaagagcataccctatgtcaatgaccattgtttccacataggttccagcagagaaaggttctttgcagctgcagtcatgatgtgctggttttgcaaatgttttttgtttttgtttttgtttcttcaccttcatcctttctatatctttctgtcaattcccacattcactgctagggcttgtgggctaaaattgtgtatgttcttttttattacttatttatttattaagagatagcatctcactgtgttggtcaggttggtcttgaactcctggcttcaagccatcttcccgcctcagcctcccaaagtgctaggattataggagtgagccactgtgcctggcctaattgtgtacattctttaaaaaaattttttttcttgctttcccagcttctagcatttgtttcacttcatcttatcgtacagtaactgttagtgtgcctgtcattccctgccgtctgcaaatggaaaattgttatggaattctgtttggagtctcacgctctgggtagctctaaaatcttcctccacactttttgtgactttctttacatttcttttgtgctggaacagttactaggatgtacaggcttctgtatgaatgcacatgagttgagaaaaacacctctggggacttctgccatcccacctactctgttttcaaagcacaatatttcagataggatttttgagatatcttgtaagctatccaccatgcttctggacaacaccatacacaaactatctgagaaagacaaccgtcaatgctgttcttgacatcaccagaagcagtttccatggtttccttggcaggttatttcttgtttttggacttttatgcttagacaattctttcaaagacctaactcttactatcattgctattagtttgatctttcaaattttatcattagaaacagttattactgtgttttgcctaagtggtagctcttgatttatatgaaatccaacataaacttccttactagttctgatttgttttcctcctgcgtccctgcaataagaacagcttcattaggctgttttttgcagaacacattttccaaccatttaaccacttttttgggggttgctttcctttggaacttctcccagtttcttttaattgtggatctgcaaactaaattgctgagactattgtaaactgaatgtatagatggaacagatgttccagcagagtttttttggctctaaaacattatttcaagccagcaatctgtgtttgcttggcactgaggaatttactaatgttttatgtttcctccttaccttgaatatcttgtctgtggcatgtcatatcaaacttctggattcctggtcttagaattctttgcaaaatgtaatgaatccctgactctagcttagctctcttttgaatgtagttcatgcctttgttcctcaatttattaaggatgggatataatatcttatagtccatttccctgtgtacaaagataacatatcctgaatgtgaaggaatcaaatatcaaataataataaaaggatgaatagaaaaacaaaaggctctgagattctcctttgttgagggagcactgccgagaaacaaccacaatgtttcagcgaaactttgataactctgtgtgtgtgtgttttcagtatgtatctatgtgtgcatgtatactcttccaactgtgtgtatatatatgcatgtgtgcgaaagtatctgtattaataaatctttatacaaatcgtccttttgaatggctatgtaatattccattgaactgttgcaacctaattcattgagtaattaaatgaatatttccctgagttttactattatgaatgatgtatcaatgaatataattgatgcatattcatacttttgcctattctccttaagataaatttttggaagtgggattttggggtcaaagtatatgtgcattttttttaaatttaaatatacattactaaattatacttctgaaagtttatgtttctactaaaggacacaaggacctttcatcacttccttttcagcattgaatactcttatttttaaaaatatttttaaaataatctggtaggtgacctcctccttattttccaataaggttaaatattttttatgtttattcccatgtttgctttgaaaattacacagatgactgacttgtcctttgtgtatagttcactttaaactctggatttattttatatttcatttgtacataaagacaatagttcctcaataaacatagcttattaataatgatattcttttgtaagtaatgtagatgtgattttcttatggaattaggagtggaataaaagtttattggtggatagaatcaccttgaattgaaaaaaccccacaatatctagagtcaaagcaaccttagaagattgctcatcattgggaagagcaggtcatgggaaaagcaattctaagcacttaatctcctcgagaagagataggaatggaaacgggatattaaaaaattagaatggctgggcatagtggctcatgcctgtaatctcagcactttgggaggctgagggaggcagatcacttgaagtcaggagttcgagaccagcctggccagcatgatgaaatcccatctctactaaaaatacaaaaattacccaggcatggggggaggcacctgtaatcccagtttcttgggaagctgagtcaggagaatcacttgaacctgaaaggtagaggttgcagtgagctgagattatgccactgcactctagcccaggcgacagagtgagactctgtctcaaaaaaacaaaacaaaacaacaaaaaatatcagacagcagaatcaggatgcaaaggtaattctaaaagaataaaaattaaatagtaattgcatggttttctggctaatgatttaccaaaaggggcaggggtagcagttatgccaaacaactaatatctctctctcttttttaatctttttagatggagtctcctcctgtcacccatgctggagtgcaatggcatgatcttggctcactgcaacctctgcctcctgggttcaagcgattctcctgcctcagcctcctgagtagctgggattacaggcatgcaccaccatgcccggctaattttttgtatctttagtagagacggggtttcaccatgttggccaggctggtctcgaactcctgacctcacgatccacctgcctcggcctcccaaagtgctgggattacagacatgagccactgagcctggcccgtaatatctctttattaatgtattcacctaacaatagttgtttctcttggtagaatattactaagaggcaggattgctttaaaaatcatttctttccacttatcacatattttaagagataaagacctgaagtgttcatatgtattttagctcagtgacacctttcttgaccattctacttcctggagtagcacctatttcaccctatctttctctatcaatgccacctgttacttccttcacaacatttggcataagctgaaatgatcttgcttattgatttacttgcctatgatctgtcttttccaattggaatgtaagctccatgaagacagacctagtctctcctgttctttatgacatcctggcaccgagaacacggaaaacatggtataagagtcaatgagtaaatgagttaactatgaaagttctcaatagagtagttctgaatttaaagagttatattttatctccatggtcatttccaattcaatttaatacatattgattgaacacctagcatgtgccaggcgcagtctcccaggcttacagtctgccactggaaatagaagagcgaagagagaggtgtcacttttcctgccatggcgcttacactctagcagatgaaaaagtcaaaaaacacagcactccttttaaaatggaaaggttgtttttctgaaatgtaagaattaagcagtgagctgtcaatcaggtatgttcagagggaaatctgtaacccatttacttggcttgaaagtaggaactctgacctgtcattgtaggtaggaccacaatgggtcagtggttagaatcttgagcaaacattgtaatgccccctttatactcttcacatcctatttaggactttaacctccaggtgcagatagaaaccatgtagttgtcctgttatttgtgtttgaatcacactgattaacgctaagcacagctactttaggctaggtgctgtggctcatgcctgtaatcccagcacattgggaggccaaggtgggaggatcacctgaggtcaggagtttgagaccagcctggccaccatggtgaaaccccgtctctactaaaaatacaaaaattagccagacgtgatggcatatgtttgtaatcccagctactcaggaggctgaggcgggataatcgcttgaaccagggaggcggaggttacagtgagccgagattgcgccacagcactccagagtgggcaagagagcaagactctgtcaaaaataaataaataaataaaataaaaataaagctaagcacacccacttcagaaattaaaagagccaagctatagaggctgtccctacaacagtagatagccctatcataaacctttgatgtcataaatttgttgggtcctttaggacaattcgagaatcgtagggatacttgcttgcctttcagggccccatttttccaaaggaacccaattgcattttgatgttgttctctgatttgaaaacttagaaattcatcttatctgtaaattctccaaatgtcctctgggcctcaagccaactcaaatttcacaagcagagtaaatgatgtgagattttagctttcttcattggaaatcctgtaagcaattgtggcttctttcatttggttagtgtgcagcagtgaaaatgttttattgggatgattttagcccgtggctgggagtgtactaaggacagatgtggagaagtcagaaatgaagaaaatgcctgtcactgctcagaggactgcttggccaggggagactgctgtaccaattaccaagtggtttgcaaaggtacgtgtttctttggattggcctgagctttaaaagaataaaaactggaggtgctccaggagatcctggatgctaggaatagaccacactggatatgagtttgggaggaaggaatgaattgtcctttttaatttctcatgcttcttcattagttttgctactctgtatttcactgatctgaagtaacaagggaagaaaccagaatttcttaattagacagaaacataataatgaagagatttctaaatttcctatcttggttttaggtcaagttttctagaagcagatcctgagacaggaattcggtacatgcagtttattgaggaaacggatatactgcaggaaaaccatgtcggaggaaagggaagcaggatagggaaggaggagtgtggagagacaagtgaggacatgctctcagttagcctcgcctccctctattgcttgctctgaaaagtaaatccaggtcactactcttgaggcaaggaaccagggcttttttatctattggatgtacactgttcaccaaggcattggcaactgcccagggatgggggtacttgctggtaaaggggatgagggggccagcatttcctgttataccccaaagccatatatgcatgagtgttggctttgtctggttgattgtagaatatgatgcttttattccaacaattaacaatagttaatggactacagaaaatataaaagatgcagttattctctttaatgggtttaagttgccgtgcaacccacttatagaagttgatgggaagatccaagaatctttatctattgtttgtaagtcactttttaaatttcaaaatcaagtccttttcattatctctgatgtggaacatttaagaagaagttcattaaaagatttcaggaaaaaaatcaagttacttctgcaatatgtaaggtgtttagttgtggcaagagggtgttatattaatatatttgaagaatttccccatacccaaacaattattgtattgttaatttcccctacccaataattatgcttttattttgaagcataaaattggttgagaatttatttccctttcctttttaatttgcctgtgcagtaagtgtaccaggaagccacaaaggctgttagaaataaaattttttttaaaaaaagaagcccttggaatcattgatcattgaatcattaagcattggcttttactggtttaaaattctagtttcagtacttttgtgaggcccacgtgtgtgctctgggttactatatgtgtagcaaatcttctttattttaaggagcataatagttaccccattgtccagtagttagagtcttattgaccagagaagatttccagttctctttacatgggagcaatttctccaatgtgttggttacaaattttacttctgttcaggatatgtaacttttgtttgtcttaaaataatttaaggcaaattctttttgataacttgtattttcttcaaagcaaagcttatgtttttatctgaggccttttctgttctctattctcgacattatgctcttagatcttggtggaagataaaaagtgaaatttagcatttttttctttctaaattcaagggctgtatggagatttattggcaaataatctttctattgtaatcttccacttattatctctgtagattctaagacttttttttttttttttagcatctaaagggaagttttgccatgctttctatggctttgagatctccagtggtggagaaaagaatgttccatctaatgaccaaacagtttatttctggagggatacaaacatgaaattttgttcactgacgccactggtttttttaatctacaaaccatttagactcggaaggctcaaataaacacctcaccacttgtggttattaaatcttagctttcccatcatgtatgggtgtactttataagccaaaccagacactagatttttttttcagaatttttttttttttttgttatatcccataaagaaagtatcaaacaggacacagatcctggaattgtgagcttcaaggcatggcatttgtaattagattcaacaatacatttacccatttttccttataggagagtcgcattgggttgatgatgactgtgaggaaataaaggccgcagaatgccctgcagggtaagtgtattttatgactattttgaagttttatgtattagctgataaactctcacaggaaatgaaaagagaagtatttagaaacaatgtggaactgaaattctcttatacaggcaaacttatgagtacttaggagtaattcatgagtcgaaaggttgaaggtaggtcttgaaatggtgatagttttcttccccccagttttctccaatcacctctgcacatattggggtctgaacatcccctatattccacctcagctgaggattttacaaagtgcatctgaatattctggctaagactttttttcagtattgtttttcctggagttcttgttttgcctactttgcggggagtggggaatgaaagaggaagtcctgagaacctttaaaactgtgttatccaataagtaattattacttattgattacacacctgtaatcccagcacttgggaggctgaggcgggcatatcatttgaggtcaggagtttgagaccagcctggccaacatggtgacaccccgcctctactaaaaaaaaaatacaaaaaaaattagccagcgcttgtaatcccagctacttgggaggcagaggcatgagaatcgcttgaacccaggaggcagaggttgcattgagcccagattgtgccactggactccagcctggatgaaagagaccccctctaaaaaaaaaaaaggcatccaaggcagtgggacatctggcttctgaatgggaacctttatagcaccagcaaccaaagagagaattaaatatgggtgatgttgaaaaaggcaagagaatttttgttcagaagtgtgcccagttccacactgttgaaaagggaggcaaacaggtggctgggtcaaatctccatggtctctttgtggggaagacagatcaggccattggattctcttatacagaggcccataagaacaaaagcatctcctggggagaggatacactcatggagtatttggagaatcccaagaagcacatccccggaacaaaaatgatcttcgcaggcatgaagaacaaggcagaaagggcagccttgatagctcatctcaaaaaaagctaccaatgaataataacaggtcactgtgttatttgttacaaaacagaaatgtttcatgacttcttaatctgtaccttaacagatctcatacacaagaattcagataatgaatgactgacagagtatttttgttgggcagtcttgatttaaccatgactggcttgtggttaaatggttaaatgaatatgttcggttattttattttattatattttttttgagatggagtttcactcttgtcgcccaggctggagtgcaatggtgcgatctcagctcactgcaacatctgtctcccctgttcaagtgattctcctgcctcagcattccaagtagctgggattacaggtgcccgccaccacgtgcagctgatttttgtatttgtagtagagatgggggtttcaccatgttgccaggctggtctcgaactcctgacctcaggtgatcagcccgcctcggactcccaaagtgctgggattataagcgtaagccatcacgcccggtgaaattttttcttggaaattattgctcccattattgagaatcactaggcgtaatggcaactctggtaataatgtttctaaaagcttaatgtgttactgtttaaggtttgttcgccctccattaatcatcttctccgtggatggcttccgtgcatcatacatgaagaaaggcagcaaagtcatgcctaatattgaaaaactaagtaagtaatttccatactctgtgttcttatctgtaatctaggatctccacactaaccagtgggctgtgggctttgagatctatgggcacgtagttttaaatgtgttttattatttgaaatacagaagtgaaggtaacacatgtctgagtgtttataaaatggattttctataagcaattcctgttggttctcttgttctaatatttgcaattctctttccagggtcttgtggcacacactctccctacatgaggccggtgtacccaactaaaacctttcctaacttatacactttggccactgtaagtattttttcgaatgatacacattcaaagggctgatttcatcctggaatgactttaaaggagagactttacttttaaaacgtgttccttagtgttcaaagaaaatctttctgttttccatcttaactgggtcatttgttcacagcaaatgccttttacaactttgtgggtgatggaacttcattccaactttaaagctgaaaacttttttcaggtgcagttctgtttgaacacatacattaaacttctctcaaataccagagggtctattgtttattttctgaatttgcaaataaaaatgttgacttcagggctatattttaattttcaggtacttcaaattctaccactcttccttctttaaaacataatttatttatatatttttattgattcggggagcaatagaatttagaaagaaagaaaagtgtatttagaaatagaagcttctttggaggcacatgtatacattccaaactaaaggttaatttattgtaatgaaaattattgtcatcttcttaaattacagcagaaaaaaaccccaatgttaaatttcttataatcatattaagtttctcagatggcttataatttgtcccatagatattattcatgtttgctcaaacagatacacagtgaaggttatacatgtcttatataattttggaaattaagtattgctataaaaccttctatgctaagaaaattcatactagaactaatgtatgtggattattgtattgttattttaacaataaatttgcttttacaaaaaggggctatatccagaatcacatggaattgttggcaattcaatgtatgatcctgtatttgatgccacttttcatctgcgagggcgagagaaatttaatcatagatggtggggaggtcaaccggtaagttttgcatttattgtgtgtctatgtgtttgtgtgttcatgtattgagacatttcatccccaaatttgttagatgtggaaaaaatgcgtataatttcctcatacttggcaatgtttctgtcttttgatacttttaatatacatacaaacatgaaatatgtgtatatatgcattatatatatatctgaaatatgtgtatatatgcattatatatctgatatatgtatatattatatatttatgtatgtgtacatacatatgtgcacatagaatatacatgtatgtatacatatgtgtatgtgtctctgtgtgtatatatgcatgcatctttgtgaggctatgattataaaagtgagatgatatgaatgtcttccctaggattatggtggtgacaatggtgatgaggtgaatttcagaaccattttgacaaagaaatagtcagatctcattgatttcccagatttaggcgtataataaaaaagagaagtgtatgactgtgacttccccaatatgctagccctgatgctataataacagaaacagggaaacttgctggaaaaaaagggaactcactgaaatccacagtaaattcatgaatttttttatttaatctattttttaaaaatcatgaagttaaatacaaaaagcagaatcctaccttgatactgaaatagcaaattaatactttgaaaagaaatcaccctgtttacttcagatcaaatgactgggcagaaaataaaaagggttgtaggtggctttctacctaatgtttttcctgtgaccgtgtgtatggttacgcaacttgctttggtcagacatgagcaaagcagcataaagccacagttgttgaatgtgcagagctgggctgaagtgtacaagcttctggccagaagtatcagaatcacctaggaacataacccagggcacacaggcaatcagaaacatgtagaagtaagatggtaagtggttccatctcatgccaattctgattggagacagtggcttcctgcagcactggttagagaagagggctgggagaactttgtgcactcaaccgtggcatgactggtgggcagtgtctgcacacatccatgtatccaccatgcctcaatgatcttgtacctggaaatcttttgctgcaatttatggacaaaataaggactataaatagaaattttttcttaaggtatctcactttaagaaaaggtcatttgtgatcaaaatatttatattgcataataggtaaatcagtatgcaaggataaatatgagctttttattaaaaaaataaacattgaaagacttcttgtacatctgcagataagtttctttataatagatgctctgattctgctgtctttattcaggctggactcccagaagtccataatggcctagggtgtgatcatagtgaaatttgttgacagggtggattattcaaagtttatgataggggaatattttatgagtacacaaaatgattgaaattagagctccattaagctttcactagtgggtcttttatattaatttgattatggaagcaaacttacctgaagaaccttaaaggattagagataaatagtaattttatcaaattggatcaccttacaccaagtgttgacataaggtttgctttgggttaggatgactcagaagaagatgaggccacatattcattaacttctgcaaaagcagagcagaggaaatgctgttaacctgcccaatgaagtgaagtctctgtttcagctctgtttacctgtttcctcactaactcccaaagttgacgcatctgaccaagtttagtactctcctcatgctgaccaagatttgtggtgaaactgactagtgtttctgtcatcttgggcaagatggccaccataagaattcctaggaggggccgggcgtggtggctcatgtgcgatggctcagcactttgggaggctgaggtgggtggatcatgaggtcaggagtttgagaccagcctggccaacatagtgaaactccatctctactaaagatacaaaaaattagccaggtgtggtggcaggcacctgtaatcctagctactcgggaggctgaggcaggaaaattgcttgaagctggaggtggaggttgcagtgagttgagatcacaccattgcactccagcccgggtgacagtgcgagactccatctcaaaaaaaaaaaaaaaaaaaaaagatttcccaggagcatagtaactacaatttaaaaacacattttattgaaatttggcatattggaaaaacatatagacaaagtattgttctattctattatacagtagggtgttctattatacagtagggtgactatagcaaataacaatgtagtgtatttaagatggaaaattttaaatgttgtcaccaaaaagaaatgataaatgtttaaagttatggatatggtaattaccctgatttgatcattatacaatgtacacatgcattgaaacatcacactgtatcccataaatatgcacaattattatatgtcagttataaataaaaagtaattaaaaagaaactttagtcaaagtataagagtataagcaactaaaagtactataagaaaaaattaatgaatattctacaagcatttataccatcctctcagaggcttcgttttaaaatcaccagtgaaaaaatatttataaaagtcttataattttttatacatttataagagaaaatatttatacaaatcttagattgataattaaattaaactcaatttatttttactgagggactaaaccatgcaagacatttagccaaatggcataggggtcagattacatggtgaataaaagccacttcttgtcctagcataaactctagtagatgggatgaggcaattgtacaatggccatttgaaaatttgaatctaaataggcgtcttccgaaaataatttaatttagtcttttataatttaatttaatctttgttttttagccttgatatagtcaattaaagtctagtctgcttttaatttgttaatactcaacatgcattgctagaagcagtcgtttgctgtaggaccctgcatttctcatacgtagtttaatggagttccttaagtgggttggtttctttggaaattctctctgctacggtcctgcaatttctaatacaaagatacttccatggggttgttccctgttctgtttaaatctggattctcagcaatgggaggaatgaatgggattcctaggagttgactaaatgtggagatttgagaaacaagtttaataccccatcatgatccaagtctcctgaagtcagcatttctggagtaaggtgtttctaagagaagcagattattattttttaaaaatttattattatatttaatgagacaacatcttagtatagtcgcccaggctggagtgcagtggcatgattttggctcactgcagtctcagcctctcgggctcaagcaacactcccacctcagcctcctgagcaggtgggactataggcacacactaccatgcctggctaatttttgtatcttttgtagagacaacatttcgccttgttgcccaggattgtctccaacttctgagctcaagcaaggtgcctgcctcagcctctcaaagtcttggtattacaggcgtgatcccaactgcaactgtccagcagatgcattcttatcacttaagttgcttgacctagaattgctctctgccagtattggtggtacaatgagttggaacagaagccattttagtgaatgactgcagtgaaaaaatgcaagaaatgtgtgtttaagacagagacagcaggagaagaagaatgacacagaataggggtgactttccaggccaaaaggggttgacttgatggaaagtacaagtcattgctaacctctttttatctgttttattgtcctgataaagagacaatatttcttttcaggaacatttaacctattctttattctgttgtttcttttccatatactaccgcagacctgcagttttttctctttgtactgtatccaaatgtacctagttagggcgagctctgctaacctggtgcctttgcttaccagcctcttatttttcttccaaatttcagctgaagtgtctgtcccgaggaggccttccttcccccagcatttccagctctggctaagcaaagtgactgtcctttgggcttttatatttttactatcataaatttggaaatctctttttatttttattttttttgagacagagttttgctctgtcgcccaggctggagggcagtggcacagtctcggctcacagcaacctccgcctcccgggttcaagtgattctcatacctctacctcctgggtagctgggattacaggcgtgtgccaccatgcccagataaaatttttttgtatttttagtagagtggcgtttcactatgtcaaccagtctggtcttgaactcctgacctcaagtgatctgtctgccttggcctcccaaagtgctgggattacaggtgtgagccacggcgcccggcctgaccacctccttttgaagttggttattcacaggtctgctttacactgcgggtcccatgcaggtagggacttggtgtatttctgtttcgaagacccaatctagagcctggctccgctattgtgtttcggatggaactgttctttgtttccttcgggggcatatttggcctgtgcttcccctagggtaggtggccttaaggacagcactccatctcagcctcggcagctccggccacatgccaacagcttcctcactcacctccttctggccctaatcacgtggaaaccagctgcattgggccccagtctcttctgctgcctcccccaacccccacacccttaatttgttctgattctcagcgattgatctgctgaagcaagtgctccaccgatcccctggtctcctagaattctgtttatcctagctcaatgctttcgagtgcaaaggaatgatttcccttcgaggaactgctagaaagactgcactagtagtttatgttttttgaaaaaatgtttttggctaatatttttctttttccaaacttctccttttctcccaaagctacatgctgaatttgagaaagtgttgaatttcatatttaacctacttggttcctgtggaggaagcctttttgatttctaataaatagcacatcacaagatacaatgtcattcccatttgtccccttttcacaaagcagcatctaggacacaaatgttgaaagctgggcctccagataaaggaaagcaatgcagggagttttgggattagagggagaaagcccaaacccagtgttttcttaagcttatttttttagttgtatttttttttttttttttaaagacagaatctcactctgtcatccaggctggagggcagtggtgcaatctcagctcactacaacctgtacctcctgggtttaagcgattctcctgcctcagcctcctgagtagctgggattacaggtgcctatcacgactcctggctggttttttgtatctttagtagagatgggtttcaccatgttggccaggctggtctcgaactcctgacctcaggcgatccaccctcttcggcctcccaaagtgctgggattataggcgtgagccaccacacctggcctgatttttttttttaaactaccctctgaagaaatttatattgcattcaaattcagagaaactttgacacttatatctctgaattaacaaggaaccgggaagcttctctctctctctctctctctctctcttttataaccttatcggcttgtattcacttttcttcttctggaccaatattttagtgcctttttcccccccttgggaaaatgtgcttttcattttaagtattttatcttttttgttcagtttttatacttttctgatcatgctctcaattttctttttgaaaatgtggtcaacctgacttttaccaagaaacaggcagaatttttctgctttttgattttgtttttagaagaaatacaaattttacctttaaattgcctccatagtttacactgtatgcttctaagacactgctttttaaaattggttagttttttttttctgattacaagtaagttgattgtcactgtaaaattgttggaaagtacagaaaaatataaagaacaaatgatcttaattttgccatcataataattttaacataccctgtcattttcactctgtgtgctccttccttttgacactgtaaagacctcttccagtgatcttttttccctaaggattactgagttaaattaactctcagaacttcctgttgccctaatgatgccaacatcagcatgtattctaccgtatactttttgaaagtgcaggtcattatttgagaaatttgtattaaaagtgtgttttcctttaggaaactccatattaatcttaaatttcatagatgccaagtattgcctagtacaatcttcttggaaatagcaaggcagtacatctaggaagttgtttggatattggaatgtgctaagattgtgtataagcaattaaaataagtatgaaaatagatcccttaatataaggaactggcctctttgggaactggcatggttttatagtgtgtccagcacttcatttgagctcatcttcttgctggtggaggtgctggaacaagaatgaatgaaagtccaggacacattctgaaccctagttgggctggggttcctggaggatgccagaatttgtctttaaaatagaaagagctttggactaaatggagtgaaggactctcagaacaatctgagattcttatgtctccaaacatcccagggaaccaaaagtctggccaagaaggtctggtccctcagagccatgtgaacaggatgaggcccctacctctcccaggctgatgaaattcaccagcagctcagaacccacagactgaagagtgctctgtacgttctcctgccccatccctcatttgccagctacagtagctgttagtttggggctgaggatttctagaggctccaagggggctggaacccttttcgagctttcccagggcaggtatcccaggtgattttgaaacaatggttaagcttctggatgttctccacctcccagttacccatttcctcaaaaaataagttgtcactctttaaggatactctcaaaggctggtgacaatgaaaccagaaaaggggctggctacaattcccagatcatttttgttttggtcttaggcaaaccacaattctctctcgtatttgcttccattctctttctttaagtgagggggtttcttctcatagacttctgttcagtgggacacttgccatcttaggctgtttttaatattactagaataattggattatttatttccattattgcataacaataaatatgtaaatttatcgagtgtttgccagatgttaagacactggtttaaggactttaaatgtattaactcattaaagcttagaataatcctatatgctagataagattatttacattgtaaaggaaacagaaacacaaagatattaagtaacttgccaaaggactacatggctggtaagtgacagaaacaaggcttaaaatccaaactgtctgattgcagagcccaggttctaaactcctatatcttatgcctccccaatagtacacggtgtaaagaatattttaaaaaccttgatgaaatgcttggttcacttaacttattctaggaactttcctctaaaataacatttactaaaaggctaggtaaaagatttaggaaaaatcaaaattaaaaattagcctttttcccccttctcattcatctagtttaaactaaaacaagacaatctggattccaaaattctgacatctggatgccaaattggggcactcctccttgaggctttcaatagtaaaggaaacatatggcccactcttgggtcctttgatgagcagaattatgctgcataagttaattgttcaaaacaatgatcagaaaagacaggtacagaagagagaggcttttgagataaaataagattttaaaaaatatgtcactagaatcatagcaggagcttttgagagcttttgcagagaatatattgaataacatttgtggaaataatgattctgacttccagatgtgaaaataaatggttgcaaataatggaaaatttatgttggggtgtgagtagagtataagatatctgatctaatgtattttaaaaactttttcttctttgacaaaaacacagaacacattttaagccgcttatattttcctcattagctatggattacagccaccaagcaaggggtgaaagctggaacattcttttggtctgtgtaagttacctttattttgtcaatgtttataaaatgacagctatgattcaatttctaaaacatcaatttaagttttattttgtttcagttaaatgtgaaaatatagaacttttgaatatttactaaatcaaaataaccttccaggtgtttttttcctgagatcctccctctgtgcctcatcctaccttctttttgtcctccagctctccttttttccatcctgtctctctctattttttttttttttgagatggagtcttgccctgtcacccaggctagagtgcagtggcgcaatcttggctcactgcaacctctgcctcccgggttcaagtgattctcctgcctcagcctcccaagtggctggaattacaggcacctgctaccactcccggctaattttttgtatctttagtagagacagggtttcaccacgtttgcgaggctggtctcaaactcctgaccttgtgatcctcccgcctctgtctcccaaagtgctgggattacaggcatgagccaccgtgcccagccccatcctctcaacagaatgtaagatggtctctcctccttccggatgtcctttagatttttctattcctgtttgtaggtttttggtaacttgccatctaggacatgtatatttctcttagactatttatggcagtggctgtcgttatcattttctataaatatatgacaacatattatatttattttggttcacaacttaaaaatatctagatggtctcaggcctctggggagccgaaggagtcgtctagagattgaaagttccagacaggagaccaaggggaagcctctattttcacctcattttcccactgaactccaggatttttctaataagaaagtggggctccttcccatccctaaagaagtgatggggggataagcagttaatgttcataagccttaagatgaatcttacctaataaaagtatcaacatgttgatgatttttaaggttccttagtaagaaaaggaatctgtttcaactttcacggggattttgttcccactgagatgttctttccatcttttttttttttttaaaccacctaaagctgtttctgtatttgcctgtatgcctaacaaaaatctgactattctataatagcagtgtgctgagagctactgcaggctcaaattaatccagaacggtactgtctatactctctaaaatcagaaataaaagtagctttttcagatttgaagggctaaattgaaattgggtttggtgatttgaatctagcacacactgtccctttaagagatttctttctttcttttttttttttttaaagaggtttctgagctgagaagtaagtgtaggtaggttggaaatgatactgcttaatataaacagcatgttgatttaccagtgttatcctatgtgtgacatttctttaactcttgactgtcatagacgctcatagaagtattttcttctgttctgtaacatatttgcctggcagaatggagaggagccaacaacataattaatactgagtccccacctttgcccccctgaaactgctgcaaagcctcattgaaaaggcccagtgttctggttttgaatggcaattttctccacccatttgaaatcacttataagaaggtggcttttgtatgctccaaagatgtctgtagctttcatttgcttctcagactattattttaactctgtatcctgaaagtgacttggattcattttttccccttttttttgaagtattttacaactttaaaaaaataggatcacactttcagttagttaagagaatatatacgtcaaggaaatctacacagtgtatattctgaaaacttaaaaaaatttagaacctgattcaaaccatagacttagactttgaaggccatctttttaacatggttccgtactgcaacctagaattattcttgccttttaaatgatagtatttcattctgaaataatcttcggctgatgctccattcttttgtgccaattcatgttcaaagacagtaattcccattatgtatgattgttcacgttgattctcatcccagcttggctgcttattagattggtgaccttggactagtgatttaatctctcaacaaatccatgtcctcatcttcaaataaaaattacagtatcttcggctgggtatggtggctcacgcctgtaatcccagcactttgggggctgaggtgggcagatcacctgaggtcaggagttcgagaccagcctattcaacatggagaaccctcgtctctcctaaaaaaaaaaaaatacaaaattagctgggcatggggacacatgtctgtaatcccagctacctgggaggctgaggcaggagaatggcttgaacctgggaggcagaggtttcggtgagctgagatcatgccattgcactccaacctgggcaacaagagtgaaactctgtctcaaaaaaaaaaatacacacacacacacacacacacacacacacacacatatatggtatcttcatcatgggatgttgcaaagatgcaatgagctaacatatttaaaatgcttatggccgggcctgggggctcatgcctgtagtctcagcactttggaaggcaggtggatcgcttgagcacaggagtttgagaccaagctgggcaacatggcaaaaccccatctctccaaaatatacgaaaattagccaggcatggtggcacgtgcctatagtcccagctacttgggagactgaggtgggaggatcaccaagcccgaggagtttgaggctgcagtgagctgagatggcaccactgcaccccagcctgggcaacagagtgagaccctgtctcaaaaataaaataaaataggccgggtgcagtggctcaagcctgtaatcccagcactttgggaggccaaggtgggtggatcacaaggtcaggagatggagaacatcctggctaacacggtgaaaccccctctctactaaaaatacaaaaaattagccaggcgtggtggtgggcgcctgtaatcccagctactcaggaggctgaggcaggagaatggtgtgaacccaggaggcggagcttgcagtgagccgagaccatgccactgcactctagcctgggagacagagcaagactccatctcaaaaaataaaaaataaaataaaataaaacaacataaaatgcttattagggtatttggtacacagagaacaactaataaatggtatttgttttcttattcacattctctctttcaacattgactagacaagggctatatatgacttaagataatttgctctcctttactagtaaatacttaacttagtcttttttttttttttttgaccatttctaatatacttggtctcatgacaaattctgcatcaatcagtggtggtgaagacagcaacatgtaccccatttctttttttgctctttcttggtcagatttatttgtgctgtctgcgcattgtatttgaatatttgaaatgctaatggctaagggccatgtccttttggtctctgaggttatttcataaagataatctagaactcctaggaaacagagacaaccttgcccaactcctcatttaagagattagaggctgggtgtggtggctcatgcctgtaatcccagcactttgggaggctgaagcgggtggatcacttgaggtcaggagttcaaaaccagcctggccaacatggtgaaaccccgtctctactaaaaatacaaaaattagccaggcgtggtggcaggcacctttaatcccagctacttgggaggctgaggcaggagaatagcttgaaccggggaggtggaggttgcagtgagccgagattgtgtcactgcactccagcctaggcgacagagcaagactccatctcaacaacaacaaccaaaaaaaaaaaaaaaaaaaagagagagattgagaggttagaacactaaggcctagagaggttaaatgttgcacctaaggtcagaggtaggatggctactcagacctccagcgtcctcatcttattctcaacacaaacacaatcagcccctgcccagaaaagaattatcacttgcttatctttcccccaagaaaatgacgacccctccataatagtctttttggtaggaatatctttatttacgtttacacaaatgccttaaacccaatatgcccttaacaaatattttgtgaatgaatatatcatctctgcagacctatacatttagtatataacaataaaagctaacatttttctaaaccctttctatgtgcccagcactattctaaatgcttttcactattctaaatgtattctcttttcacctttactacaactttatgagataggtactattatattgtcctcgttttccagaggcatcaaaagtttagataacttgccaagtcttatcaccagcatttgttggagtcaggatacaaacccaagcactctggcctcatagctggcacttttaattccccgtctaccattgttcaagtaccccatccaacgagggcattcaggggtgagcattctgagcttgacacagattctgttagtttgtatttttccattagtattgaaagtgggttcattagggcccgtttctgtggcttaacaccaattacgtaaaataaagcagcttttaggcaggtagtgaaataaagtataatgaaaaggctctggcattcactttttttttttaaacaggaaagaattcaaagtatgcaattattttgctcagatacaaaggatttctaaagctgaagaattaaattccttaagtgattaacctggctttgctctgcctatttctaattcaattataggatatagtgatcagggtcgcatttatccaatagcattggaatatgtttaaatttggactcattttatggcacacatgattttctggtcttgtgtgatagttccagaaagagagggtgcctggggaatgacaaatccctgtgagctggatggtgatgggggaggaagagaaaccacttgatgagagccccggcttgaggatttatccttctcccagctctctcactgctcatgtccactgagagtaaaagtttaaatggctcaccaatgttccacaataatttttcctgaccacatttaaacttgtgctttagtttgaattcatcatgaacatgcctctaatgcctggtcttggatcggggagtgaaaatgcattttgtgctccctgttgggaaagagtgggtgaatttcccctgactaaagatatcactcagcttgtgagcatctgaatgtaactcagccggggatgcaatactgtcatgttagctgtgaggccttagagcccttaaagctagtgccagacttagggtaattatatttcaacagaggaaagagacttaaacacaaaagttattgtggatgaagattataccctttttgtcagtctcttaattatatgtgcctattcttttttttttttttttttgagacagagtttcactcttgttgcccaggctgtagtgtaatgctgtaatcttggctcactgcaacctctgcctcctggattcaagcgattctcttgcctcagcctcccaagtagctgggattacaggcatgtgccaccatgcctggctaattttgtatttttagtagtgacggggttttgccatgctggtcaggctggtctcgaactcctgacctcaggtgatctgcctgcctcggcttcccaaaatgctgggattataggcatgagccactgcacctggcctattcttggtagatttttacagggctggaagaaaatggcaagaataccttccctaacccattattttatagaggaggaacttaaagtttcaggttaggtagtgtttctaaagtcataccattatttagaggcagaatgataacgcattatgatcattaataaaaatatgtttttaaagaacttactgtgtcttacgcactggacatgccctttccttgtcttgtctcatttcatccttacaaccaagctgtacagtgttctttgctgttagctttatcttaccgatgagtaaactgagaccgagtggtcaagagaggtcacaccgccagcaagaggcggattggggatgtaagtactgatccctttatggccacagctaaaggctcgacagaataaatgacaatgattctgaaaccagggtcctttctgcttgtagtggagtttctgattagcaagacaggttcctcattctgactgtgaatcagagtttccagtgtagtcttctgtggaagaggttgagcaacgtaatatgttgcaaatggaaatagtagtttaaacgctaattcgaaagagggccttttactacaaatgaagtgaaaacagatggtggtaaatagagagcatttggcctgggtgcaagagcgagcactcctcaggcttgagtttgcggaaatgaaacctaacaacatgctttgcttgcttttaccctccagtgtcatccctcacgagcggagaatattaaccatattgcagtggctcaccctgccagatcatgagaggtatttatttctctctttcttctttcttcagtacatttctatcttagtttagaattgcgtgaaacactagactgtggaatagaagcacagccaatgtttggaattaaaagttttgtggttcttagccttaagtgttacttccctaagaaggatacaatagactttggttattgggaccatttaattacttggattactgcagctattaattctgtccactacagcagagccgaagggagtttctggctttgataaatgaaccagcagcatcccaaggattgcagaagtataaagagagacgcttctctgtaatgcagttagttgttgtttcaggctgcagattgcacggcccatgtgaattaccgccaggctctgttatcttgagggtcaaggatccgagtacaggttcaagttttcctttgtgacttttgattcctgaaggtggttccagacagttactacagatggggtggtggtcacagaagcaacagaaaaaaaaaaaagtttttcatgctaacatgaatagtagttaaaggataaattaaacttgagaacatttttttttaaatgcgttttttaaaaatatgtgatattttttgttacatgtggtttaggagagattctgaaccttccaattttcttataggccttcggtctatgccttctattctgagcaacctgatttctctggacacaaatatggccctttcggccctgaggttagtggtttagcatctgcctgagaagaatctgtggccctgggctacctgatctactgactttatttcaggaattgtataaagtctggatggatgtttgtatctacaaggtttatgcaaagtcaaataactacaagactaaaaattttttaaaaaatcttaaaacgacctgtttctgttacaggagcttcatttcagattgatttgatatttaaataataatatatcctaaacttgatgttaacaggagatggggtgtattctagccttgtgggcgtcagttggagggtgaataattcggaagagttggcatttgccttcaatgggctaggcatggaaaaaaatcttgagatgaaacctgcaatgcaaaacattgtaaatgaatttcagcacccttgaaatgattaggcagtttagagagggtagatcagctaagcagctccaataaccttggcagatataatacaatcaacttggcataagttatagtaatggacccttttgaatttaatacattttggcataggtatatatactgtgaaattgtcaccacattcaagatatgaacatagtcatcacccccccaaagtaacataaattcttgagaaaaatataccactgaatgaatctgcttagcagagcaggctgactttttttttttttttttttttgagacagagtcttgctccgtcacctaggctggagtgcagtggtgtgatcttggctcactgcaacctccacctcccaggttcaagtgattctcctgtctcagcctcccgagtagctgggattacaggcgtgcaccaccatgctcggctaatttttgtatttttagtagggacaggcttccgccatgttgtgccaggctggtctctaactcctgacctcaggtgatccaccagccttggcctcccaaagtgctgggattgcaggcgtgagccaccacacccagctgagggtgacatatttttatcaaacactcagccatcattgtggaagacaatctgtgaggtagtatccagtataatttcaaattcagaaggtgggaaaggaatggttagaaatgttcccacattttcagcatagatagtaaaaaatatgatggagtttgcaaatctaaccttttaaatatttttaaatatttaagtagcctagtaacccataggacactgctgactataattaagttcattgttttcagatgaattagaaatacaggtaaacatatcttggtttaaacatacttggttaaacatacttggtttaagtatttttgacaatacttaagttttttgacaatacttaagtattttgacaatacttgcagcatgtgaccaaggagtcataagtgtttctgaatgctttgacatcaattcagaggtgatttatttaagcactagtaactaatagctacgtaaaaccactcttagtcttaaatcactgaagttatataagtcagatgctctttttctgtccctttgaagtttaacccgtcttgtatgattgtgaaacacaaatgataaaatgagataaacatctgcatacatgatgccagtaaagaacaccaaagcaagaatggctgttttatttttagattgactttctttgagattaacctaaagggaacaaaaggaaccacattttatcaaaatgttcacaaaacaaaacaaaacacctaagcagttccatgttccctacttaaaagtttgacttcttgggtaatagcatcccctcaaagaacctgtggggtaggcaaaacggattggtatagccatccttttaaaagtaggactccggtactttcgcttggctgctaaggggagaacctgaagatagcactacagaacttttgactcccagagcacactcccttccatggaaccatttaaccctcctgcagtccaggagataagcaaagtggtcagttaataactatgttcaaattatacagaacattttctttatggcaaaagtttggcttttaataatacagatgaggtataactcaaaccttaaaagttatatggcttaatgataaatgttcttaatcaataaacatctttgggtttctaatatgtgtagttcagttacaattaaatgcatgaaagtatatgtttgtgtgaattaagaaacaaataagtttttttgaaagtactgagtagggaataaatgaagcggcatacaggatgctttaatttgctataataatttttctatgcccagggttgctcacaaatatataaacagagatttttcctatagtacctttgaattaagagttgaaagtattcatgttatgtttttttcagtattactacttcttgcagctagggtattttcatatgcctactggataaactcttaattgggtatcttggagtatatcttcagtaatggtaatctgataacctggtcattttcttctcataaggcaaaggatattttcagatttcaattatttctcatctggttctaggaatcttattttaactgaatgaaaaacaaaatagtttatgcttttaaaacatgaaaccaaagcaagtcagcaaaaattctcttctattgtaggctaattggtttatacacctgtgtatcctatatgcctacctatatatcatcatttacacttattatacatgaaaagattataacatactagttgaaagattattttaaaatcagtaacgtatcttttacatataagaaaataacctatatttgaaatttcattgaaatgattttaactaccaaaatgctatatgctacaataagatgaattcagttgaaatttgtgctttatttgctaaatatttgagtccacattttttcagaatgattctcaaaagctattaaatgagatgaccaaacattgagttaatagttcaagaaatggtgtattgctcctggtttcagagtgtaatggtgaatgttcaaaaatatgcttgcttttgattattggcgcaatctttttctttttgaccttctatgctttttctgtgaccccttgttcggctgctcttccgggcctacaggcagagctttggctggctagtctctaccttcagatggcaaagtatcctgaaatgcagggaaatttgcacctctacctcccatcctcttaataacctcaggctaaaatttctaaattcaggctaaagtatggctggtcagtgaaaacttagctttcatgtacctctaacatttgaagaaggaaatacatgcgatataatcactggatgaaaacccagtttgactaaaccctactcttctgctcctctaacctgctgcaattggaagggctcatctttggagtctttggaatgttgaggtctcttgcaaatggcatagagtttgatgggccgacttgagcgctagcagaatgtattcagtgaccatgaaacggaaaatcctcttttccttttgctgcttttcttatggagatttgcctaaaactaggagcattaaaaaacaaacaaacaaaaccaaagtctttggggctgtgtcttttgattgctttggtggagagagaggatgagacagaaacagaagtgcctttgccatggcttgccctggaaacagtgaaatcgcatggcagatgttccccttcttggatacactaacattgttcctcctcccgccccttcctgcatctgaatggctctcaagacattccccccacccaccctccgagagaagtcagtgaggtagacagcaaggcttgctgctttaattcacctttgcaccatcagcaaatcaggggcctgtttttcctccagcatttggaaatcccaaaaggttatcttcagtttatgtgtcaacttcactgctctctggattttcaaaacaaaacccatagcatgcaacgccccttaaaagcaggtttctgatagcaagagcataaggagactctttcttggtctgtatataccaagacaaaaaagagatgactttttgatgactttttagattttacctaattttaaaaggactttaacttagagttcctctgtactgaaaaccttaattgtcagtgagttctctctcctgctgaaagtcctgatttgtgggagtacgtttatgattaaggaggattacttattatttatgtttcattccgtccttggttttaaaatttttcactggatccttgccaatgaaggtgacagttgctttgacatagttgctgacgtgaacagaaagataactgtcagattctgaattggaatcacttacatgaacctcattgtcctcttgaaatgaccaagtggctagtatttagcctacttttcagttagttctttataaatggagagcttttcataaccaaagaccagtctctccctaatgcaggagttatggaatacagagcttgtctaatgccaccttcccatacatccataaatatcagccaaaagaaacccacatgactagattttcttaaattggattcttgttctcagcgaagaagctgtgacaacagtatcaacatcaatttaggaggcttctctccatagagttcctctaatcatccatccctcattccaattttttctcacttaaggagccttagttattctgagactctgctgatcccagatgggaaagtgtaagctttatatctgactcagagggacagacgacttctgagtccagacatctctatccgccagtacaggagagtagttatggctcaccttttactccggctaagagacctaagaggaaagttgcccctaagaggagacaggaaagaccagttgctcctccaaagaaaagaagaagaaaaatacataggatggatcattatgctgcggaaactcgtcaggacaaagtaagtttatctattgttccaaagctttgtggcgggcaggtctgagttgaaggttgccttcagtgccttggttggaaaatcggctgagcaagttttagaaaaactctggtgcattgaccttggctttgagtccagaagaatgtggtacttcagaggttaacactgatgtgaagactgcctgaactcaacatgacaggaaaaaaagaagtcttttcctttttttaagagttagttgccctaaaactagtattaacatttaggctggagtgactattaagagtgcacttattcacagaatcagtcacatggtttgtggccctggttcttgagaacaaccctgcaaggtaaaaggaggtattctcaaagacaatgtggattagaactcaataggaagttggcttagattaggggtctgtaccttcagagatcagaaaaggtgtaggttatagagaaggaaatagctaagacagaaagaaagagaaaataatgggcggatagagttgtatgtaatttccacaagtaatgtctactcttcccagtatgttcagaagagcctatcggttgttgcttttcctaaaacctttgaatacctctgaggcagtatcttatttgtgatcctctgaactgatccctaagaagtaggttctggattttacctgagtcatcctgctgagtaaaggaaaataagtcattgccaaagatcaaaacacattgttcatttggtatttctttacctagacagagatcttggagcagagcatgattttctcagaagcaaataccactttgttccacacccgttagtcccttccgattattctgcacatgtctttctgaaactttcaactgtggcttcctccttgggataggacttgaaatactgactcccgtcatgaagaaaaaaacaaaagtttacacctgatttcccaatgaaataacaggaggaaaggtcttgattcatctgagaagatgctagtggaagataatattatgtgtccgagtaaaaatgatattcacatcctttctgttcttatcttaatcatcttgggtatatttatgtgattgttagctaagctataaaattcatctaaatatactccctgtatctttctattctttgtctgatcagatgtttcttaaaaatctttccattgcacagctaaagatgaaagggggatggagagcctctagtatgtgaggacattcatgctgttagaaacttccatttgaagtaagaaaatgagatatgggtaatgttttttaggctttggaaatggtcttcagaaaagaattgagttttcatattttgttaaagaagaaaccttctagaacaaactcatggttcacttctttttaagttaggactcttatagattcttgtttcactcaaaatcagctttaaaagaactaaagtgagaagcaataacttgtttcttagaataggttcttctgttaagaatctattgctttcagatgccaacagttaaattacttagaacaagatggatctcattgtattaatgatattctaatttattatccagtgcaacgttgtgattttaacctcagaacagctttgaattcacttagcgtctatcttcttgccatagttcaaaatctaatgtgatttcacttagggactttctgtttactctcaaaactcttggatttaaaggatgctgtcacatattagaaagtcgattttctctcttaaagaattttcattaacaatatttttgacatttttatatcaaagaatctttaaagggattggatgaggagaggttttaattctgtcaaaagaatacaaatataacgtgcttagaccagatttcattaagaatggcaggcaaatctccccagacaaagctctgcctctgggccggaagttttctttccaaaatgttctaggggtagaagatctatgagagactgaaagggaaagaaagaaaaccctgtggggactaacttgcttctttttcctagatgacaaatcctctgagggaaatcgacaaaattgtggggcaattaatggatggactgaaacaactaaaactgcatcggtgtgtcaacgtcatctttgtcggagaccatggtaaagctttgttttttctttgctaataggatagatggataatgtttctgatcatattgaggaaaagaatccttgcccttagaagccaagactccattcttaacctcatccccgctttctttaagatggggatagaaatcaggccatgattgaaaagtatgagatgacctgagagatccctgggttcattttgatcaaaagctgggacttcttatatatttctgttatttgcaggaaagacctttctacaaaaatctgtctctctttaaagcaacacagacagtttccttgtgacattaatagcttcttctgtgaatgtgacatatcaggtgataatctcctatccctgccagccacatccccaaaacgagcccatggagtttatatggttaaaaaatacatctaaatatgataaagaagcagagatatgggattcttgtcaaagaagtggcgtgtaagtcaaatcatttccccgaatccactgagggaagtcaaggtccaaaccggaaggccctgctgtaattcagatgactgttaaagagaggaagaagcattataggaagtagtttttctaaatcccactttatgaagtagaaaaatttatgatcaattctttgaggagatcaagagcatcataaacattatatgactgtagagctgtgcagggggtgggggctcagagacatgcagactgagttctaaagggtatctcctgtattccggaactattagattgaaacagtagcattggaatttggggcttctcccttctagtggagttcggaggatgaaaattggctgactctttggcagttctgttaagaatggtaggcaaatctccctagctctggtcctgaaggtctttccagaatgtcctagaagatctatgagaaattagaaaaaaaaaaaaaaaaaaaaaaaaaaaagccaaagggattagctttctcctcttgagtgggctagatataaccctttgcgaagtcatgctccatgcattcggcttagtggagagctacacacaggtcagagaagttggagcatgtgtcacagctgattcaatttaagttgcccagaggtgtcaagagcatttgctcacatgctggagccagacatctaagtagaagggtcccaatgatatgtgctgaggcattgtaaaggtcatggataggttaaaaccttggcttgtcagtgtgtaggcttccaagatgagtagatccatttggtttgggacaactacagcacttcttcttcttcttttttttttttttttttttttttgaggtggagtttcactctcatcgcccaagatggaatgcaatggtgcaatcttggctcactgcaacctccacctcccgggttcaagtgattctcctgcctcagcctcctgagtagctgggattacaggcacctgccaccaggcccggctaaattttgtatttttagtagacatgggctttcaccatgttggccaggccggtctcgaagtcctggcctcaggtgatctgcctgccttggcctcccaaagtgtacagcacctctctcttaaaagatggtatggtttagtgttttagggcatggtctttggagtcataatgaattttagtggagttcaaattgcactgtgtcatttaacagctatctgacactatacaccttttgtggcaagtctcagtttcctcatctgtcaggtgagaacattaacacccctccacaaagttagtctgcagagtgaaggctgatgacgcttgaggagcacttagcatagtgcctgatggacttcaaaagtaaaggagattgctcacatttggggtggcataagggacttcctagaaatataacaaatgggaaagactttcagccctctattaataggtatttggggactttcccttcccacgctaacattgtactaaaacatagtagctcttcattgctctatttttcttcctaagggtttaactgttaaagtgcaagatatataatccttatgctgtgtgttttttcttgcatttcattccaatttgtattaaacaagggaaggttctggatctgggatcctaggaggtgattagttaaattttaccagatctggggtactctgggttgtatttccttattttaaaacctttgggcatcctttacaggatataaatatatgagtattctccaacagggttattttccctgttagagaatatgtacatactgaattgtactgagcaatatattaaaacgttccaggtcatctcatacatttcaataagatctctagtagcctccatagtctatgatgctaagatttgagtttacaacaatgttttaaataaaagcattttaataaaagaattttccttgatggggacacacaacaaatcttggggtggaggagaaatatttgttgtttaaaaaaattccctacctagaaccttcttgctttagttgctagctttcagttctgactaattacattgtttacaacttgttttcagtgttattttgtttttcagtttgggtggtcattggaactgacatttttctttctcatctcttgttgccagtattgttttgtcagtaacatccaaggccaccagtggagacagtgaggactggtgattatgtactcaagacaggagatatattagagagttggaaaatgacattttgtaaaagagacacagaactgtatattccatttataccacccccagctgggaagagtttgatgcaacctagggtttttttttttttttttttttaaagaatagatctttttcataaagactctgtcaatagttatgtttgttgttgttgttgtttaaatcatggtgacttcctttgtcttgctattctggctgagtgacttaaaatgtaatcgaggtaatgcactttcaaccttctagtgcttgcaagatgatatggctaagtaaaagtctagagaaaagattatacagagaagccttaaaccatttaaagtcaaatacaaaaatctcaaaagtcagggctcttcccattaagttactaaaaactaactaaagagatgcctggatgttatctttcgtgtctatgttaagattttcgttttagtcttgcctgaaaatattctttttctccctccccataggaatggaagatgtcacatgtgatagaactgagttcttgagtaattacctaactaatgtggatgatattactttagtgcctggaactctaggaagaattcgatccaaatttagcaacaatgctaaatgtaagttgattcttaaaatattaagtggttagagtggtaatacaaaggaataggtaagggcttgttttctaaagctgaaatacttgggtaaaaattctggctctgctaccgcttagctgagtgaccttaaataagtcatttagactctaagcctcagttttttcatctgaaaaatggggatgataaatgctagcagctacctgtagaaattaatctatgcatattgcttagagtggttcctggcacatagtagcattatataaatatttgctcttattcttattatgtggaaattgcacttagtttgaagcatattcatgaccataaacagaagtttataagataagaattttttcaataagaagttcaggctgatcatttttatagatgaaactagagggtctatgtaagggttggcagaaccacatttggactgtgggggttcctaggagccttgtggaatggagtccattctctttgtaaaagtgattggtagaacctagtaggaaaagatattaagcccttgggaagtggcagctgtcctgaaagattagaaataaaaataaacaggaataatcttgtcacttatgttttacatgttcaggttatgatctaccactgatacaaacttaatttgtggactaagatttttaggtgctgtctacctagcttttgagaagtccatagttttattggggttatgccgcactttgaaaaaaaaattctttagagtttttagccttgggaataagaaaccattgacaccaaccttacagctttggaaaattaagtttttccctaattatgttcctgagtcaacacaactggaactgttccagggtcagctccagaccatgttgtgaaataaacaaaatgtgggtgtttctgccctctctcctccatgacctttcctgtccctgtgtcctcccttttctgccctcgcatagactggatgcagtcactatggcacccctcgattttagtatttgcacttcagggctatgcaaaaaagattttctctatttttaacaatatttctgacattagtacatgtaatggggaggttggtttggaggagaaaaaaaaaccttcccatggcccatgaattcataactatcaatgataaaaatttttgtactttacaaaaacactttccaatgtggtttcattttgtgggagacagtagcatggggtggtgacaggcacagatgtctgggttcatatctcagctctgctcggtactcaccatgtgacgccctgtacctctgcttcctcatctgcaaggtaaggattgttaggaagattaaacaagagattgtgtttacataatttagatcagtgcttagcacatagtcaaagctatataaaggttggatatgatgatgatgtcttagtcataccactatttcagatagagacacacacacatacacatacactcttatttaatccttttaatagcattgtgtgataagtatcactatcccttttatagacagtagaaattgaggctcagagaggggtgagggaactagcttcgaggatgatggttagtaagtttcagatctgagatttgaagccagattagctgaaccactgccctttcttcacacaaaatgaggactgttagcctgcaaagactaagttcttcagaattgaaggattgatgtccccagtatggactcaggcattggatattcctagtaattctctgggacttatctgagtacatgctatttacttctcttcattgtcaaagaccatgaacttactttatttcgtccctttgaggaatatgatttatgaggcctggcttgctcaatcaggttgcttgagtgtcagagtgccaactcctcctccttctgaaaacccattggcttagtgaggatttgaacagcatttacctcctagggttattgtgaatgaccagagagaaagtgcctgcaaagctcttttttttttttttttttttttttgaggcggagttttgttctgtcgcccaggctggagtgcagtggctccatcttggctcactgcaacctctgcctcctgggttcaagcaattctcctgcctcagcttcccaagtagctgggactacaggcacatgccaccaagcctggctaattttttgtatttttagtagagacgggatttcaccatgttagccaggatggtctcgatctcctgaacttgtgatccacccacccctgcctctcaaagtgctgggattacaggcatcactgtatctggccacctgcagagctcttatagaaagacaggcacatagtatgaaatctattcgggctattattattacattattacttatttgccttctagtaagagatgtaattaaggccaatggaatacacattttagtttcggatttcaagctttagagctaagattctgaaaatagactttggagtctgtatatttatatcccaaggcaagtttattcatacatttttaacaaatatgaacaaatatttattaacaaatgtatattgagtgtctactctgaacaggcccagggatgcagcagcacgtgatacagataaggcctgctccactggtatttagatgccagggagggctgcctcatgatagttgctatctcttctgaacaccactttccttttctgctgattctgtaataacatactgaagcaaacttcctgaaaacaaaacaaaatccaagcaacctacaatctcctctttctccccacattccgcccaaaaggggagcttcagataatataatcctgtccacagtttatgcacagccatcatttacataattttgcttttagctagttcagagtattgactaaaatcttttacttgatgctattgaaaataaaggaggtgcatgcacgtgtgtgtctatggctggagaggtgcggctacctgtgtaattacacccaggatataaatagggaaacaaactcccttttaaaaaaataactcaatggattagaagtttcaacttaaagtgggtgaagacttgtttcaaaaatctgcagataaataagaagttacattaaaagccccaaatgcccagtttagttcctgaggtcaaactgcaaataaattatgtctcaaggggaaccattagggggaacttaaaacaagaagcaatttacctagcagtatcctggtgctatggaaggaggaattccctccagaagagcagaactggacctaggagggcagtttactataggatttgttccacttgcttagctgcatgtcaatgactgaaatgttaaatacccctacacaattatttatctttcaaacaaaacactaaagtgatagtcttctgtgggatggaaggagaaagaattgagtatcttgctgcaaaaatgatttctcttggtaatggttgttatttcttttgaaatctttctcctctctttgaacagatgaccccaaagccattattgccaatctcacggtaagtgtttccagttgtcccgcctctgccctgcccaggcctctgcccctggagcagcctccctcctgtgtgtgcctcccccggcggggaggggtgggaggaacactttcctcactgccctgccatcctgtatatttgtttccttaagaactttcaaaacttctggcctgtggtcagctgcaggctccctaatggtcttggcaatgatacaaatggagaatatctgatccttccattagaactgaaaagtattcattcatggttaaacaaatctttactttccctgaaccagaactgcccacccactctgctccattgttcccggatgctgggtagcgaccttagtggtacaagagcatctaatcagataagcctaaacccatgtgctcctcccctcccaccgacaccccacccccaactgcttgacttgaaggagttgggaaaggccttggagtgtgaattgctcttagcgatggtctcacaagccaggaatgcatcttaaaattcctaactgtcctcagatagcctgtcatatcatctccaaggttacttaatctcttttgaatctatttgttttcagcatacattatttaatagaaataaatttcatttattcactcattaacctttggttaggcttaaaatctccttcagctttctagagagagaatttgtaagaatttttccaaaagacattccatctgaagtctgatttccatttctatttcagtgtaaaaaaccagatcagcactttaagccttacttgaaacagcaccttcccaaacgtttgcactatgccaacaacagaagaattgaggatatccatttattggtggaacgcagatggcatgttgcaaggtaactggtatatgggctatttctgtttctcatttccacaaccacccctttggcaactggaaatattttatcatccttagtcatcactgaaagaaatatcagttggaaatctcactgtttccaaagattttgtgggctacataaaccatcagtgctgagacaatatatctctatgttctgggtctcagcattgtggtgtctctttgcagtctgtcagtgcatctgtgtgtgtgtgtgtgtgtgtgtgtgtgtgtgtgtctctttcatcctttgaatttacattctaaactctattcttactacttgagtaagtcaaaagtataaatgggagcttgccttagtatattgggctgatttgatctcggttgttgagactttgcttgtagcaatatttatagaggactttagaaaatgttgttaatgttaaaaactctgttattgtgggcactttttacattgctttaaatattcccaatgtttgccttctattgaactacaaaacactctccaatgttgaagagaatgttccttgcttttgaatgtggtctaggacatgtctggaggctctaacaacttccaatgagttaattattaaggatttatccattttcacacagacctggaagtagctgttcccactcactcttgctccaactttctacttaagaaaagtgctgtgaatttgtctatctcaataattgaacaactgccacatgtactctagctgggtactagtttgcaagagaaagaagataacaagaaaatatttagaaactcaagttctaagaagaacttagaactctagaaacttgtatcagtatgggatgtttagagagacacatttgacagatacataaatatcatgctgtaattttccagggtgtacttagagttagatatgtgggattatgaagaaagatgtacgaagaacaggaattattggagtcttctaaaacagttgtgggaaatcctcatggagaatttactggcctggtaaattaattgggatgtgactgaaattaattggcccggtatgtgctcctgaaggaccttttatgtatggggcagcttggaaggggtcacactggcgcaggtagtaggttcatatggcaaaaacatgggagctgagtagaagttaagtgaaagatgatgacagttgggcaaattagtgtagcccaaaaccaggcatgttggttaacaatgcatcttttaaatttaactcatcttgcattgttgaggtattgtatgcatatgtcttattatcccaagcccttatttttccaagggtggagacccgtatgttagattttttgttttcccaaagcactttcagtgctatatacccataggtacttaggaaatatttgtattaaattaacatgaaagctattttggaaaagggtcacatgacacttttgcaaaaggtgtcttctgtcacaaaaggaaagatcagatggtcttgatgtctagagagcagtatttctgttttctgtttctaaatagagatattgtctaggtgagaccatgcttttgtcagatatgtcatgattactgttaagttggctgcttagttgtactctagttgtattgtatattgatagataaatttgcatgcaaatatttttatagaatatagatctccattcattgtttaaacatcgcaaatttattttattttaaattttaaattattatgggtatataataggtgagacatcacatttttttaaagtgccaactatgtcttgacactgaccctagggaggggtacatagaagtgaaccagacaaacatggtcctagagtcgagaatcttacagtctcagagctagcgaagcacctagacaggcagagcatgacttttgacaagtgccctacttggtgtaagcacgagctccaaggagggcatcgtgacttcagttcacaggtcgccatttatcctgcaataactgtcaaagaaaagtcacttggagaaatgcataggatcctcttttcatcatcacaagaagaatgcaattaaaatagaggcaaactttcaaaagccccttcttagatattctttgtaccctgaaattacctttttatcaaagtaatttcatgagaaattctaactaatcatgaaattgtttcaatttaggaaacctttggatgtttataagaaaccatcaggaaaatgctttttccagggagaccacggatttgataacaaggtcaacagcatgcaggtatgatggcagaactgtgaattgaaattgtgttttagtggttcttcgaaaggataagtaatggtggtgtgagtgaagttgtacagtattcataaatagaggaagggttcctacctaacaatgcttaactgtttttgtttttcttttcttttggaagactgtttttgtaggttatggctcaacatttaagtacaagactaaagtgcctccatttgaaaacattgaactttacaatgttatgtgtggtaagtcactcatttaatcagaaccattgaaacaatctttagttagtatatatgatctttctcaatgtcagagaaagaaatgaggtgtctattttctgggactacctcctcttccccacaaaaggttgtaacttgcccattggttcaaagacagaatattatccccttctaaggcttctttgtcttccttcaacagttgactaatggggcgttttcatagtgttgctgttggcagcctctggctggtctaacatagcattacagtttgacaccactggtcagagacctgatgaagcaagagttctgcacagagtcccctccacctccatctcttgcattgcagcccagttaaaaatgttgccagcttgcatcctggccagctatttatgtgctcttaattatttttcttccttgaacttctagttgctgaatgaggacaacttttcctatttagtaagggagtgccagtctggtggttagagggggagtctgcaagtcgggtctcctgggttcttttcccatcttggctgctagctgtcccctgtcctgcctctgagctcaagcaagttactgaatacgcacttggcaaccattcacttgctatgaaatcagcctgttcattgctcagtggcacttcaggggacagggccaaagcctcctcatgtccccacacttctgtggagtcattagagggcagacttctagttagttattgattataagtctcatttcaaaacatggaattaaatagtcccagagaagtgcaggaaaaagtgatactgacattgatcacccttgggttgtaactatcgcagatacaggcaatagttaatcaaagtcttgttccttcactctttctttctgggaatctctctctctctattcatggtcaggcaatgaacttgggtatttcagaaagctgtggcaagatgtagttagtccagaatggttcaggaggtaaggagggggtgcctgccatctacatttggttttgtccagttctgatttgtgttcacagttttcagacccatagaaggtgaagggttttaaatcttaccatatctcatcaaaaaaatataagaagcacctgcctccttttcttaattttcattagatctcctgggattgaagccagctcctaataatgggacccatggaagtttgaatcatctcctgcgcactaataccttcaggccaaccatgccagaggaagttaccagacccaattatccagggattatgtaccttcagtctgattttgacctgggctgcacttgtgatgataaggtagagccaaaggtagaaataatctttatgtttattatggagaagtttgttgggtggctaacagtgctggcccatagaactttctgtgacaatggacatggtctataattatgctgtccaaaatggtagctactggctagtgtgactgaggaactcaaatttttatttcattactttataattaaagagccctatgtggcttgtggctaccatattgaatagcacaggtatagaccatgaaagacaaaaagtagaattcatgttgctattctgtgcagtcacagttctcaaccaaaatctttttctgttttcttcaactgtggatcacatgtctattagtcatggtcccgacgggagacaggtggcccatatagaagaggttttgaaagagagtttaggccaggtatggtggctcacgcctataatcccagcactttgggaggctgagatgggtggatgaattgaggtcaggagttccagaccagcttggtcaacatggtgaaaccctgtctctactaaaaacacaaaaaaattagccgggcatggtggcgctgggaggctgaggtgggagaatcgcttgaggcagaggttgcagtgagccgggattgtgtcaccacactccagcctggaagacggagtgagactctgactcaaaaaaaaaaaaaaggaaatgaaaaaaagagagagtttaaaggaattgtttcagtcatgtttaatgagtaatttaccaaggctgagcagggtggatggaattcaatgaggagtgacgaagtgccctggggttcgcatagtaccttctaaggtttaaagggtgaggggaaggagtaagtttccaaaacatggagagacaaccgaataggaaggaactattgtatttggccgatgagtgcagcttgttcattgcaacccagcagggagcactcccagataggagagtgctaccgtcatcttcctcccctgtacttcctttcacatgtttccccttggtagagcccaacagggagccacagggcaagtttgctctttgatgccatccctagaggtcagcctcccaggccacagagcagggtgtgggagggtgcaacaaggatgcggtggtggtgcaaacagagactacccccacacactatgcttggacaggttttcttttttttttttttttttgagatggagtctcgctctgttgcccaggctggagtgcagtagtgtgatctcggcttactgcaacctctgcctcctgagttcaagttattctcctgcctcagcctcctgagtagctgggattacaggctcctgccaccatgcctggataatttttgtagttttagtagagacggggtttcactatgttggccaggctggtcttcaactcctgactcagctgatccacccgccttggcctcccaatatgttgagattacaggcgtgagccactgtgcctggccttatatatttattaaataacgtatgaagtaatcttttgtatagtttcctaaaataacctatactatagttttgcatgttgtaaaatttttaataaatgctattatactatatgtatcctgcaattattttatcattatgtttttgagacttaatgtatattagtacatgaagttttagctcacttatttttactgctaatacagtagttaatatttaattgtataaatgtaccataagaatttttttccattttcctacttgagaacatttagtaatttgcaaatgttagctcttacaacaatgttgccacagacattactggaaatgtcttcttgcacgcatatgctagggtatacagtgaagggtagagttgctgactcatgctgtttcagaattgctgagtcattacgttttagctttggtgaaaagtgatttcataaattagtttgggaatcacttcagtgtgcctagagattaatctgaaacatttaggcgctatcctaatttacttacacatatatgcccaagtcatcatcagtacccacatgggaaattggtactgtggtgactatccacagttttaaggaaggaaacagagattgaagaaggtgcttacaaacatagaactgctagaggtggagcccagaatgtcagtttgagagaaaacagttaattcctcgaaagaatgtatgatatagatggagtttagagttcgcttttgaatttagcagggtgctaagtcgacagaagggcacagagggaaagaacatttctgatttgctttcttttttcctttactggttttcacacatgaagaacaagttggatgaactcaacaaacggcttcatacaaaagggtctacagaaggtaaggggtggttgcaaaataatcagataaggtttttctcgttttcgaaaatcgaaaaggcttcttatttacattatagtgtaagcacaatattgtttaaaattagaatttgtatttcaaagtgactttcatacctatctggcaaaggatatttgtttattccatgtacacaagatgccagctgtgtaataaaaaaattccaatagcttttctcccccctcaatagcttttaagccctctgaaaagtacacaatccattttgtatctgatgagtcataagacactgtggggcactcctataaagggaatgatagtcacaatgataaataatagcagctggtgcctatcctgaaggtatctacctcgagagtcagtgtatatatagatatatatatattgtgatagggagagattcaccgaaggaatcaaatcagaactccctcctcatatgaaggatcatctcaagccctaactcttactttacgtacaatgataacgagcacgtattagtgaactttcgcaagcttatgatatgaccaaaaaaaaaaaaattagtgatttgtactaagaggcgtttctcgctcccattttagtgtgctggctgtaggccaagggcagctttgctccatgtgtattctttattctggaacccaggctgaaggagtagccttcatcagagacatgtcctgctcttgacagagggaaaagagtggcagaactgtgcactgtgtcttaatgcttctgcttttatgaggcatatgtcactccattcacagtttgctggccaaagctgagcacatgataccaatggtgtagggaagtacattttttccacggggactctatcctgcaagtcatatggcaatgggtggaggcagtaaataatgaggagcaataacacaatctaccatgcaggctctttttatctgattgtgaagtttcacaaaattggaggaaaatagaaggggaggggaagcctcctatacatgttactaaagtagatgggataacatgttgaaacagccaggaaatgactaaaagtgtatggaaaatgcagaaagaattcaagcatagcagccacaagtcatgcagcaaagatgcacgtggtcaaattctcctgagagcatcgcttgagttattagcttacatatggttctgtttatcatatatgctctttccaatctgattaagtagagttgaggaaaccggtagaagatttgatttacttgacttatttttcctcttttaaagatcttcatctgcctccttcttccttttctgtatctccatcatcccacttctccctttgatcacagaacacacagactctggcacagaacggaatgaatctcactttgaagataggccattgttggtagaaggcacacaaatctttcacaaactctacaagtgatttgcaatgttcgacacctaacctctagtggactatagtgtcattataattagaacaattagaacattgctagagtcaaaagatggggagtctcatgattcaagttttttagatatttagttgccaaggcagataaatactactcagatgcttctcttctaaaagtcactaatgaaattaattatggtaacttctattgaactcccatgattttgctgattcaaagtctgactgttcatggtactaaagcatttctgtctgagaaaaacattcctgcatttaatttgttggtggcagtgtccttatatgacaaaaccagtctcacaattcattataaacaataacctcagccgggcacagtggctcatgcctgtaatcccagcactctaggaggctgaggcaggtggattacctgaggtcaggagtttgagaccagcctggctaacatggtgaaaccccttctctactaaaaaaatacaaaaattagccgggcggcagtggcgcgtgcctgtaatcccagctacgtgggagactgaggcaggagaattgtttgaacctgggaggcagaggttgcagtgagctgagatcgcaccactgcactgcaacctgggcgacagagcgagactgtctcacaaacaaacaaacaacaacaacaacaaaaaaacacacacaatcacctcaaacttaagagcataaaaataagacacatcttcttagtgaatcactgactctcagggctataaggagctatagttagtaaggttacatctccattgctctgctctgagtggaacgtgagtttcttacttaaatccctgaagtgtctttttataccgctgaagcttaaagtttgtgtattttcatggaaacaaaccctcatggatacattcagcaagcatttgttgaatactgacactgggctggcactggttactctgacacaactgtaccactgagagtttctaattcatggcttcaaagtggtggcataaaatattaggggggaatctagaatagctcatgctattctaagtctgctcatggcctagtggcaccaacatttaatgacacaagagagccttcaaaaatatttgtcttattatgtgcaatgcatttccttgcttagatgctggaatatgtataaacctcaatgctctttctcctgttgctctctcctatcgctgtctcttgggctttgtttccttttgggctctatcttggtcatttcttcagtggcaaagcgatgttttcttggtctgagttctttcaggcctttatggtgtttcctgtgtcataaatttggcctcccatttaaaatattcagtgtctgccctactggaggagatccttgtgaatgtgaaccaccatgtatgtgagcacacatgtattatgttcagggcaattacttcccctttctaggtacctttgaatacatatgaaggcttttaaagtagtttgtaaacctaaacttctatacagatgtaaagttgtactatttttattattagttttttaaaacacagatgtaagtagttgatatttttcagaatatgtcatgagctatacacacttcacctgtaacatttatatgtgactgttttaatggcatatgctgtaaaatctgtcatacatctgtacaaaatacatgagtaaaagctgcatgttccaatagtgaaacgatcacagggatatctgtgataaaaaagaggtatgttaaaccaatcttgggcaatattttgctataaatatttaaactgttatggaatcaaatcctttactaaaataaagagaaagaaaaatgtaatcctcaaaaatggccatctaagctgcttgctaaactttaatatttctagataggtggtagactccaggtcttaattgcatgcctgttgttatttctggatctcatatacctaatgtcttggccgactttccatgcaatgaaaactcatttccttgtggcattgaattgatggatgaattaatgaatgaaaagaaaatttaaaaaatctcttgtagcaagcaattctggcactatagccaagtataattttcactgcaagaataattgcaccatttattttcaccttggtctttactctatttacattgctataaaaatgtttcatattttcttaggttagccctcaccatcatctttgtgaaaaaggaattaaaaataattttaacacctatgtatacttggctccttatcatacacaatgagaagttagtttggataggaaaatgacttaaacacagctgggtgcggtcagtggctcacacttgtaatcccaggactttgggaggccgaggtgggtggatcacctgaggtcaagagttcaaaaccagcctgaccaacatggtgaaaccccatctctactaagaatacaaaaattagctgggcatcgtggcatccacctgtaatcccagctactagggagactggggcaggagaatcgcttgaacccaggaggtggaggtgcagtgagtcgagatctcgccattgtactccagcctgggcaacaagagtgaaactctgtttcaaaaaagaaaaagaaaattgacttaaacactagtaattcttgttaactttaaagcagagtcctgaatatggctacagagggaacatcttctttagctcttgtcaattctggaatgtttctcatttgtgttatttctttggagatattagttgttctagagaaagaaggagatagcattcactcctgcttctgagtgtttgtgtctgcgtgtgtatctgtgtgtttttgggaatacttggaagaaatcaatacatagtaattgtttattgtttatagtagaattcaagatgaatttgatggtagattgaattttaacaacttttacctagcaatattctttgccagtattgaggtagagcccatacctttactaaacagtacaactgcaactgctacaactgcagttactttgggttaaaactaaacaagccacttcacatattttgcctgtaaacagtgcaacattccagggagatataaagctttgggagattaagttacagagtaccacaactataaagagctgagattagatttgaacgcagttttatatgacactgaagcccatgtgctttcatctgaaaatgcttcttattctaagagtgggaacaaagggaatatgtcaaaagaaaattttgcttttcatatacattttgtggcctaagtagagagactctttgctcaacaaaaaatttgtatatcaaagtttggaagttgcttctgaaatactagatgctttgacagaaactactgtcctcattagcttctcagtaggcattactcgggcagagttcctgccgggaagtagttggatcttctttcccatacactctccatgaaataacccagcggccagcacccaactggagaccacccaaaaggccaagcagaagagtaatggcctgggattctagtgctgctatgcagctgaattattttgtgcaaatcataaacctccagttccttcatcagtaagttggagatgatactactgacctgcccagtgtacctttcagggtaacattagacaggtcatatgtagaaagccaagatttaaaaaaaatatgtatcattaacttaccaacaagtgtttgccaagtagatattatgtgatgggcattgttggagatggaagatacagtggtgagtaaaacagatgaagtccttgtcctcataaagttattgttctgttgtaggatttatccagttgatacattacagcataatgttttcaaggttggggtaagaaagaacagggcactaaagagaggccttaaatcaaatctcagaggaggttgaaatggcagcaaatgataataggcacttgtaaggcaaaggagaaagtatgcaagaaaaggaaagatcttgggtagagattttgtggtaagatttaagagcatattattgtgggagtgtatgttttaaaaaaacaaaaaagaggagagattttcatgtggctctcaagacagcctgctcatctgtgggaatctgaatcaggaagctgaggagggaaaaggaacacaaactccagtctctacgacccaaatttggaatacaaaaagaatgagtgctggggaagtccacaccacttaaaaagattggcctcacagtattttgccaagtgtggtatctggaggagaaccttggcatgtaccaaaactgccagagacactattgtaaacagggaactggggtgtggaatgaaggctcggtctggaattccatgacaggcattctcagcctgggaagaccaggttatactagatccacgtgaagaaatcccagaaacatattgcagaagcagaggcttgcaggctagtctccagggttgctggtctcgagataaagatctcaatgtgtgccgagaacaagattcaagtacattttgtggcctgagtagagagactttttgctcaacaaaaatgcagtgggtggctcccccaagatgtcataaagactaggagagtcaggctatgactctgaatctgtgattctttgatactttgataaactgaaaaaataaaatctaaattttgattctggaccttaaaatctgtgtttcttactgcagagattatttccccctctttcttagatgaaactgttaagctccaggaagacccaagtagatttttttgggtcattggggaccttggttggatttttaggaggctgtaaaaaccactgtattttttccccttattatgctatttttgctcagtaataattgagaaaaaggcagtcagtgatacttttgtgttccagctgtgtgccaaaacttgcagttatgacaatagcttggaagctatggaactcaaatttctttcttttcttttcttttttttctgagacagagtcttgcactgttgcccaggctggagtgcagtcgcacgatcttggctcactgcatcctctgcctcccaggttcaagcagttctgccccagcctcccaagtagctgggattacaggcgtgtgctaccatgcctggctaatttttgtattttcagtagagatggggtttcaccatgttggccaggctggctcaaactcctgacctcaagtgatctgcccacctcagcctcccaaagtgctaggcttacaggcgtgagccactatgcctggccagaacccaaatttctgaagcaagttgaatctatatatgtagagcagtagagtgagtagagatggagaagctttattgaggaaacctttcaggagaaaatgaatcttttttttttttttttttaagagacggagcctcgctctgtcacctaggctggagtgcagtggcatgaccttggctaactgcatcctccacatcctgggttcaagcgattctcctgtctcagactccctagtagctgggattacaggtgcgcaccaccgtgcctggttaatttttgtatttttagtagagacagggttttgccatgttggccagctagtcttgaactcctgaccttaagcaatccacccgcctttgcctcccaaagtgttgtgattccaggcatgatccaccatgcccggcagagaaaatgaatcttaagatatctctgcccctcttgggcccctcgccctttcttcttcatgtctcttccatgagggctgaatatttgtcatacacttttgagcgtgaaaagggacactattaacaattataccagggcaacaggcataaaactgtaacatggggccagcctggtttaacttcatatgctccttaaaggactttattgatgccaccttcactccatttccagtattcatcatcctctgcattcccatcacactctgtaactatctttaatatggtgcagaccacatggcatctgttatttgtgctatgtttgtctctccctttgacttgtgagctctttgagggtaagagctctatcttaatcatctttgcccagtacctccattctacagcgcaaggtctggcacaaccaaggcgctcaatgtttgatgatgaagaataatggatacatttggaaggagataggtgacagacttggcgaagactggagaagttatttctggtagagagaaaggaaatagcatatatgatagtgtaatgttgctaacaacaattgtgaagagagtgttgcaaatacattagcctttgtggaatagagtgttacgttgaatgcttagaaatgaggaggatttagaggaagagccagagttagtagagactatagattgtccaagatttttgtttggtggttgctctagggaggggtattgcgtatgggaacatggctgctattttattgtcccctaatggaatcgattagatgccaagcttgaatttgagtttggaggactgtgtgtggtaaccatgaaaacttaaatgatgaaaagagaatagcttctcaaagaattttgatacttctgcttccagctgaaaccaggaaattcagaggcagcagaaatgaaaacaaggaaaacattaatggaaattttgaacctagaaaaggtttggtttgagttttgaaggaaagtctgggttgttttactgcccctaagtactactgttacgatttgctggtgttttatttgtttattatatttcatttatttaatattgtcagattatgttctaatccttaggggtgggtccccaaatttggcagcttaactaaggcttctacatttactgcaatgctggagcagccgaactacccagaacaggcttgtgttgtaatagtgtgggccgctttgtctcaaatccgcagttctatctgggagggtcttgcaaagtattctacgaagacttttctccattacttgcatagaatggtaagactttaattaaagcaacatgtatacattatttaataagtgtttttcagaactgattttctctagtagaaaaaatagtacaagaatttatttttttttaaatttatcacttaaggaattgtgaattgcctaagcctcagtctctaaatattttggtctgtagggccccacatttccaagaatctgtggaagttttgactttagcctatccaaagtgggcagatcaagctccaggtatttattgcagagtgtggaatgaagattttcatactgaactcccatctcttcttccgcaaagagtaaagcttcagacctttttttttcctaagaagagagctttcctttggaggtctgaatctgcactgggggtcttcattgagttctttggtaactgatgaacttccctcttctgtacttagaagaccctcttgaatgcccacttattttatctatacatgttcctttaagttcttacctaaagacttttcctctgtatgacaaagctgcttactttaaatgctcattactactcactttttatgctgaaggaatgcatatttgagttgctgtatgcatataatgatcaatgtgtgccttcttcttaattaaatcattggtgtacctgataagcctcttcaggggtcaaaataattaattctacagaaatccaatcctattggctttccattcagctgaatcatttcaaaatttattacataatgtttcctttatatacaaattgtaaattctttacaactaaaaaaagcattctgtaaatacagcatttacattatggttttgataactgtaaagcttgacccatggttaggtgatcagatcaaccacaaaagtgttaggaaaactagcttgattaaattaaggagaaggtgctatattaataataagtaagctagccattttaggtaacttgactcttccaacatttctttaacatttgatgtaaaatttaatatgcacctaacacagtttattttttttcttttttagagagacacctcctctatgggcgacctgcagtgctttatcggactagatatgatatcttatatcacactgactttgaaagtggttatagtgaaatattcctaatgccactctggacatcatatactgtttccaaacaggtcattgagaaaattggattttatattttttattttattacattcctcatgttaatacaatgattccttgcttaacagaattttgtcttagaaaatattttattttttcttaatgacagaaatcctatgttggatttattgtaagatattttgaattagcctttattcaatgttctggtaattccatgggaatatgttaaactttgaaggtagatcactaattcttttattttcttttactctgcctaagtcattgcccaatagttacagaaactgccaaggtttgtttatttattttaatagactttatattttaagagcacattttatttctcagcaagattgagtgtaaagtgcagagttcccacatactcacccaccccccttcaacctcccccactatcagcatctgttttttttttttttctaatgttttgagaccgagtcttgctctgtctcccaggctggagtgcagtggcatgatctcagctcactgcaacctctgcctcctgggttcaagtgattctcctgcctcagcctcccgagtagctggaattagagatgcacgccaccacacctggctaatttttgtatttttagtagagatggagttttgccatgttggtcaggctggtctcgaactcctgacctcaggtgatctgcctgcctcggcctcccaaagtgctgggattacaggcatgagccaccacgcctggccctgttgttttttaacaaaagttttatgttgggggtttcagttttgatgaagatgagataaataggtatatatcacaaattagaaaatgttatttggcagttgaggcatgtttaaaattttttaatacaaaggaggagaacacttctactgccccaaatacagtttattttgatttgtactgtgtacacatacgtatgttcttgtacattctacacacacacacacacacacacacacacacacagataaatagtctatttagaggagatacatctatattgtttgtaagagtgttattttataagttatcttcaatgagattctatttattatttcaacagtgggatttctgctttatgttctgctttctatattgtttttcttaagactttgataaagagagttatgttgattaaaaaaagtttgaaaacttgtggcttactgtacttaaaactaaggacttttaaaaagaagtcagactatcaaagataaaaaatttaaaaaaggagtcagactatcaatcagaatacaagcataggagaagccagaggggttttgatttcagccgttcgtaacagagccacggcattgctgagtgcctctgactcccgtgcaggctgaggtttccagcgttcctgaccatctgaccagttgcgtccggcctgatgtccgtgtttctccgagtttcagtcagaactgtttggcctacaaaaatgataagcagatgtcctacggattcctctttcctccttgtaagttaagaatatcaagatctgatgccttcagagggatgtcacattgtgcaatcttggtatttggaatttcagtggcttgggttttcttcaagagagggtgctcagaagattatctaaatgaatttttatgggatccttccaaaatcagccaaaaagtgactagctttcaaaaaaatctaattctccaggggaattctaatgtgcaagggaatcttctgtgtcccgccttacattattaaatgagaatctgaaaaggaaacagtgaatcattaagacactagtcgtttatgtaatactatagaggggatctcttaagattgcttgaggccaggcatgagccaccattgtaatcccaaagtaattccagcactttgggaggccaagatgggagggttgcttgagtccaggagttcgagatgagcctggacaacatagcaagaccttgtctctaaaaaaattaaaaaattagctgagctggtggcacacgccagtagtccctgatactctggaggctgaggtgggaggatcccttaaatctgggagattgaggctacagtgggctgtgatcaggccactgcacttcaccctgggtgacagagcaagattccatatttaaaaaaaaaaatctgaagcccttaaaccatctctcattaccttgatgatttttttttaagtctaaatggcactgatgaaatcaaggagttattttacataatgttggtagactcaagaagtagacagtaagaaaaaaacattgtaaatggctcttgggagagagctattgagtgaagaagagactgagtgggaggggagtaaggacatgttgtataacgcagttaggagtaggaataaaagagtagattcatttacttcatgttgtttggaccatttaagaaaattctacccccctctcccttttttttttaactgatatagattttggtaagcaacgtatactatttgttttcctaatgtttagatctgagctcttcaccagaggctaaatatgatgcattccttgtaaccaatatggttccaatgtatcctgctttcaaacgtaagtccaatatttacctaatacactgttatttatgaaaataaacatttctaaatttaccccttaccttttctacctctgttaattttaataagaatacttttcatgtgtttaacctttataatttttgaggatctttcatgtaaactttctacattgatgtaaactttgatttcatgtaaactttctacattgatccaaaatttgaatctgtgaggaaggttggctggtagtttatccccggtttataattaagaaattgatatcacagaaagtgaccacaggtcatgcatggtagaaactgaactaacccaagtttgtgtttttcttctaatatggttgttatttttatttcaatacttattatcttaatggttaaaaagggtcttcactatattttgaaagccacttgatatttaacagcatctatatttatttgttgagcattgcagtaaaagccagtagcacctcttcctcttggggtgataacattttctgaatgttggccctgaaacccagcaagagccgaaaggaccttctgaatcatcagagtgtttatttcagatgattttagtcctgtaccaattattttagtttctttgaacatttgtaatttctttgtacctgacataaatatttgtggatgctggtgaagtcaagaattgtataggcacaatgagctcgggcacaaaaagccaagttcctggagtgtgaccacaggctgtgtgatcatagaaatgtcattaaatctctcatttgtgaaattaagagatatgattgcatgacctctaaggtttatatggatttctgacttaattatccaatgtcgaaagcactgcattttttgtttctgttaactattcatctatgtctccatcctcattcatccatccatccccctgtccacccatccatccttttatctatccatgtgttcaaagatagagtaagcattatgaagtagcttttaccacctttcagtacatttgtagtgaacagaacttaaatcgttatgggaaaggtaggaaaaggaagcacctctatgtgcttcaacttgatggaggaggttcaggctgtgttatgtaactctcagggctgaaagggagtctcaaaataggaatgggcgattgtggagtgtcagctacagtggcgggcctccgcagcttaacattggtgaaaagggccacacggtttagagaaaaaaatgtttatttgatgtcctagttagtaaacgaaggtttattcaaagagaatttattgcttatgagtgaaaaattaaagtatgcttttaaaaagatttcttggtttgttctcagacccaactgagaagcatttcagaaactcacatagttacatttatcacaatattacatagaatgcagcttcatttaatttctgcaaatcagggttctctggatttctttattctttattgatgtgtttttttgaccaaatggtaatcaaggcaacacacagtaccaccctgaggctggtgtggagaaggcctttcatagagagcttgctgttctccacgaggggggtggttttttcacatgccacatttctgcaggcctggccttttgactgttctcattgtttctttccttctcttcctctccattttttcttaatgcttaagttaacgtttgaactcctttcttactgtctggcttctttcttgactgcaaataattatctaaggtattttggctcttgtgggctgctctgccattcagagtttcagaaggcaggaagagcaattgaagcagtatgagaagcatggccaggtgctttttaataaggggagggaagaggggttaacagccagaaccgcatgacacccatgttgaagacagcatggcgaattcgatctaatatttcagaaccaacccattgcttgcctatcctgtctccttctgttattctcttgtttttctccatttccattctgcccctctggttggccattatggaaattagaagcaggaggataaggcagttctctgcaggggatgacagtgaaagtgagaaagaattatagaggagaaagcagacatgcacagatccaggaatgtttttcaaacgaaggaaagagcaagtgcaaaagcttagcctgaaataagttaggggaaaagtcaggggacaggaagaaagtcttgcgagtgatagggaaaggggtaggaagtaaagtcacagaggtaggcaaagaccatggtggggagttgggatttcactctaattacaatgaaaaataatctggagtgttggaaatgggtggtgtgtgtgtgtgtgtgcatgtgcgtgcaagagaaagatacagtctgacttatggtgtaaaaggctccgtctggctacgatatgggggagtgggctacaaggtacaagggaagtaagcatttcacagggaacccagggaatagtcttttgtggtgtgatagctcactcagagaggatggtaagttagaccaggatagagcagtgaaaagatgagaggtggtcaaatttgggataattgggatgtactttggtgatagcactgacaggaattgttcacatgtgtctatagctaggagagaaagcaaggatgactcttaggcttttggcccaaacacctgggtgagtgccagagccattgattatgatggagaaggcgagggttggggcaggattaggaaggaacattaaaattcttttgcttgacatgaatattaggtattccagtgcattaggaggtaggtggttggataacatgtctggatctccaggaaaggtcaggggtaaagcttaaacctgggaactagcatattgatgagatatgaaggacgagaagaaagagtaaggccttattttcattactctgaaacaccatacttcctcttttgcacattctgttccctctgcctggcgtgttctgcctgggaaacaccacctacttatccatgcttcagatctcagcttgggaggatcctttcctgacttttgaactacgttaaactcccctaccattgtttcatagctctacactgttccctttgctggtttgtaaatgacacacacactggtaatgccatagaattgattcatctcatgaatcacgacagctctcttgtctcttggcttgtgagatttggctcgtagcatgcatcctagagagaatttggctagagtaaggagttttcttcatgaataattgatttttggatttttgtctttgcacaggggtctggaattatttccaaagggtattggtgaagaaatatgcttcggaaagaaatggagttaacgtgataagtggaccaatcttcgactatgactatgatggcttacatgacacagaagacaaaataaaacagtaagcgtttcatttctactcagtgtgtgatttttaagtcccaagatctcactcaagaagtttttcaaatattcatatactagagaagagatgacaccccttaagttttttgaatttttcaatatatatatatatatatttttttgagacggcgtcttgctctgttgcccaggctggactgcagtgatgtgatctcggctcactgcaacctccgcctcctgggttcaagtgattctcctgcttcagcctcctgagtaactgggattacaggcatgcaccaccacatccagctaatttttgtatttttagcagagacggggtttcaccatgttggccaggctggtcttgaactcctgacctcaagtgttctaccctcctcggcctcccaaagttctgggattccaggtgtgagccactgtgcccagcctgaatttatcaattcttttgattaaatgggcattggtggtgggaatggaattttgggttttgtggtaaataaatgcacttttttattctatgaaaaaaatgtattaaaggatttaattttgtttagtcatttcttcaacagctcttcaatgggaagatgaccattcccacttatcttcattatttgggtgggacttaagaatcccttagattttctgagtcagtacctctcagtagcaaagtgcctatggacttggattgaatctggttgtctctgtctctttggtgctgttgggcatataaaagccattatctgtgctcataagggaccccacagtctagtggagaaagcaagatttagagtgattgggatgtattttcattgtataaaattaaataacaacattctgaatttgtcaacaaatttgttgacaaattcagaatgttgttatttaattttatacaagcatgaaacaatcagcagcccagagtataagagggtttaattgtgatttagagataattacagaataaattgctattttataaatacagataaataagatagaaattatcttacttcttttccagtcattctgaagagaaattttgtgtaaattgcacatttattttattgctgatcactgttagccaaaattaaattagtagttaaatcgtaattttaatatttggaaaatgaataaaattaagataatagaaaaccaggcaaggaattatgaatttctgtactgatctctacaggaaaatattttttatacctctaggtccatcattagcactcggtccttagtacttcctttggcaaatgagttctttgtatcaagttctgcatctcattgtagcttgaaagggtcattattctcctggctctaatgtctcttgcccctgtccattttatacaactctaggaaagttatcttcctgaaacatggaactaataatgaatgacactccctagcacaaaaacctttaatggagcattactacctaaataataatgccccagtccatatcctggcactcagaacccaccataatttggcttttattgacgcttccagcctttcatttctactgcattggtctattcaccattacctgtctccaattcttagatcaatccattttctttgcctggaatatctttcttactctgccaggttgaggagtgaggggattccaggcaaagaaaacattattttcaaagacatagaagtgggctagtgcttagaagtgaaaaatgattcaattgaatggggattaattttagtgacttaggcaatattcattgatcaccatttaaaaaagaaagcttcaacatcaactcatcaactgtgacttcgttttaccttcctgtttcaggtacgtggaaggcagttccattcctgttccaactcactactacagcatcatcaccagctgtctggatttcactcagcctgccgacaagtgtgacggccctctctctgtgtcctccttcatcctgcctcaccggcctgacaacgaggagagctgcaatgtgagtttacagagagagtcctttaggatttgcttccatagttcaccttcgtttcttactttatatttccatcattgaactagaacatacttattataaagcattcaccctaaacagaaaaaagaaaggaaccaaacagaactttgcttaacatgtaggaattttgccttctaatgactctttatttttcaatatatgtgtgcatttaacataattctatcaatgtgtacaattttgagaaataaatgtccaaatgtttttcattttgcaaaagaaagtggagaatgacaaaattttataaaaaagtaggaactagcaaaattttgataattgttgaagcttggtaagaggtcatggaattttatttctcacttcacttttctggatgtttaaaaatttccatattaaaaaacttttttcttttttagctctgtcgcccaggctggagtgcagtggtttgatcttggctcactgcaaccttcacctcctgcattcaagtgattctcctgcctcagcctcccgagtagctgggattgtaggcgggcaccaccatgcccagctaatttttgtatttttagtagagatggggtttcaccatgttggtcaggctggtcttgaactcctgacctcaagtgatccacctgccttggcttcccaaagtgctgggattataggcatgagccattgtgcgtggcccataatgaaaacttttttttttttgaggcggagtctcactctgtcacctaggctggagtgcagtggtgtgatcttggctcactgcaagctccgcctcccgggctcacgccattctcctgcctcagcctcccgagtagctgggactataggcgcccaccaccacgcacagctaatttttgtatttttagtagagacagggttccaccgtgttagccaggatggtctcaatctcctgacctcgtgatccacccaccttggcctcccaaagtgctgggattacaggcgtgagccactgcacccagccatgaaaactttttaatacacacacatacacacacacacacaaacacacacacacacacacacacacacaaagcaagagcaagcgagaaagaaatctataccttactaatcaggtttgctactagttatgatggaggtgtagcagtcactgttttctcagatagcacagatgactcctgattcactcatcctgtggggagacagctaggatgcaggatggcatcatgaaaacactagggaggaagacaggagccatgctatatgctcctggccctgtactaacttgacactcagggacagatggaaaaaccttcaggtccttttaatttgatggaaagtttgtgctcaaaggttgattttagaagtaatggtctatgcttttgtttcacatgacagaaggagtagagatgtaatctacagaagataatctttagtcaacaagtactactcaaattcctaagttgtataagctactctaggagaaacaagagtgtgttagacagagtcactattcctaggcagcccacagagtgggtcaacaaataaaacaggtatggaaattgcaacactgaaaggcaaggagccacaagaatagcttcaatagagatgatcagctttgtgggcaagatagtttttgatctgttgacttcaattatgggtgaagattgaggctatgaatgtagaagaaaattagaaagtttaaatatatcccagaaagtgaattaagttttgccagaatattagaaatgagggcaaatagtgggagaaaagattttaaaagttgattggaatcaaatttttaaaaagtagtagtagtaatagtagctatagtagatatcatagcaggagcagtagtagtagttgttaccatttattgagtacatgttgtgatccgattatgtgtaggtcctctacatatattatttctaatcatataaccacagtatgaggcaaatatatatatatatgatctctcccctgcctttttgttaactgttgagaaatttatagctactaaggggaaagtatgttgtgtggttacttggttagtcagcagaagagcagagctttagatttaaggcctctgactccaagagcccatcctctttccaatttatcagacttccatagtagaaccttgggaatttaggaattttttcgtacgttttaggcattaggtacccaaggaaaatgtttagttggaagagcaacgtttttggctctgctttaggaagataaatttgaaatggaggagactgaacattgtgctcaaagggcttaggcaagattcacaggagtgaggcaagagagaacttgaactggggttgtggtcttggagatctaaaaggaaggatggaagacaacaatattatacttgaaggatccatagggttttataaatgatgggaatgggtggtagagaaatgtggaaactgcaagtgagagacaagctgttatcaacttactggcttggccctctcaattttggttgtttacaaccacaaaagccccaggtggatgtaatgcctccgtataacatggtatacgttctctgagcttcagtcttattagaaacttgtagggaggtgaaattcttgcaaaacattaaactgttgtattatgggataaaaataaaaattgccatacagttctaagatgaaaagactacaaaggtatttcatatacatagtaggccatttaaggtgtacctagattcctggggaatagatgttcaagttcggtcattagaggaatttggtgatggggagttttaaaaatactgctctaaacttggtacaaaggctgttctgtaatcgatctaaattttatatctgataaatgaaatccactgaagtccttacaggttttcctctccctactggttcctgactctgcacagagtctggaggcacttcttgtagagttcgtggccagcatgcttctcgttgaagggtcacctgttcatgtagaagctgtccttgctgtgaattttaccttaaaacttctgggacttgaattcacaaacctggggagaaagtcagggagaaaagacaggtgaagaatcaatgtccataatgaggaagacagcaagcaagttcatggattgtgcttttgtttgcattaatattctaagtgctttatttttaaagtctttcctgtcctccctaccttgctgttcatgaacttttatctgaattgtcttagttttgcatcttgcagcacagtcttcatcagcgaatgcttctgtggattgccagcgaacatcaaggcagaagatatttccttcacatgccacatagctagtatttcctaatgatgaattatagaacagatttcagagtgtgagaaccggaagagactgcctctccaatgaaattggcaaatcacttcccaaggaaagaaatagcaaaagacagatgtttttgcagaattcttataatcccagctagccatcatttaaattaggaaaaaccttttcacccctgtccacacattcaaaatgactgcatttacaaagaaaaaaattggactgactgaccactgaaaaatcaaacaaatgagctgaatatgaaaattctctcaaaatacaggctcatgcttgccctgcttactctgagggggtcctgacccatctggagacctcctacttcgttaattatagggtcacactgaggactggtcagtaccattgtgggtagagttatatttaggtctttcctttcctgtgaatcgcagagatcttggttaggttgggttaggagggtgggacatgaaggttaaaattcttacctccccagcctgcaaagcaatttcttcccctttcttcattttgcctgagatggccaggcatcagtttcctgaaccaacaccctcccgaacatatttagcactggcacaagctgctgcagttccctgtccaggtttgtgtgggttggagctttccgagaaagcccattgcaggttcttgggctttggtggatagttcactgagaccactggtggtaaagagttggatgagggcatgtctgaatattcccagacctaggacatgcagccacccttcaacttgtagaagggctcttggaagccattgcaattccagaggcatttgtgaatggaattacttgcaaaggtcctgctcaatgtctactaatgaaagtagacactgctccatattcacagggctctcagatctcactctttccctcaacttcccacaaaaatgaaagaagctatttttgagatgcaaagaactgcttcccctgaattaccttttagtttcaagttagacatgaaataagttgtttgatgcaggacatctgaatgtctttcatctgcaacttgtgtcagtggggcaatttttggcaagcagctgaggcagagattcactttcttttttccgtgtttccttgctttacctttccccccgcttcttccctcctctcctccctaacctcccagggagctgcagaagtaagcattattatccttgtgaaccaaggaagaaactgaggcctcaaaagtcaagtagcttgaccaaggtctcatagccaagaagtagtacagcctcatttccaactctggcctgttgggccctagagtgccagatgtgtcaactgagtggtttcgagttgacctcatttttcaaatagcaatttatgcattctagtagatgacgtggttgatgcagcagtttcttttgaaaaactaggaatgcacacacatcatttcgtgcattaggcttaagttcttcactttccttgggaagcagaagcatattccaagttacttgtactctgtgctcaatattgcaatttgacagcttggaaaagaaacaaattactgaattctctagggcctttggttttcctaattttgatttatgttctgagaacctattgagtcaaatgccctctgacaccacatgtctcgtttatttggtacagttaattgctgttgaaaatgtttacagccaagggcaggtatttgtggcacattacccataggaatgcggtagagtggcagggaggccaggaaggatcaacatgcgttggctctgtgtgcaagagtgcacagaggtcatttgtggacttggagtaaactgaccatttggagaaactcctctggaaaattctgattctgattttgttctgtttccattgcagagctcagaggacgaatcaaaatgggtagaagaactcatgaagatgcacacagctagggtgcgtgacattgaacatctcaccagcctggacttcttccgaaagaccagccgcagctacccagaaatcctgacactcaagacatacctgcatacatatgagagcgagatttaactttctgagcatctgcagtacagtcttatcaactggttgtatatttttatattgtttttgtatttattaatttgaaaccaggacattaaaaatgttagtattttaatcctgtaccaaatctgacatattatgcctgaatgactccactgtttttctctaatgcttgatttaggtagccttgtgttctgagtagagcttgtaataaatactgcagcttgagtttttagtggaagcttctaaatggtgctgcagatttgatatttgcattgaggaaatattaattttccaatgcacagttgccacatttagtcctgtactgtatggaaacactgattttgtaaagttgcctttatttgctgttaactgttaactatgacagatatatttaagccttataaaccaatcttaaacataataaatcacacattcagtttt

SEQ ID NO: 238 - DNA, 1622029 bp, Homo sapiens
gtcttttctctggagtcctgggaggcaagttatgggcagcactgcttctggccgcaccatgaagcctgagtctgcttgcgctctgcccagggccctgctctgtctgagcattgggcttctagctgcccccctccccacagcctgccgctgctaggaggtagaactttaggagtggtccttggcctgtttctacctgtcacctggctcacctcaccactcactcctcctccatcacagcaccccggccctccctgtccctggcctccctggctggggcatttgggggtccgctgggaggagtgcatcgctgaaggcttcttcctactctcctgcaccttctcctccttgagtcaaggcctccggatccacatggatagctgagatcttttcttggagaaagacgctttcctctttactccagtccctcacttccccacctgattttcctcctcttctgctggtcctgtctttttctactgcctctttattcaatttcttgcttgtgtgcccctctgggactctcttgtacactttcctccatctccactatctcaggatctgtgtgtgtgctgccttcctcctgtgtgctttctgtccccccatctctgtcttgtctttcccacttctattgccaaagggagagatcctctccgggctgttccctggcctgtctgctcctccgggctctgtcccagcagcgacaatgagctccacactccactcggttttcttcaccctgaaggtcagcatcctgctggggtccctgctggggctctgcctgggccttgagttcatgggcctccccaaccagtgggcccgctacctccgctgggatgccagcacacgcagtgacctgagtttccagttcaagaccaacgtctctacggggctgctcctctacctggatgatggcggcgtctgcgacttcctatgcctctccctggtggatggccgcgttcagctccgcttcagcatggactgtgccgagactgccgtgctgtccaacaagcaggtgaatgacagcagctggcacttcctcatggtgagccgtgaccgcctgcgcacggtgctgatgcttgatggcgagggccagtctggggagctgcagccccagcggccctacatggatgtggtcagtgacttgttccttggtggagtccctactgacatacgaccttctgccctgacccttgatggagttcaggccatgcccggcttcaaggggttaattctggatctcaagtatggaaactcggagcctcggcttctggggagccggggtgtccagatggatgccgagggaccctgtggtgagcgtccctgtgaaaatggtgggatctgctttctcctggacggccaccccacctgtgactgttctaccactggctatggtggcaagctctgctcagaaggtaagaccctctccctctcttgctagagacccacccacgggatggctgaggctggggctcctgatacaaaccagttctatatggatgcatatctttagctgcatgttagatcactgggccccttgccctaaggaggcagtggaaatcctttgcctactcttaatggagaatctgtcagatctcagcaggagtagaatcctgacccctgaaccctgggctctgtaccctactcagagggttagatgaagtaggctgcagggtctgccccagcttggcccctctcactgcagcaccgtttatcacagtcaacccagggcaagaaatcagatagaaattgggaatttcggctaggcaaggtggctcacacctgtaatcctagcactttgggaggccgaagcgggcagatcacttgaggtcaggagttggagaccagcctggccaacatgatgaaaccctgtctctactaaaaatacaaaaattagctgggcatggtggcgcacgcctgtagtcacagctactcgcaaggctgaggcaggataatcgctctaacctgggaggtggaggttgcagtgagctgagaatgcaccactgcactccagcctgggtgacagagtgagactgtctcaaaaaagaaaaaaaaaaaaaagaaaagaaattggcaaatttctacctgtgtctctcctgagcccttgaggtttggacccttagggatagctgggaaactccccatcacttcctcttaatcatccctcacataaagaatgcctgtgcaaagaaaaatgaacccagttcttctattggggcccaccccacctcccaaccctctgggaggtgtctagaaggtggatgaggcatctgcgccaggcccttcttacctttttgtttttggcaatgaggatttctcacatgaggtacctctttagatgtggttccctttcccatcctctccatgtactgagaacattgcaaagaggcacagagattgactgcagtgttgttcagccaagcctccaagggagctgagagtatacagcatagcctggagaacctcccaggttcaaccgtgacttcccagggagaagcagggaggcacagaggcttaggttgccctcccttgctcaccaaatctgactgtttggggttagatctaagagaggtggctcaaactttaacttgacaaatacttaaaatccaaattcctggacttactcacggcttagatttgggtagcaggaactgctgacatgagaagctgagaaccaaccatacaggtatgtatgttgagaggttagggtgacaggaggcaaggaagtcacatttccttctatccttttaggattaagccctggtttctcttagacgggttttatgttgccatcccctactggtctcttcgtggaggtggtgtaaggtatagggcagaacagtggttctcaatttagctgcatgttaagattgtcttgggggaatttaaactccagaccacaccccaggctaattaaatcagaatctcttggcatgggatccaagcatttgtatgtttttaaagctctccacataattcctgtgcacaatcaaggttaaggactaactagtacaagatcaagggaggccagatggctggtgccaggtgggtggtgccaggtgggtgtggccaggtgagtgccttgccaccgattcccaagatctcttcattcagataaggccctgctattgggatgtgtaattaaagactgcaggtgttccttaagtgtttccagaacatcccaacccctaaagcaggttgtgcttgatgtgaaccttagctatcagtggctatttaagaatatttaaaaaaattaaaacaaaatttatttcccaggtggtacctgctggagactggaacatatcagaggtcttgtcatgcatgggctattgcaggagctgcctgggtctccactcctttcttctaatgggttgggcatcacaactttctcccttcctgtgggtgggctgtcagagctggagatgccaggcatatatatcgtccttatttggcttctgtttttcctccactgaacccactgggagaaggggtggggaagaggcaaccccagtctacaaaccattttgggaatgtggttattgaagtgcttctcacaagcaggtgccttctggagctgactgctgttccagagcttcttggctttggagaaagttctgcctgaagacgctgacatgatcacttgttttctcattcgcccaaaggatctgttctgttctcaaaacttgtattgaaagctggcattcttcctttctagggaccagggtgtttgcaagtgtgttgttagcttgctgattatccctgattgcatttttgtgtttaaaaagaactcatttccttggggcaggtttggatcagcacttttccgcaggaaaaaaaatctctatactgtatatgtatacaatttgcttttctcttctttttctttttatattttgtgtgtgttccagctcccagtggaatttcttcagagcagattgtgtgccattggttttttaatagctaaatgcaatatgtatattttaataattgtttttttttcctacaaggttcagatcatctcctggctacggattgatacccctatctgtagaaggcaaacacacatcctaactcatttattctccccatacataaatagagtaaataaactgccgtaacagtaacacttggctggcttggaacagagcagtgcaaaggttgaggtgagagaggatgttgcgggaggtaacagaatctactgttgattacttggagcctgttgatcctggtaattgtcatcaagtctaatcaatcacaaaaatgcatcacagactattagaaaataaccgttgcctccacacatagttaatttttagaaagtaagcagaaaaagtcacctgtaaaatgtgaagggaaaggaaatcacagcagctgctaagtgtcaaatagatctacacaaaacaagataatgtctgcccatttttccaaagataatgtggtgaagtgggtagagagaaatgcatccattctccccacccaacctctgctaaattgtccatgtcacagtactgagaccagggggcttattcccagcgggcagaatgtgcaccaagcacctcttgtctcaatttgcagtctaggccctgctatttgatggtgtgaaggcttgcacctggcatggaaggtccgttttgtacttcttgctttagcagttcaaagagcagggagagctgcgagggcctctgcagcttcagatggatgtggtcagcttgttggaggcgccttctgtggtccattatctccagcccccctgcggtgttgctgtttgcttggcttgtctggctctccatgccttgttggctccaaaatgtcatcatgctgcaccccaggaagaatgtgcaggcccatctcttttatgtgctttgggctattttgattccccgttgggtatattccctaggtaagacccagaagacacaggaggtagttgctttgggagagtttggacctatgggtatgaggtaatagacacagtatcttctctttcatttggtgagactgttagctctggccgcggactgaattccacacagctcacttgggaaaactttattccaaaacatagtcacattgaacattgtggagaatgagggacagagaagaggccctagatttgtacatctgggtgttatgtctataaatagaatgctttggtggtcaactagacttgttcatgttgacatttagtcttgccttttcggtggtgatttaaaaattatgtatatcttgtttggaatatagtggagctatggtgtggcattttcatctggctttttgtttagctcagcccgtcctgttatgggcagccttgaagctcagtagctaatgaagaggtatcctcactccctccagagagcggtcccctcacggctcattgagagtttgtcagcaccttgaaatgagtttaaacttgtttatttttaaaacattcttggttatgaatgtgcctatattgaattactgaacaaccttatggttgtgaagaattgatttggtgctaaggtgtataaatttcaggaccagtgtctctgaagagttcatttagcatgaagtcagcctgtggcaggttgggtggagccagggaacaatggagaagctttcatgggtggatctctactccaaatctacctatgtcacatatcactcatgccatcacattttacgttgattcagtagagggaaaaggttctagtctactgacaaagaaaaagttgattacttgtcttctgtcttctcctgtggacttgagtgggtgcccagaccagaagcggtttgtctcgatacttagctgttatgttttcaagtgttggaatcctctagtgaagtgtcgtggtgggtgttggtgatagggaccacagccttattataagcacaccgttgtgtggtcctcagtagtgactagccaccgccccccgccccccccccccccacccgccacctcctgttgtctgaagctcagatcctactcaggtcagtttgactgatggctcaacaccactgtgtggccttcgcatgccttcctgaaagtgaatttcaatttctttttttttttattgagaatttatgactcttgccccatctctcaaagccaagactaggatggaatggcatataccaagaggaggctgcttatccctgagcatttactgaggtccagagacatcagatactgtagtgaagggaccagtggttgcctcagttggatcctcctgttttgggcacttgtgtaagaacccggtcatttcctctccctctccacagtgcacatgctgcttgaattataacatggcattgttcccaatctgtgtcagctctgaatggctttgagaaggggtgggtgtcctgcagggaagtggagcataatcagagagtaaaggattactcctttctaagtcttccctggtttgggaaggagagaacagaagcagggccttaaaatgtacacaaaggagggactgctgcttctgagacttgattccccacccagcattcaggttttccatgggaccagcctgactctccaccagcccagccagcaggggctgtcactaaacggagcctgaataggggtctgattgctcctttttcctcctttcctcctgattaccaagtgagatttcctgggtatactgtatgctaaatggcagagcagccgcctgccacttgcttcaattatccctcttttaactgctgagggaaaagcaattttttaaaatctcccccctcccctaacatctctgcctcctttaatgaaataagacccttcttccatgttcccccttcaatgaggtgaaagcagccttctccttttgcagaaaccgcccaccagctgcaggctgcaaagagggtgggcagtggataatgctttggtccaaattcagcaaggctgagggtcaggcagacattttgccaggagcctcagagtagcacgtgaacttgcatttgcatttggtaatgagataccacaggaccgatgccgggggctaattattttcaagacccctatctccatttgcaggctgctccagaaagatggtttccagtttctggggcagctgtccttcagctgggtcctctttctccttcacagggcagatgaggtggggtgtgtgttgcaggctgcacttgggggatgggactaccatgaccccctttacttgcagtcactggctccatagtatgggtccatcacagtgaggccccagaggcagagctagagtaagggaggctttagggcagggctccaaaggtcgagtgcccttccttacacaaaataataatgatattattaccattgctcttattaaataccaccctgcgcctgacattctaggtgctttttatattcattggctcatctatttctcacaaaactcctatgaagttaataccattagctccattttacggatgaggaaaccgaggaaccgagaaattgggaacttgaaccccccgtttggcatagtggataagagtatggctgctggagggaaaacgatccggacttaaatttgggcttgtctacttacatgttgtatggctctggagaaggtttttgaagcttcagtatcttctttagtaacaatgatagctaataatcacagagcactggctccaggctcacactgtcttaggtgcttttcatgcactagctcttgaaaccctcgcaaccactcttgacatgcgattatgattctcatttttttggataaggaagctcggggcaagaggttaaataacttgcccaagattgtgcaggtattaagaggcagagctgcaatttgtgtctagacagtctggcttcagagcctacactgtcaaccaccatgctatcttgactctcagtgaaacaggaatcataaaaaatcgtacatcatggagttgttgaaaggatttaatgagataaaacatgaagttatctgcctagactccaggaaagagcaagttctgactctgggctattggtttcctggcctgtgtaagaacaaactgcacatcaatttggtttcacaggagatttgatgcttccttttgagcgacccctacctccaccagtttcccttatcccagtctgaaaggtggtagagataaaaggaggggaattttggaagtgtacagaatccaatttcattccatttgctcctgcccaagagcatggggctgctgacaatggttatgactgcgggatgggattcagggctctgccggcaaacgtgtggtgttctggcctcagcagccacccagtgaggcaggtagggcaggccttagcatcccactgaatagatgagacccagaccctgaacgtgtcatgggtgcaagggtatgagggcaagtgtgggtgctgcctttgggcagccatctctaggacctgagagcccaggccctcaatgtggcattttacctctgcttctgggctccctcaataaactcaaatggcctgtgtctctgtcgtgagatggagcattgcctccctggatgcggatgataagcaaaatgtcaagttcctggtgcaggaggttatcagcttggcctgtctcaggggctttgttccttctagccagagagagagagagagagagagagagggagaataggaaagaaaatgaaaatgaatgaatatgagtatagtattcaattcccagcctcaaaactctggttttagtgaagtgactgggattggacccaaggctccggaggtagttggagcacaggtgcaccacaccggagcttcgctggacaggatgacctcttcaaacttacctttggtttcccaggtaccaggcaatgcccattacctcactcagggttggtggtgagagttggagctcctggattcctctgtcaaactcctcctaactttcctgccttcagcttctctctgcatgtaaaaaaaaacaatctttctctgtttcttcttgtctattcctttgtgtgtgtgagagggggagatgattacagaggtggatttaccatgaaactaagcctttcgtacattctcagttgcacgggtcccttctaagtctccacacctaattttgtatttgcaatttctttttcttaaggactcccaaatatcataagcaacaggtcccacctctgtggatccgcctctgttaacacaacttgttgctgtccgtgacagcaatgttgctctgggtgtatgtgtgatttcatttttttcttctaaccagtgaccattcatcacagacacattttctacttcataaccaccataggtggacgaatcagagctagggagtacaggagggtgcagggaatataggaatgtcatttgggaaggtgtggtgggaagaggagatgtctaggatatccactgggaaaagggaggaaatgtttggaaatatttgcagtagatttagaggaacaaggtggtatttagacagagggatcactctagtcatcctcctgagggttttttccctgctgaagttgggaggtttagtttgctgtggctcacaaggtaagggggagtggggggtttgctgggaactgtgttgcaggtatcaggctgtggctggcagaggaggacaaagtatggctctgcaggcctgtctccctggtctatttgggaactgacattgccagtgggttgtcattattgctgttgttctccagaaattgatgtctttgagtgatctatttaaaaacaatacgggactccctttaaatgtgtcatcgtctatatccgctctcaaaccttgactgtggccacaatgttcctaaataatgtattttccaaagtttttttcttttttttttttttaaatcctggaactggtaccagtagcttttaaaagcaagctgacctcatagtcatccagagaaactacccagttgcactctgtgacaaaacttactttgcatctagtcctagaaattgtgaactctttggctctttgggggaaaaacagtgcaccatccaaaggtatgcaagggcataaagaaggtaaagatgaaagagagggagggacaagaactgtaggcaatgtaaagctcctggctcaagttttctggctgtgaaatgcatataggatccttttggttttactgagagccttatttaagtacggtgtctttgtagctaagaaaatgactctggggagttttcctttaagtttctcgatgagatgctattcatccgatcctctcctgacacttttgcctctgatctgctagcttggttctcttgaagttgttctgtttgcccgtgtgaagtccttagaagacggagtcccaacagtcctgtggttgattgctggtaatgtaggactggtgtctccactgtagcaagcagtacatttcaggcaattctgcaatctctcctccaggtatgattggaaatgtgttgcctgcagctcttggagaatagaaaaagtacagtgagagtgtgtacagcttatttacttaataggttgctttcaaatagaaaggagtacccacttgcgaggagggatacgctggaaagcaaagctgagatcacttctttgtgatccacatcatggggaaagggctggacaggctgggagtttaccacacactcagtttcttccttcctcctcattctctcaggcttcttttctttccagacggggccctgtatcttgcatggttagccttgagagttaagagaatgggaaagagtgggcttgaagggcactgagctctgacctgtggaatccttgaaagacaaatcctcccacagtatgtttgctctgtctgggccagaaaagacaaggctggagtttaggcagaggtgttgtacaatcacatgatgtgctttgactcacggcttagttttaaggaaacacactgaaatttggggagattctggtgttgcaggagaagtctgtgaaggatgaagtgtggatcatgtggccctgttagaggatgctaagacatttattataatgtattactttctagctgtgactttgccctaggtaatgtactggaaaccaaggtacattataaagtatcatgggagtctgggcgctgtggctcacgcctgcaatcccagtactttgggaggctgatgatggaggattgcttgagcccaggagtttgaggcctgcctgggcaacatagcgagacatcatctgtacaaataattaaaaaaattagccaggcaaagtggtgcatgcctgtggtgccagctacttgggaagctgaggtgggaggatcgcttgaacccaggagataaaggctgcagtgagctgaaatcacaccactgtactctagcctgggcaacagagtgagacccatctcagaaaaaaaaagaaaaaaaccaatcatgggataataagtttaaaggggacttcaaaagtcattggatctaagtactcatttctcatcctcctctgcactatataaaatgagcctccccgtgccccgcccccccgcccaaagaaaacctgctagccatctgcaataatgggagcttggtgcttttcaaggcagcctaatgtatctctggtcaatactgagtatcagggagctcttctttatatcagccccagccactttctcattggtcctcattctatttaaagtaatctgacctttgtaatgggccatgtgggtgaagaagatgggtgggttgattctaacagttctgaatgatgcttcgcaggaattaacccttgtgccaaggtaaaattcttaagggattctctaatatggtgctagcagtacacataccactgagttatttagaattaactgcttatgattaatcttaaacagtgtgggagggcttgatgtgggaagagatttgatgtaagcaggtgactcatactccagtcattttgcttctggggagcttgcactgtgaaagattcatggttagccctatctctggctcttttgtcagtgcctcattttatcaacctgtgatgtcccatcttcccccatacccaactaggtttttagcgtctctgaatttccaaggagcttcctggaaatcctgaatttctctgcgacaaaaacatgggggctggggacggtggctcatgcctgtaatcccagcactttgggaggccgaggcaggcagatcacgaggtcaggacatcgaaatcatcctggccaacatggtgaaaccccatctctactaaaaatacaaaaattagctgagtgtggtggcaggcacctgtaatcccagctacttgggaggctgaggcaggagaatcatttgaacccagaggtggaggttgcagtgagccgagatcacgccactgcactccagcctgggtgacagagtgagactccatctccaaaaaaaaaaaaaaagattggaagttctggaatacattggagaagatgaaaaggggattggattagacttgcctaacaagcccatcatggtagccagagtcagacacaccaacagaaataaagatttcgctaaaaggcctagtagtattttttttcttttcttttctttcttttcttttttttaaaagataaggacatgacatgaagcagtattgagtagctgctcctggagacaggccttggaagcacattccctgtgcgaaaatgcttcttactctgccaggttgctctgggtatctcatgtttttggcactgttgggcagaagtctcccagggaaagggcttaggcagggctggaagatcttgctctcacattggcatagactggaagcctgccaagcaaattcgctcctgcaccctaaaggggatgaggctagtcttggccgtcagccatctccccattgacagtcatttacctgacacagcagcagaaaaaaaaaaaaaaaaaaaggaacccgtctcatcattttgtggtttaaaatagtttacttttaagagcaaagcccacagacatcattttgagtccaagcactgaaatggaatgagagtcaccaactcgtctgtggtttcattgtgcagccaggcctcggaccacacgcatgtgctgggaagtgggcgtgaccacctcacaccatcatgtggtcattgccacgtgggcagaggatggttgggttttagttgctgtggaaactttgctatttgctcttcctgatgttgagttttcagccttgtgttaacacagattggggctattttttcctcgtgtagaatatataaccagtggctacattttaatgtgtctcttggctccctttggcttttctatccttaatgcaagttgcgattgctcaactgggtttcctgattcctgtggcaggagtatgtgaggaggtattctctttaggaactgtaagacgtgaaaccaagggtggaggactctgtttcccttagttaatgcacttacaggcttgtttgctaaatgtcacgtctctgacaaaaagcaggtactcaataaatgtttgttgccttaatcacattgtgtgtatatgcaggttttatatgtgcacatatgtgtctgtattcatatatgtgtgtgcctgtgctccctaatgtgtggtggatggatgcaggttcccaggaatatgagctcaagtatatctgttgaataaattaatcaatgaagtcaggtccaatcggaccacactggccactgttggaaacaccttctttcttttaatgggaaaagtgtcagttttattgtgggacagtttttgttgaatctgtgtcaagcacatacacattccgcttggtttgatctagttgaggatgaactagaaatacttttttttttggtttgtttacaaaccaatgatttcctataacaattataggcagtagccagcctgggaccatgtcaatgcagtggaatggctgtttgaggcaggcacgttgttgtcactggagatggagaggccccactcgctcatgtggattccctggggaagatggagctcactagagacaggataattatcctcagatattggaagtgctgccatgcaaaggaggatgatgatacactggcaggaaagccgaaggaatccgagccacagaggaagaattctctgttggttagaggtgttggaccacagaacgcacaactttggcaagctctgttcccaaaaggggcacagcaggtgccttcgtgaagctatcaggagcatgtgccagcatgtgcatgccttcaatccaaggactctgtggttttggggtcttggtagccaggcccaccctcatgtttgattatgcacatcatgcacccccttttagggggtgagaaagattattctctagatcagtggcctccaaatagggcacaggccaagaccattctttggggatgcaggacctgacttcattgattaatttgttcaacagatgacattgagctcatattcctaggaacctgcatccatgcaacacacgtaagttaacaatgcattgataactcatatgcaagtttttaaataagtaaatatacatctgttatgagagcgtagtaaatttttctttctcatggggaatttgttcagagagggtgggaggccactgatcaacactcaaatctacctttatctctctttaattagttatagttactcctgactgcctgtagcaatcccttatccccagggcttgcagctttcaggatcaggtgatacctaaggcattcctgctgccagtggtgtatgtgttgggctccttacttctgccttcagttctgcctgtggtggtcttgattgacctgccaggtggctctgagggcttcatggggagatactccagttacagttccttcttcagaggcctcactctgttcaggattactaacgctatcatttttggtatgaaaaccatggtatgaacatttgttggggcaacttcgttttgtgtaagagagcaaagtctctgaactatctccaagcttttgcaaagcaatccttgaagtataatcatctacttgttggaacaggccatctctttattggaataagtttattcacctgacattcactacatggatatctgtaatgtaccagtgtgatccctgcccttaaggggcttatggtctagttgggaagcttgtcaggcaaagaagtatatagcacatatcagagttgctctaatagcaggtagaatgtttgtaaagcagcttaaaagggagcatgttaccatacctgggtgtgggcgcgtgcctgtgcacttgaagtgagagttagggattggaggaaactttgcagagcaaattcttgggcaggacatggaagcattaattgggagactgggaggaaaggacatcagggcagctctatgagagagcagcttgctgtttccagctgtttgcggtagtcaatgtggttggaccaaagaattgaggccaatgggatagtaacgagaggatgagttagggagggaatgtcttaactgctttgtagggattttggacattattttttccacaaccgggaaccattggaagtttttcagttgaattgtgacacagtcagatttgaattttagaaagatgactctagggccagtttgtacaatggattgatgataggaaggcttaaggagggaagctagatagaagctattgtacggttttggtgagagaggagtctgtattaaggggtgggtagtgatggaagaagggctgattgcagagatatcaaggagaggaacttaataattaggtattaattttagttttggaatcagattgcctgtcacatactaaactgcaaatttgggcaaataatctcacttctctgtgtttccattttgccatctgtgaaatggggattataatagtgtgtaccatttaggactattatgaggtttaaatgagatagtgcacgtagagtgctcaggacaatgcttggcacatagtaaacccttagtgaatgttagccattattgtaattgaaaagagaaagacagagcttcaataatatgcccttctggttgtaggaatgtagaacaggaaagccattgtgaggagcaggtttggggtgaagatgagagaggagtaaaaatagattttgatttggccgttatcctgccttccgtgcagatcctataggacccttgtcgggagatgtacaggggcaggtgggggcaatggttggcattggcggggggaggatgggggctgccacaagtttcagggtggttgttgtggtgggaaagacttggatgtggatgaggctgcctagggaaggaatgtggtttagaggaaaaggagcctaaatgtagaaactttgggaactgtaatatttaggatcgtgggggaaaggaatccataagatagactatagcagatacccagacatgtagaaggaaactaggagtgaaagaaaattctttaaaattcttcactggtgaataaatgaaagagtgtaccttcttaaccttcttgaagttggggcttgcagttgaaaattacaataaaatgatgaagaattgcattgtttagtttcaaaaactattcatgttggtttttcttctaccttcaatgtagtgaggtctgttcatttaagaacattcctggccgggcgcggtggctcacacctgtaatcccagcactttgggaggctgaggtgggcaaatcacaaggtcaggagtttgagaccagcctggccaacatagtgaaacaccgtttctactaaaaacacaaaaaattagctgggcgtggtggcgggtgcctgtaatcccagctacttgggaggctgaggcaggagaatcacttgaacctgggaggtggaggttgcagtgagccaagatcgtgctactgcactccagcctgggcgacagtgcgagactccatctcaaaaaaaaaaaaaaagaaagaaaaaaagaaacaatcctacaagtagaaacttaagtctcatatgcggtgatgacgaacctgagggttttgaatgtttttgcacatgacagagtttctggctcttagaacatcaggtcccataagagcaagaactcaaagatctgaaagaaacaaacgcagagaaatgaagtgacttacccaagatcagcaaactggtattctaatttgaaccttgcacttttttgagaccacgtgagttaaacatgattaaacatgaaatgctttggctaagtttttctgagggtctggcgtagaactcttgggggtgccagtgctaaagctcccctcaaagccatatacctctagggatcgagggaagaaattctcctacctctggtctctgtgggctgaaagagtgagatgcccacacaagagatgctggaagccctggctcagctagcaatataagtgctggtaattaattcacttgtggtttctttatctctgcccagaggtgggatgcttggaaagacagcaaaataatttaaggaaattgaggctcagctctggttgcctgcttgctgcccttccttctgccttcaactctctaggactgggggtgggggctgtgtctgtgctctgaatgcttgctgtgcatcagttttccaggaatttcaggacacaggaattatcacccagctgtgttgtgtgttgctgttcagcaatctgaagttgcttatctagcgtaagtcagaacggggagcctagggaggaggggcaacgccttcatttttctaagcagaagagactgaggtgttaggggcccagctggtatgcgatgggaaccaagaaatggagcctatgtggacatgcatgctttacacaaattctctcgctgaaactcgggaatgttatcagaaagctatctctttccacctcatccaacaacaatgcacactatttgaggttcactgtgtgtcaggagaagcactggtggtaagactggtgagcaagacaggcacatcctgcagcttaattaaccaagcaattatagagtggtgtatgcattaaaggagacatatgtgtaacagtggtctctatgggtttattggtctctcttcacatatggcagagaaaagaccctgtgaagttcaggagtgtgattaaggtactccaagaagtcacacacaggaggtccagggcttttactggactcactgttcttggactggctctcctagcctgggtctgttggctgaggaccacaaatgaagccagcagacttaggacttacgcttctaagtttagtgcccagctctaatcatgctcctgagtaggccttgatgatgcattttaatttcatccaagttgaaatggtttggctctgtgtccccagccaaatctcattgtagctcccataattcccacatgttgtggaagggagccggtgggagataattgaatcatgggggcaggtctttcccatgctattgtcatgatagtgaataagtcccccaagatctgatggttttaaaaacgggagtttccctgcaaatgatctcttctcttgtctgctgccatgtgagatgtgcctttcaccttccaccatgattatgaggcctccccagccatgtggaactgtaagtccaataaacttctttcttttgtaaattgcccattctcgggtatgtctttatcagcagcttaagagtagactaatacacaagtcttatgatttattccttcttattttgattgggtaaatttaataataatgacagttaactaattctcatgaagcacttactatgtgctggggactggcctaagtatgttcatgtgtgacttctttcattctcccaatcgcttccacccaggaaggaggtggtggttgtcctggctttacagatgaggaaactgtagctgaagagagaaagcatctgtctaaggaaagagcccaggcagtggatgtggaatttgagctctttactcatctctctctctcaccccctattcaatctggcattgaatgggggcgggggggctcctgtggatatcagtgactgaaccttgtcctcggctggcccagctggggggtctctagcatgcaaagacactgccagtattcattgacctgtcttttgaccttctccctctcctgcacataactgattttgctctgctctgatcctgattcagacacatgttcttcaaagagaaacatacaagctgccctggactgctttttattctgttgtcttattccatctcattggccatcattgagatggatctagaacgatgcttgggctggaatcgcatattctctccatcttttaaaatctatgacctccaggtaatctttgttactgtttttgttagtctgttgtccaccactatccaaaaggctttttgtcaagatttagtgaaaatcttttacttgtattaaattgtaaagtgaatattatttcaattacattgtaaagtgaatattatttcaatttatatatttccccaactcatgcattttattgctttaccccttccccctcttaagcatcacaatccaacctccttttatgaaactgacttagggaggcaaggtgacttacaatgggccactcaggtagcaagtggcttgggactgggactagaactcaaatatcctaactcccagcctagcactcattctcctacatcactctgaaaaaagattttggctaaggagaattgattgattcaaaagaacatcaattgccaagcacaatcaggggtgatcaaaacagttatggcgcctgtctgcaatgaacttacaaatgagtggattttttttatggaaaacataaaccaataagtgtgtaattacttgtgatgagtgctgtagatggaaagaacagagtgaggggaaatctaatgaaaaccagggtagtcagggaggtgtttctgaggaggtgacatccaaagatgagaaggagcaggggagaaagccaggcagcggggctgtatgtgttcattgtcatttgcttggctgaagaacaagattggttagtttgatatcgttggccagaactatgtctttcacttttatgtatttgcttggagtatggttgatgggtagtgatggatggatggatagacggatgggtggaggactgactggggttggggaaagagagaagccatcagtgtgataggatgagggcagctcaccttggctggtaagtggacacacacatggccctctccttccagaatgcagaatcttggaggtaaggattcaggggtagaatgtctatgtaaaggaagctctgttgtgggagaagggtaaaaatgaagggctgctgggactagaaagcaataatgtaatttgccaccagccttgagaaacttattgctcgaatagctgcaccgtgtggctcccacccatagtgccatagatcagcctgaaaattcccaaatagcttctcctcctccttaatgtctcagtcctgccctcccaggtcctcccacctgccacagtttgttttctcggtacatgaagagaaaggggttgttgtcttgatagatctctgctcttcagctgttgttgccagggacatttatgttccagaacatctaaaaggttctcaacttagaggagtagtggaaaatctgaggctggggagtcagcctgattcttgatgggccattcttccttgattttaggctagcatctattgacctcttactacgtttcgggcactgtgaatagcttcaccttttattcccattttacagatgaggagacggaagcacagagacttcccgatctaccctccacccagtagtacaaagatacacaaggcgctagagtgaagtttttccatcctgcatgaaaacaataaaaataaacaatgtagtacatttttggtgaagtcactttttttttagtttatgggatatgcccttttattttggggatgtgaaaagaccttttctttttaagagaatatgatgatataaagtgtcagtttttagtttttgttctttcttggtagtagagaaatacagttagccaatgttagtttccaaaattgctttagatatattagaggtaaataaactctgttaatctgaagatgactgttgcagatgttagcttcgtttcctttaggagtaaagtatttgtatgattttatccactttttattctgatcatttatcagaaaaaattgcaaatagtagctctgagaccatataatttatttttattcagcattaatcaagatactttgattgtacagttttgaccctgaggccctttacctctatgttggcataatcggaattagacaaagactgcagcatttttatcaatggagtatttttcagaagcaaacagtacgggggtcatataattcctcgattcattttttcttcagcacagttaaaccattccttattttttcaattcagttttatcttactgaattatttttaacaagatcaattctgctccatatgtattctatagtgaagatttgattcatcaatcagttatttttcgtgtgcctatcaaattttaccgacacggcttctactattgtgaatgttcttttgtggccattatttctgccacatccaattttctcacatcagatttgcaggtctaaattttgtcaagaatgtttgatccttccttcaattttttagttaataacaaatttcaccatgcgcatttttagctgctgtcagttctattttgtgtgtgtgtgtgtgtgtgtgtgtgtgtgtgtgtgtgtgtgtgtgtgtgtgttttcctgacaggtctaatttttttccgggtcagtttttgcagtttgaaaaaccaaatcttcttcctacaactaacgtcagtccctttcctaatagtttctcaggaatgtgtccaaaacatattcatgaagtcaaaacgtcaggaccaaaatagcctgtgttgtttatagagaccagccactcagaaggattaagaaacttacccgaggtcatacataaagtgggcagcagatatctgttgggtcactatagaatctacagcccctcttgttcagtgaggggcagagtaaggatgtaaaattgggatgagcttgacgttgtgccttcctccttctagcttctgcttcccaacccctctgctgagctaacagaatttccactgacccagcctccccaagaaatggcagctggggccacagttccaagcctcttgacttctccatgcttcctagctaggtccgccttaagctgtatgtgcagtggggtggcatgatttacaaataagcaggaccaaaaaggaaaaatcctctcttgtggaaaattaggtcagtggcagagttggggaggggagggaatctgggccctgttcttctatcctttggttcattcccctttcctgaagccagcagggcagaaactgatggtgctgttgggagcagacatctgggggtgagggggtggggagcagtgcccgttcacgtgttcttgtgtggatatgtgtgagcatgaaagtggtctgttttgcagccacttgggactcccctctctctgaatgtatttgtctggattactctaagggggatattagtgttgtctaataacggccttagatttatcaggggatttgtttgattaattccaaagcaaagtacagcagatagattagagctcagccagtgtagtgggtctataccacccatctctgccctttctaattcctgttgcgggggcttccctctctcgtctttgttgtcttgatggttgaaggctctagtgtttaagaccccactgtgtgatagttaaaaccatttcccactgctaaaatgcatgagtgagtgtctgggcttagagataaatctccaagttcacactgttgtttctctacaaaagctgcagaaatttggctacttgcttttctttcccagttgccactgccgtactctttttctgaatactaaaaatgttttattgcatttataaacacaagcttttggtgataggttggcactgagtcttttctttattgggaagttgtaggtcaggggcaggagtagagaatcctgtatgtttgctttacaattttttttcaaggtgcacctgtttaaaagtgtgtagagaggaatgaactaggggaggttagaagtaggttagacttaataggtttttgttaagttacccaaaaccagtggtggtaggtggcatcctggtgcctgctagagttgtggagaggggagaggacactgatgaggtgacgagacagatgatatattaagagttagcaataaaacacatttgtatggcattttatatttttaaagcatttttatatacattatctcatttgagtatcagccccctaaaatatattcttctatttaatataaaagaaatactggcacaaagagttcaaggtcattcaatgaactagtgacttttagaactgaaaccacctctaaatccagtgcttgctctcaccatactcttaatgttggattcttctcccagactcccagtccagggtaccagtaccccagcagaggcacagtgggaaaagcaatgacctgggatgcagatgacctcaattctgatttcagctccaaaattgtccagctgagtgtacgtgttaattcctctctcttggatctgtgtttcctcttctgtgcctaaaagtgtcctggacaactctacagcactgatcacaatgataattaattagttgcttgtctgattatttgtggcccatcttcctggctagactctaagttccaagagtgcaagacctgtgtctgtcttgttcatctgccatcaccccagtgcctagcaccatccctgggacatagataatgtgaaaagaatatatgtcaatgaaatgaacctgtacaatgaaaggaatggaccttacttgaagtcctaagactcttccacttttcaaattctctgctttttctctgttatctctgaaacaatctgagaaacacctcctttttttgtttttactgtttttaaactgtctttagagtacaacagaaattataagataaaaatagtgattaataataattctaattataattcacaaacatattattaatatgtgaatgtgaaatcaaaatgctttttagggactctctctcctcttacttaatctgtgtttctttctttctttttttttgagatggagtctcactctgtcgccaggctggagtgcagtggtgtgatctcacctcactgcaacctctgactccctggttcaagcaattcttccacctcagcttcctgagtagctgagattacaggcacataccaccacgcccagctaatttttgtatttttagtagagacagggtttcaccttgttggccaggatggtcttgatctcctgacctcatgatccgcccaccttggcctcccaaagtactgggattacaagcatgagccaccaagcccagcctaatctctgtgtttcttggaagcagaacgtctccttatctgggtttctgagctccctctggaagggcctctgcagactcctgttgagccttcagaatgggactggtactcattagtaggcaatatgcatgggcctcagactcaaaaaaagattcttttaggtccagagctttacaacacctccttactttacaaagaagaagaaatcaaccttgcttatttttttttaatgggagaaatggaggggtacaaaggaaagctgaaaagctgccaaggggcttagaagtaagagagtcttctaatagggctactgactttcttctggggttccccaggtcactagaaactcattctgtcagggcaaggatccattgggaggcattcagttgaatgctgtcttgagccactatgttaccccttccttctcaagttcattgcaaaccgtgctaatcaaccataaagttctttctatcccaggcccatgtctagcttcaaactctttcttaacacagtattccaggttgtcaacaatcaaagaacagggaattagtatgtgctgagcatggtgtcaggcaggtcattaagcattttatatacaattgattcttttgataagcttgacaactctggaattgatacaatgactcccaatttatagatgaagtttaagggacttatctaaggtcacataatgaatagcaatattggcatttgagctcaaaactttctacatacctctcagtgagcccagccctcaggggtgtccatctgcccatgggcccatatggtgaaatgtctttacaaaaaattcctcagctaggtacagtgtctcacatctgtaatgccagcactttgggaagctgatgtgggaggattgcttgaggccaggaatttaagaacagcctgggcaacaaagtgagacccctctctgtaccaaaagataaaaaaaaatgttagccaggcatggtggccatgtgcctttagtcccagttacttaggttgagctgggaggtccacttgatcatgcagctgtactctagcttgagtgacaacaagacactgtctcttaaaaaaaataaaagatttctctccactcagttgttgctgtccatcctgtgggggcactttgagatttctccaatcaaagactttgaagcgttctctgtcaactctaaatcccccattagtgctaagtatgataatagaagaccatgtaggaccacactatcatgtttacatcgtctcttggttcataagattggtgactaacagcaatgcagagccgtctttttgagtctccagtgcctaagtcagtgtctggcatgtagcacctggtcaataaatgttagctattttgaatagaaccagacacaaaggctcatgatgagaacaaaaaaagggtgaggataaaggcttgtggtaaattgtaaacctccccagcttttctgagaatcccaaagccagcccttctcaaactgtgttctgtgagatgttactagatgtttaatgaggggattgagggggaattttcagtgatctaaaaacatatatcccctatggactatatctccttttggactccacagtgtatcttagtatggatgaaatcttctgaagacttgggatattaaaaaacaaacttggtgtgctctaaatttactggaccaccgttttgttttgttttgttttgttttgttttcaaagaacaactgttcacatcttgctggatgttgtgatgttgtatttttatggaatttagttttggatatgctaccccagcttttaatcctttctctgaaatatggctcctgagatcccacgcagcattggacgttgtacatacaacaatgcacattatactctaaaatacttaatgaccatcagttccttccatactttccagtggtctcagcgagcacacactgatttcttgaaatttgtcctggtgtcccagaggatgatagatttgggtggtgagaccagtaagggaagaaatatttgtggatggaagtatggtactgtgggaaggaaaacgagtttggagtcagagaaatcggagttcacatcctggctattatttatgagatgcctgaacttgggggatattaacttccctgagccttagtttccttgtctgttaagtggggtaacaacagtatctacatcagtaggattaaatgaggttatttacatacactatagttgcaggggcctggtatacaggaagcactcagtaaatggcagggattataatagataataatccctgccacgctgtcttctgggtcatgtttttcacatttcttttatgatgttattgtgaatagggatcccactaaaacctttttttgacactaagatctagcatattggctaacaaggaattgcccctcgttagtatttctggagtgaataaacgaatgatatagcactctgttgtttacaaagcacttacatatttgtggcctcattcaaacctcacagcaacctggtcatgtacttactgtcattattcccagtagttggggatatggaaaatgaagctcacagaggctcagttggcaaaagtcacacagctagtaggaagctggaaagtcaggcctcaaagccagggcttctgtaactaaaatgtggactgtatacacaatggaatattattcagccttaaaaaggaagaaaattctgacacatgctacaacatgaatgaaccatgaggacattatgctaagtggaataagccagtcataaaaagacaaacactgtgtgattccacttatatggggtacctagaatggtcaagttcatagacattgaaagtacattggtagttttcaggggccagtgggagggggtaaagggaattagttttaataggtaaagagtttcaattttgcaagatggaaagtgtggaagtggacaacggtggtggttgtacaacattacgaatgtacttaatactactgaactgtacacttaaagatggttatgatggtacatttcatgttatgtgtattttatcacaattcaagaaaactgggaaaacaaaactagcaccagggcttctgactccaaactgaggtttctttcccacaccccgtatcaccatcccctacagagcagctatagtatgcctcctcttctaagacactttattttgtattgaattgaaaagtttgcagaactcacctccactgaaaccctagaagacccacctgcttctcctagaacattcatcctgttggcctaaactctgggaagtcggagtctttccagagagtagggaattctttgaaagagggcagatcctctgtctcaaggaaatcactggggtcaagtaatgcaataattgtgattgccagcctcaatgactacttcttttgtgccagacaccttgctaagtgcttttgcgtatgttagttctttataatgcttacatcagtcctaccaggcaagtagactgtccccattttacagatggggaggttagggctcgaagagattggctaacatgcctgagctcatgtgtgcaagagccaggattgtcatccaagtctacctgactctagaacctgcctcttaacctctatcctatctatggtgggggcagagaaattggagatgtctgtgtctagagtgttttccaacataggaattgacagatttctctctcctcctgtgacacacttttctctctcctaccagatgatgggacatctcatttaggccagtttctgttttgatttcctggtgtcctctgagatgcagatgtgtattcctttccctggtgggtcgtgctgcagtgtgagaaggacagcttccatttctttccctaggaagttgatatatgcatcctgtttcctggcagtgcccatctgctatgaggactttcccaaggccctcaccctgccgtgtgggagactactgcaggtgccaacctcatggcctaaagctgggaaatattatttggctggaaatgccttttgtttgcaaggcttaaacaggtcaatagaagctcaacttgtcattttcagtttacaagagatgtgtcaacaagccagcagaaacagtaataatttcaataagtttcctgaatgtttactatgtgcctggcattgtgctgaacaactttatatggattatttcacttaatcctcacaatagtcatataaattagggacaatcagttctgttacaacacttgttttgaaaatgcaaatttgttctaatgcaattgatgtattagggaacattttgagcataataatttcgcttttgattatgcaggattttgtccataagaaacactaggtgaaggcagaaaactgcagccagcagaagcaagctgtgtaggaacactcaaagtgcacacatctcaaacttgtaccagcaacttcagctaccgtgtgtgttatgagtcccaccccacaaatgatgtttcaactttgtgtccaattccaggagatcctcctcctacactttacaatgattcataagcttcccattttcacagacaaacttcaggtctgttaaaagtgccatatttattgtagtacttacgtacttcttagtgatttaacatgtatagaactgcttcctctattacgtgtcactgatgaagtttataggtgttgcatcccaacttcatctttccggttaagctctgtgatttttactgtatgattttgcacagcaaaatgacttttaggattgcatacatgcttctggcagaactggctttactaccattattcctgtgtggcagaagaggaccatgaacctaagaaatttgccaaaaatattttaaatgacaagtggcaaagctgggattcaaacccaggctaccttactcccatgcctgttctcaaaacttctaaagcatttaaaaaaaaaaaaaaacaaaagggctgtctgcactgatctctgattatatctgtaacaaccagattgcctcttctcgcaactgtcaaaccctgtttcctcaagccagagccactgcaagtatgtgagagcccctgaaggtgtttgagtacagcagtgacctggcccacagaaatgcctgccttggtccttcctcttcccctcctggccgctgcctgcccaggctgactggtgcctgatatagctgctactgatgctccatcttgcaatctggagttattagcatcaaagaacaaaagcaaacagcaccagggctctggggctcagtcctctatgaaggtagatgaatggacccttatgtcggggataaagctaacaccacccggccttttatggagacaactcttcctgtgtttgaagagctcagacactgagagccagaaagagccctagaacgaaggaaacaacctcctcactgctggaagtttgctttagttcttaactgaaaaaattgtttctgtgtttgttcttgaagaagaagggaaaaccttatgctcatctttcctgggggcaggagtcaataggccactggggaggtgcagtctttgcctttttttttgttttttcttctaatgttatggctcagtgtaatctttagtggaaggcctgccctgctatttgagggcctgaggcaagactatacatggaggccagtggccagcctcccttctctctttgctagcaccaggaaggccctcatgcacgtttatgtgacgccccagcctgtagaagcccacaactcctgcagacagcttcttcttggccactttttgacactagagtgcacataccagtaggttggtctgctttgagagaatggaccctgggaagaggcccatctagatttggagcaattgggcgaggaattctgggtaccagagcatattctataagggtggggcaagtattgctggctctaggtggaaacatctatttgatctgtggactcttcagttcctgggctgggatgtggctgcagaaggaacagaatgggcccctctaaaacatatagcccagggcaggggctccagttgctcaggcctacggcattactgcattttacccctttcctctgtcccttgaaatacctttttcttacttctgtgagatgcccaatattctcatacctaatttgtagctccatgggttagatggtttctgtcctggtttgctcttacattcaaaaatatagtttgacccttacctgatgtgctgctgagtctgagaggtataatcatagtgcaacctctctaggtcttagtttccttatctgtaaaataggatgaataccgtttctacctgttagggttttaatgaagattaaataagatgatgcatatgacctaggggaggatgccaactcccttaaatcaatcttatctggctgtaaactgtcttttcttcggcaatttacccccactttttgtctattaaaaaaatcaatatacacatatgtatacacgcatatttgcatagatatttcctcaggccagtcctggggcccagtgctgcttccccatacacagaccccatcctgtataacagcacacagagaatgcttaataaatatgagctttattaggattaatattgcttttatcccattttgtcctcacgttcaccctctgatgggctgatactgccagaatggtaattgacagaaaggggaatccacagctggatgtccaggattcaggttctggctccacaggctgtgtgacttttggccagttacctaagctttctgtgcctcagtttccttatctgtaaaatgagtgtggtaatagttcctacctcatcgggttgttgtgaggcacttagaacagtgcctagcacatagacagccctcagtcaatgtcagctggtgattttattaccttcatatatgagaggataagagtattataaaaatcaaccccaaacctttcctcttgtcacacagaaggaaggcagacagacacagaagggacgcagctgcaggtgtttctgactccttgccttgctgcctccccatttctgagggtctcatctatacagctccctctgcctgtggatgctcctgttagaccagctggggtctgtgtatggaggagcagcctagagccccaggactggccagaggaaatacataggtaaatatgtgtgtatacatatgtgtgtatcaacttttaatagacaaaaagtgggggcagattgcagaagaaaaggcagttgacaaaccaggtaagattgatctaggggtggtggcattttcccctgtgccagcacacttcttcagctacctcctgctgttttattttctcatactgatgggcctgtagttttccagagcgccactgcatttaaatctgtattctattttctctcctagaaaataggtcagactcaaggcagagttcaccaggtggggtcccagaaggtttgactgggactcgcctacaggaggctggctgtgcagcctgtcccatgctccccagagctcttccagaggcatgggggagttgaagtagcaagtcaggagaatcttggactcatacctgtccgtccaaatgatctagtacaaatgaagagtgaggtgggaggactaccccggctgagctagcttctgcaagtgcaatagtggtgaatgatgggccctttcttttcctcccaatggttatgtattagtctgttctcatgcttctgtgaaggaatgcctgagactgggtaatttataaagaaaagaggtttgattgactctcagttctgcagggctggggaggccttaggaaacttacaatcatggcagaaggggaagcaaacatgtccttcacatggtggcaggaaggagaagtgctgagcaaaagggggaaaagccccttataaaaccatcagatcttgtgagaacttattcactaccacaagaacagcatgagtgtaactgcccccatgattaaattatctcccactgggtccctcccatgacttgtggggattacgggaactacaattcaagatgagatttggatggggacacagcaaaaccgtatcaggttagaagaaccaggttccccaaactgcagaaaattgtttcccttggacttgaggatgaccatgctgagcatatgcacttgtggctgaagttattgttgaatatgcagtaagtgtccatgggattcagagtggaggcaggaataccctaatttccttcttgcctggttgtgatgctgaagagagtgggtgaaagacggaagtgggtttccaattctttctttcctgttttgttcctactgtttagagcatggagatcctaagggaggtggctgcaactgggacagagctagttttcatcaggattactttttccccctgaatatttcttgagtacctgttacctactgaggacgtgtgtgaatggtagagctaggaaggtgggagtaatgtgagccagtcctcagtttttctatcataacttagaaataactaactgaacaggtacagcctagatcttttgcatttgctattcccctgcctaagtagtctttgtcaggtatacagaagagtgtttctcaccttcttcaggtatcagctcaaatactacttcctcagaaagacctctttaactaccttctctaaaatggggatactctgctggcacttactctacttttcctttcttcatggctccaatcactatttgacattatgtatctgtttttattcccattaaaacccaagagtattgtctgtttcattcactgcttgtatctccaatgtttaaagcagagttcagcctatgatagatgctcggccaataggtattgaatggtgaatagatgatcttcattgataaaactcgcagaaatacttttagtatctccatttatacatgataagtttgaggctcagagaagctaaggcagttgcctctagatgagggggtagagctaggatttggttctagatcatcttaatccccttattaagaaaagctgttttcttctatgctccccatatttttaggtaagctgtcttcacatggtaacaaaaatggaatatggcagctctagagaaatgaaagcaccccatttcctgataattccagtaaaattctctgggaagactctcattggttgggcttgggtcataggtctgttcctgagccaattattggaaatagaatattctcaagacctggactgagtcacatgactactacccttggagctcaagtgggagtgggggtcacctctagcaaaccacgtgggctaaggctgggaagggggctttccctggaaaacagctgaggactgctacaagaagaagaggaaagggatgctggatagacagtctggcagatagacactgctaaggttttgatccttacctgctagccatccccctccttcgtctacctcttacctttgccatttcgttctgtcaatcagaattgagtccagagattcaggtcactcactgcttcttgggccaggggccaggtgataatgtgtctctattcctaaagttggaataatgctcagacctgcctccaggtcagtgccacagttaggaactgagcttggaccttgatccccagccagaagattttgttcatttgtttgtttttggtgggattgttgcccctctttgacaagaataggtgcagtatttttacatacaggactagaactatgccaaattgagacttgaggagggaaaacaaaagaaataaggatggaatttgttttgatccttgcttctgttcgccccctcacttcacactgaggaatggggtgggaaagaaccagagggaggggagatcgggagcagatgtccttattcataagtagaaaagtggaaccaaaatcactggcttcattcctgtgatctcttggtgtttccagtgagccatctggtcaatattttttgatatttccgtctgtggtaattcaaagtgatgacaatcagagtcactaacgttatgtagcattgtacttagttcagtgctttacaagcatttaatctcatttaattctcataacacccccatgagggaggctctgatatcattctcattttatagccaaggaagatgactcttagaagttaaatgatgggtccaaggccacagagaggctgggatttgaacccagacctgtccgcctctgaaatttaagattgtaatcacatccccaaatgggcaagtaaccagtatcgaaaaacctttggagttccaaggaattctgtctccctgtgacttggtgtccccaaggagcctatttgtatgaacaatggtgttgacattcttctgccacagaactcggccacatgtaaatagtttgatatcctgtttaattaaggggtattttaacatctattccaggcaatccatcagtaacagttaatggacccgcctagttatttatacaacactttttccctttccacctcttctcttcttcctgccattcatccctaaatctaacacactagaaaacctgaaggggcggtgtggctgaggcatgattcagagctttctagaagtttctttgggcagatacagcttctaggggaggcaaggtgggggctagagaagtgctcagctgttgctatgggtatgttcattctggggcacagcttagttggtcagcacctggatttcctggggcaagggccctaaggacacactggagctttacaaatctgattgcaggtgtttcattatcggttggcatgaagaacattacccatcctgttcaggcagcaaattagaggcacagagaataaaccatgacccactcatagggcaggtgggagacgctcacccagcttccccatggcttcagcatgatcactttaatctgcaaaccaaattcaggtcctgtatgctcttgagggacctaggcttcagttgaatgaatgatggactaggtggtatgcaagagatctaggatattttctagtctgtgcccctgaagtagctgtgtgaccttatataagtctctctactttttcatcctccatcttaacaaaaaagaactaaactaggtacttagtgtctgtggctactccagatccaccattcagtgattctaagtgagctatccaagactgccaggttggtcattgtttcctgaagcagccccttgttccttctcctctgctgtggtatatcctctcaggttgggtctaggggttttaacagtgccttgggctgctctgggttatgcttccccagcccgattctatttcacatctgagggaaggaggaggagattatgttgttcatggggctgataggcgcgaaccgttcttcattttctgaaagttcattggcttaattcaaatgtcaacctgtctagggttgggtgtttattcgtagttgtcaaaagtgatttcaagtggcaatttctgtcattagtgttagggtgaaaagcaaggaaaaaaattaaagtaggaggcaggatttcaatttgtttgatgaatgatctactcacacacaatctcatgcacacacactgctgtctgtgatgaagcgtggtcactgggtgtactggggaggcggggaattgtaaatattttgtgaccttatgtccttcagtcctatgtggtgaataaatctgtaacttgctcttaattcttatgcctcttttgctttgtttctcaagggagtggttcatttttactttttctctctgctgggaaaccttgcttgacttcatgtccagtgtttggtatccaaagacggggaggaggaggatttgctttggtgtcagtgtgcagaaatcaaccagaatattttaaccaatattcttgcaggattccagtctgcttggctctttgaagccctatctgattccaggatgatgtctttccggacagatgtgaagcttacctctcttgctacatgcaaagtgaaaagggagcttggcccctcggcttgcatgggtggtttttgggtgaaggtggaactaagtgctcagaagctgagtacctctggggcttgcatgaacttgatagtcatgcaagagcacattgcattgtgtgtgtgtgtgctgctaacactcttcttcctttttctccccttttctctcctctctccctttccctccctttgaaaatgctgccacagatgtcagtcaagatccaggtgagtctttgtgtttgcacagctgctgtgggaatttcccctctgctagattgtgcatggtttgagtctgagtgagacttttatagagacaaaattctaagtgtattgcattttcactgatctaggtttagaagaagaaatgcattgaattaatggatttgtattggttttgaagaaccattttaaagccaaaggaatatggttctcatacttaatataatcacttccttctcattagtatttctgggtgattcagaaaatgaacatttttgggaaagtatttgtaaagttgttcttagatatgtattctccaatttaatgaacaacgttagctttgtctttcacacatctgcttatcttctctagcttcatgtggttgaaagcagaagatatgacatacgtagcatggaaaatgtgatgtgggtgaaaggaggtttctttctttttattctcagaaatgtctttttcacaatgaaaccagcaatatttattgtttttcctggttatgtaaataatacatgctcactgtggaaaaaaaaagcaggatggtttgaataaatggtttttgtcaatggaaaaattaaagaaccacgtttataataattatgcatttctctttttaaagtgtgtcttcatccagagtcctggttttaagcattgcgtgtgtatagacaaatatatatgcacacacacatacatagaatcatgtgaactgatgcaggcatttatggataagtgtcagatgacttagaatggtttggagactattctgaactggctagaactttgagttaaaaagaataattaacttgaccaaataggaagggagcatcatttcaggtgttttcacatgttttcttgtttagtccttttaatatttaatttttatagcattaatacgagataagtatcattatattcattttaatgtacaggaaatttagggcctgttaggttaagcagttttgcccacgatcatagagcttgtcagtggtagcactgggatttgaacttctgactctccattggaacatgctgggacctgtaagtgaaaattctcagtgattaaagattttgtaagtatttcctaatgagactattgattatttgtttgtttttgcttagagatacttgacattttctttattagcagccttctttccaaatgaatttatctttttattgttcttaaatgtctaaaataatcaaccagacttaagtagggttcttctgatcattgttctgtgtgggatcttacacaacataaaagtagaatacagttattctacttaatgcagagagtttctctccatttcttcctgcctgctccctacctttgaaaataattggtgtttgaaccaaagcccaggacagcatttcctaggaagatgccattaagtttattatttctatttaataatattttagttcaatcgctcagtcaacaaatatttatgttccaggaactgttctaggccatggggacaaaacagtgaacaaaacagaagacattcagtgccctcatggaccttttattttagacagaggcagacaatgatctaaaatgtacacgcagacacacacatatctatgtatatatacatatgctttatatgcatacatatatacacacgtatatgcatgttttgtatatgcatgttatgtatatattacatatgtatagtatcagggggtggatgggaagtgctgtggagaaaattgaagcaggatagaggagaagtccctaatttacaataggtagtcagggaagtaccctctgataagatgatatttgctgggaaacctcaaggaagcgagggagtaagtccaacacctcgttttgtttgtaaagtgccacgtggcggcttctctttctggttcccagcagagaagtgaccaggggtcaccacatagagctgggccctgcatagggtctcccagccaagggggtgaatgggggtatgaatccaacctgtgttcctcttgccaagcttgtgcccatgaggctgcctctgacaaaaggggcatctttttctagtgctcacacaggcgccatattggtcctgggtgagataacatggtggagtgaaatgcagtggacccataggccttctgccatcctttcaaaggggtagaagtctgaggaatacccttcctcagataacagcaactatgaccagcctggcccacaccatttcaatttcatggctgttgtctcattttgttctgttatccctctgaggtgtgtagcccgagtgtcatttcagtgttgaggaagttggggcccagggaagttaaatgatgtgtgacggtcacccagctgttgagtggcagggccaagaggggattgcagcctaatttcagatcttgtgctcttcattctttcctcgaagtgtcaagggctgattaccaatcttgttgccccaccaaccccttgcttttttgtggtttctgagcctgaagcaaatcactggtttggacccttcacttggggccctggacatggcaggaggtggcctgagcgtgcccggccctggctgaggtcagtgggggcctcctgcctctctgagccccttgccaggcattctggagccgacagcgctgtggttctgaaacaagaagccttcagcagttctctgactcttttttccttcccctcaggaagtcaagttggggattttatgagctaatgtaactatttacccagaggccgctggaagactataaagggatgattgattaattgattaattttacatgtggaggagatgagttagaagtaaccctactgtaaagcagtctgagatggggcctggtgggcaacacctttcccaaggtcccagagacaggttagggacttggagcaagagcccagggcacccaggaaaaaggggcaggcacattttcttccacttcatggggtgaaatccacattccctgcttgtaacctttggggaggaggttcagaataataacagtaacaataagcacttggcaggtgctgaagagggcccgggagcccagctctgacattctcttaaccctccatgtcagctcctccaggttgatgttaccatcctcagcacagatggagaaaagctgctgcagggagcttcagtaacttgcccaggtcacctcctgctggtgactaggccaggatcccggatctgtctgcctccaaagcttgtgctcttgttcttccagaccctgcctttcacatgacagagctgtgggccaggctgtgtcctatttgtgtctgcattcccagctctttgcacagcacatggcacagagcttaacctcaaaaatctctattgaacaagaagtatggccacaagcacatggggagttttgagtttgcagggttccaagacatggtggagcttaaagggtatcctgtccaaggagtgcaaactgaggcccaagaagggaaaggacctatccaaggccatgttacccatttgtggcctggcagggacccctgtcaggtgccttatcccatgcttttgtacattgggatttgtcactggtcttcctgggctgcttgtagggcagaggtgggcatctctgccctgcctttaaccttcccctgctttttgcctgttctagaactctctggaagccatttggaggtgaggaagagggaagagtagtgggttagagcacagggaacaattctgggacctctgggtgtgagacccttcttctcccctcccccagtgcttctccctcctgcctggaggggctgtttatggtgctccaatgacagcctctctcctccgaagggataatttctcaggctctgcctgctgattagacctggaatttaaatgaataactgtgaccttgtggaagtgccctagttattcagaggcccgatgaggaaataggcctcctgcttccatccatcagagccctggcaggcactgtgggaggggctcctgtctgctgggcccccaggaggcctccgtctgctgttgccaaaggaacagatacctttgctggagccttcccctacccgctcttgatctccgccccgtattgtgttcctcctccattgtaagtcatctcaggctgtccttggggaggggacctgattatgtgtcctgggccttgccctgtctccagggagccactcagtccagcctgaacccaaagcttggagacagctctagtctgacttttgtttgtggacacagaggggatgcacttgaagcttgttgctcacagggcgacctgcagaaccgaccagcagattctcaggcctgctgaatcagaatctgcattttatcaggacctctaggtgtatactcattaaagtttgagccacactgagctcaaattcccactctctcctcccatttgggaccaacagggctgtctttactgagaagttgcggttcaccttgcgaaagccctcgtcttcctctcttgtgctgggcacagaatgagatatctgatctggttgtggggaggaagaagaagaacgagattagggaagggaacgagaatgaacacttactgaccacttagtctgcgctggtcactgttcaggcacactctgtctgacatgttacatctttcatgtagatgtaaggcaagatagcataggatggagcaggagttggcaaactatagcttgagggtcaaatccagcttgcagcctggttttgtatggcttgaaagctaagaatgggttttacatttttaaatggctgggaacagtcagaagatgaacaatttgtaagacaaaaattttatgaaatttgaatttccatgctcgtaaagttcttttggaacatagccacacctattcctttattcctttatgcattgtctctggctaacattttttttttttttgagatggagtttcgctcttgtcacccagactggcatgtaatggtgcaatctcagctcactgcaacctctgcctcccgggttcaagcaattcttctgcctcagcctctcgagtagcgaggattacaggtgtgtgccaccacgcccagcaaatttttgtatttttagcagagacggggttccaccatgttggccaggcttgtctcaaactcctgaccacctgtgatccacctgcctcagcctccccaagtgctgggattacaggtgtgagccacctcacctggcctgtcttcggctacttttgagctgcacaggcagagttgcatagttgtgatagagcctcacagcctctaaagtgtttacaatctggctccttattaaacaaaagtttgccacctctgtctctatcatggcactgtgacctattcaagttactttacctttgtgggggttccacttctttcatctgcaaaatggggacaataagagaacctacctcatggagttgtttcgagcttgtgttagaacagtgcctggcacatagttagccatatataaaatagctattagtataaatgtgaaaggaaaataaatcttggggcccccaaatcactaaagggaaaagtcaagctgggaactgcttaggggaaacctgcctcctattcaaagccacccctctgctcgctgagatagatgcatatctgattgcctccattggaaaggctaatcagaaactcaaaagaatgcaacccttcatctctcacctttctgtgacgtggaagccccctcctctcttcttgcctttgcttcaagttgtcccgcctttccagacctaaccaatgtacttcttacatacattgattgatatctcatgtctccctaatatatataaaactaagttgtgcctggacctccttgggtacgtgtcctgctgacttcctgaggctgtgtcagagtgggtcctcaactttggcaaaataaactttctaaattaactgagacctcagattttcggggttcacataagttatccatttgatcctttaagcacatgtttccattttatagatgaaaatactttggctcagaaaggtttttttaaaaacggaaaatcaacccaccgttgtagctgtgtcttggtctccctaattgtcttgaggcatgctcctgtgcagtgccgtagaacctccccaaacacacctgctgttctctcctgtctcatattctctcccatctgtcctgccctttgtgcttgcagtcaagaggtccctcaaacttagatcccagccattgttctcaagtggggcttaggaaccagtaaaaaggggcaaaggagaccaatattttgtagagaacccacagtgtgccaggcacctaccacttcaccaatgaagaaccttgagctccaagacattgcatcctttgcccaaggtcagaagcagggatggtaagtttcagaatgtaaatgcaggtctggaattctgcttggtagttctgccacttttcccaggaggtgtacgcccttgggcaagtcatgtaacctctctgggcaataggcttcttttctttaacctgatagattagaatcagatgacctttcaggcttctttgattctgaggctgtatgcttagaccatctgactgagataccttggggaatagcaaccaggagaatgccttctccattaccaaagacttcaacctcctaactctagtagtacctatgagatattttgttttttctttgctattctttggggcaatactcttacttgcttttcttccttattactttatgagaaaaaaacacttgaaattgttgagcttgtattttaagccaggcatggaaatattaagtattacatgcctcatttaatgtttttgacatccctaggaggtaaattgctatttggcccatttcacccatgaaccaattgaggctcaggtacaataagtacctcactgatacaacccagtaaaaagtagtggaacagaatgcaaaccctggtaggtgcggcccaggagacatctcctagggagttccactagagtgtacacttcacaaaggtacactggtgtttacaactgtgccctcttagcctagaactctgacaatacattgcaggcacagaaaaacacttcctgaatgaatcaacagtgcttaggactcagctctttgttttatcccacatcctgctgaaagaaagtccgctttttattggggttcaccctgagacagaaggtaattgaatgaatctttattcagtgcccatcttgggcttggctcagtgggagatggaggctgcagggaaatctacctccattgcgtgtaattagattggaagggggccctcagctgggctaacagtgctcaattcccagccaattgcctggctggggcccaggaagacccccctggctcctgtagctgttctcgatgagtaagtgtgagtaaggagctgcttctcaacctgcctccagctttggctcactcagggatgcagatcactgggccttggtgcttttttctagagccgttagaaatccctcctttattgtcttaggcagacccaccggggtattggttatggtcacatttcatttcccagttctggagggcaaggccagagttttagctggaaaaatcatttgtggtatcctgcccctgaccctgccaaatgggcggaggtgtttatttgttgctccagtgttgagggcagcagtggcatttagaaggaagggataatgaatgttaaatgtgctgtgatatgcagaagagcctcattcaaagttttgtgctgctcaaaatgtcattgatgagaccattgcgagactattctagaccagttccctccctgtccaggagggggaaatgaggcaacagacctcctacacgactcagctaagccacacagctagtttgggacagccttggagaccctcccagtctgcagacctgcctagggaggtctggtaaggacgaggctaagcttgtcagtttgctaggctaggcctcaggaggggtgaggaggtggaatgcagctgagagtccagggcagtgggtccctttatggggtagcttagctgactgtgacgatgtagggaggcatctgaggatgcactgggcaggtggtccgctaatgctgccagcttattagagaaatggtgttggcaagagatggagggcagggcagagagaggacctagatagaccagtcccctaaataatggcagcaataactacatgcttttgagcccttcctgtgtgctaggaactgtgctaagtgtattccatgtgtggttacatgtgactgtcacagtgattctgaaaggatattttgcagatgagaggcaggaaattttacaggtatttttcagatgagaggcagaaggaagtgcaaagttaacttgctcagaagtcccaccattagtgagaggtggagctggaatttgaatccaggctttggattattgagagcagtggtctgcaaactctggtatgcatcagaatcacttggagagctaatgaatgagatccaggctcactaaactaggatagttctcccaggtgattctaatacaaccaaagtttgagaatcactgttttaaaataaagtcatcttgaagatgaagggacctgaaagcttcactcttcaccataattttatactcccacatatatcatgagtagtgtgggagattgtgaagaggaagtagaagggaagatgggatgatgatcttcctttgagttccccatggcttttaggccataggtctagtaaagccatcatgatgatacaccatagtcagctgtgtattttctggcccccttatctgctaccgtgggcacttgaagggcagcagtgtcttactctttgagaacagagatttatccatgcatgtatccccactacctgccacattgtaggtgctcataaacctgtggttagaatcagcatttcaaggaaggaagaggcccaatagattgtcaaggctctctgtgcacctaatttttgaatctcttctgtaagagttgattcagacttggcttggaccctttcagagatgagcaactcattgctcctttagcttttccattccattccaacagcactgaacatttgaaagctctttcttatctctagttgctatagcctccaccacctgtatggcttccagcccttggagacacacagaatagctctaattacactcctagtgtttgaagacagggcttttgcctttaaggatcttcttttctaaaggctaaaacatctccagttttttttttaagcattctcctacaaggggttttaattctttcttccaggtcattgttctctgaaaaatgacacattttattttttgcatcctttccaaagaaggatgcccacaccacatacagtattatgagtatgattgggatcagttcagttcattatagagtggtctcaggactccccctttttttttttgagatggagtcttgctctgttgcccaggctggagtgcagtggcgcaatctcagctcactgcaacctctgcctcccaagttcaagcgattctcctgcctcagcctcctgagtagctgggattacaggcacccactaccacacctggctaactttcgtatttttagtagagacagtgttttgccatgttggccaagctggtcttaaactcctgccctcaggtgatccacccgcctcggcttccaaaagtgctgggattacaggtgtgagccactgcacctggcctggactccctttttctagattagatatctattaatgacagcaccaaacaccttagccttaataaaaaaagattatagtattaattgaacttaatgtcagtgaaagtctttactattgtaatgtcagtggaagtctttactatttttgtgcccatttctctccctttcctggacttgtgcagttggtttatttaactaaagcttgggatcattctttgactttgttaaatccagctttggattttaaaaatccatcacaccatgatctatgtgggtgcagtgcttttatctagcacatcagctgtcccttctagcttcatgtcattcatcaatgaagaactattttagggaagttcatgacagctggagagcaaagactttctttcctttggaatgattcttttctaaaagtcattactgctgctcctttggcccctagagtgatggcataactacctttgtctctctgtcttccacagcattaatgcatgaggaagcctcaccactccttccccactaagagatggaatagcttgggaatatgctggagacattctttcccctacactgtagttaggccatacagaagctgttggttactcatgggcatgataggaagaaaccctttctgttcagtccagccaccttgccataagaacaatattggtctagtggcaaacagtgagtgggctggtatgattacatggtacaaaaggctaggtggtgaggactgaacatggtagtatcatggaagggcaaaacccagaggctggaatctgggcaacccctatcttggagaattagcagcaggatctctctcttctgagtctctggaaatcatcatcatcatcagtccagcaattcgatccattctcagtgctgtgtaaagcttgcataaaagccaaaatcctgtatgtaaatcctatatgattatcctgagtgttagctcataattgctgttaggtgattatttgaagctttgtatagcttggctgtagtggtgacaggctattgttgaagtctgccattctgattatgggtagcattctcaggggatttcagccatttaaaccaccatttttataggtcaaaacaagtcacctatcagcagtttaatacagtcctgcccaatatgttgcttggtgtctttggagatcatcagaattcatagaggcaaagaatcttagagttgggaggactttctggtaattatctcctacaacctcattctgactcttttttatggcatttctggcaaataaaatttcccttattattttactctctgttcatgccaaatgtgcttgtttttttttttccatcatgcatgtacaactttaaaaacgctcgatgggggccaggcgtggtggctcacacctgtaatcccagcactttgggaggccgaggtgggcagatcacgaggtcaagagatcaagaccgtcctggccaacatggttaaaccccgtctctactaaaaatacagaaattagctgggcgtggtggcagacacctataatcccagccactgggaaggctggggcaggagaatcgcttgaacctgggaggcagaggttgcagtgagctgagattgtgccactgcactccagcctggcaacagagtgagactccatctcaaaaagaaacaaaacaaaacaaaactgctcaatggtagctctcatgttcttacatgagttttttacaaagttagctgcacatagtagttccttgagctgttctgcatgttgacatgttttgggtccctcatggtcctaggtattctcctttggaattaatactccacttgactaatgcctcccctaatgtatggcaacatacactgaaccaaaaccctatatctggtatagacaatgctgagaaaaggtgagacttttgaacatttttattctggtaggtagaggattgcacttaagtgccaaaatttacatttagcccttaaaattaaatttcacttttgcctgttctcatccttttggaccctaattcttatatctaacaaattagttattttcaggttgaggtcatcacaacatcaagacagcatgccatgaatgtcttcagacacatcattgatccaaatgtggagcaggcctaggctctgctgtaaggaactagtgaaccctgggcagaaaaagtagattcaggttcacagtgaaggtcagggaattactcagggaagggctggtctgagacaaaattatggatttcacctgtaatcgcaactactcaggaggctgaggtgggaggttcacttgagcccaggagtttagggctgcagtgagccacgatccacgattgtgccactgcactctagcctgggcaacagagtgagaccttgtctcaaaaaaaaagggggacttaggtagaaggttttttctaacccttcccctttcctgtaaacattcttctcaatcccacgctgtctcctgtgccctgcctcctgcccatggtggcagacttcttcagtctgcatgtctcttgagtttctccattcaaaagctcctgtgcatgcccctgtcttggatgagagacctttaacctggctggcctgatgatctcatacatgacagtatccgtgactgaggagtctgagtgggtctcatgtttaaatttgcgttttaaagagagaagtggctttatgccactagataacttgggaaaggaagaatttcatgttttagtagattctgtggatgaggattgaggaaagggagaagacagccatttaaaagggcttcccagggccctttaaaccatgctgagccagggtcataaatgaagctgatgtctaggcatgattttctgcttctggattctctgagatatgtctcctttcttctccattagcactgaactagagggggtaactggtgtcatggttaccatcacaggctggaaagtccatctgctggtgcagagtcctcacttcacccctcactaaggtagtgtgactttagctctcagcttcggttttctcacgtgtaaaattaatggtatagcaatgtctttcccatagagctgtatttaatgagataacacatagccatgtctcgtctgtgataaacaaccagcagatattagctgttattgtaattctctttaccaagttaactgaattccgtctctttagtgcttaaaatgctaagatgtgtatttcaactggaagatgaaattcttcctttcccaggtcatttttgggagggttatcaagccactttcctctttaaaatgcaaattgaacaacatgactttttttcccttttctctcttttccaaattcctggtcaccctacagacacttttggcttctgcaaatttgggggcccaccctcttcccccttcagtatctactgagttcttccagaaacatcaggtgaatgtttctatgaccttctgattttgcgtaattactcttttaaaaagtccttgtggcttcataagaattcatcgttggcacttggcacttgcagcaattagtgacatttaatttctctacttcgctatgaaaaaaagagatgatatatgtggatttttcactgagataaaagttactctgaaagcgagtgaaataaaagtcttggcagagataacttttttttcgtcttttctgaatctttttctttttttctccccttgtgagtgacttccttccttccccgaaatgcttttgccaattacccagccagggtgaaggaaagaagaatggatttgaaaaccatctgaggtgggtgggatattatagatttaagggggagacaatattagcttaaatgatggaggccttcaacttctggcctggttcctgaacattacatcttcctcttgcctgtttcagtaaatggtttctattctctgtattagtcattctcatgacaggcttcatgatggccacagccgcttacaaatgactttgctttcatagccatttccattttcccgagctgcaaaagcagctatagctatctccatggggattttcccaaagggtgtaacatagtttagagggccttacgtgtactttgcatataatttacatatgatttgcagtctattctaaggcaatttcaactttgtatgccttatctcctggtgatctttttctcctcttattcctctatgtaccctgagaacctgtgcgccacagataggcaggtacaagaagggtggaatatattaacaggactagaaagagggaggtggaagggtcaaaagtatcagacatcctgttgggatccagctggagtagcactttttcagggtgtgacatcaaacgggagacacttccgttgctttcttatatttttgtaattattttttaaaaaaggaattgtagttccataagaatttgacattggcaattcttaatttccttagctgaactttaatggtgctgcattttgagtcatagctgaagatctgttcaaagccagagccgatggtgagactgttttggaaaggtgtggtcccctctgcttccatgagcccccgttttagcctgtgccttttcttttggcagccctggaatatcaaacccagaataaatgccaaactccaaaaccagccagggtgcttgtcctagggctggcagtgtgacctgggagattgctgctgatgggcatgcattttgaccccgtttctgaggtcgactagaaggtccatcttcatttttaccccttcctcatctacaacatacagaatgcatgcctagcatagactctgtttcctttgttgctaattatatcctactcagttaagattttttgagcattattttctataatttatgttggaaagccatatagttccttttcctttttttttgaatgtaaaattatttcaacatttatatcttaatgttgaatatgcttggaaaaaagaacctccaggatatcttaatatttccccactcctcccaggttaagactcagggctccaaccccttttcctttgaggtgtcattcactgacacaggtgctgaccctctcatctatgaatggggttgtgagaagcccttatattaatatttgtcctgactctctctcagactgtagtcttacattgttaagggcacactggatcttttgcttgactgattcctcctttcagctctttatgtgtcatacagaacttattatccccaccaccttgaatccatccccctactccatcccaccttcctatttctgttactgtttcccccagtctcccatccaccactctcctaaaggatctcatccatcactgaagcctgttcaatcctcttttttcttttctttcccactgccatgatactaatgtaggtccttcccctgtaactgaactctgtgcctccgtctctttccccctgatccatctcgttcacagtattgcaaaaataatcttcttcaataacatcttccttgggtttttcttttgcccatgaaccctcaatgtctcccatcaatgacaagatcaagtccactttgcttagccttgaaactccagacctccatactctgattcttaggatcatctttccctttttccttatatgaactatgcatatgtattcattcctttatttgtatagcatgctgttacgtctcaaccatgtacctggcagtgtcctggttgcttctgaaaagctaaacagaaaagtccttaccaatgcactttatgatcctggtagcccatgctgctacctggaatgtcctccatctaaaccctaaaccattttccaagacctgttaaaaattcctctgtcctccagaaaccttttctgagcacctggaaccctctttatagtccctactggtcttattgtctgaattaatcatttgacacttaggaattatccattcactcattcaatcatcaaacacacactgaacacttattgtctgtcaggtactataataggtgttgccttacatgtcagtacatttccatagcataataaaaataacatcaacaacaactgttataaagctcgtgtcaggctgggcgtggtggcttatgcctgtaatcccagcactttggaaggctgcagcgggcagatcacctgaggtcaggagttcgagaccagcctggctaacatggcaaaaccccgtctctgctgaaaaatacaaaatttagccaggcatggtggcacacacctgtaatcctagctactcagaaggttgaggcaggagaatcacttgaatctgggaggcagaggtggcagtaagccaagattgcaccattgcactttagcctgggcaacagagtgagattccgtctcaaaaaaaaaaaaaaaaaaaaaaaagaaaaagctcctatgtgtaggcacaaatttgtatatgttaatcctcaaagtaacttttgaggtaggcattattattagtcaaattttatgataggaaaatcaaggcaaagaaatgtttaacaactttcctagcgtcacaagttagaaagtagcacagatggaaatcaaacctggctctgaagtccttgatcttaacccccatgcatcactgtcaggtatgagtatatatggcaaatgtgtgtgtgtgtaaatataagcacatgcataccttcgcagctagactgaactctagaggtcagggatgatgtcccacacttacttgtatccccactaccttattcagtctatgcatgtggtagatacatgaattgtttggatgattggttgttggtacttccattcactgttgaggggcttgagatttttagcaacaagtaggagtgttttgaggtagaaggcggagaagcagaatttcaaaatagacctgggcatgatggaattcttggtttccagtttttaactctgcaagctctgaggacaggtttgtgcaagaaaatgtactgatgtaaaagcccttgaaagtggaagataattcttttctcaaaaagcaaaataaaacaaaccgtattatggttacatggtttctccccccagtcctgtttcctgtcacactgattcatatccattttgctttattggctataaaaccaaagttttggcatcaggatcgtgtatctcgttttctggcctagtatttctatttaagggttttataagttgaatatgaacattttatttgagtggcaatactgcaactacatatgtagtttaataaaacctgataagtacatatttgaattttaaaaacacaggtggtgagttatttgcattttaaaaggattcttccctttacaaaagggtccactgcagggttctattaaatatccaattccccttagtgcatttattatatgatttaatttaccaaaatttgatttatatgccactctaaaggggtagctctcaagttccagtaagcatgggaatcacttgggcaacttgtttaaaattcagatctggcccccactccttcccaaaattctgattcattaggtcttggttcgtgaagcccaggatcttcgttttttaataaccatctccaggtggccgatgtagattgtcagtgaaatacactttgggaagcatataagataaagcgcaatgatagaggtttttacgaggcttgaatcccctcttactaccaaatgtcctgttcactatttagtaaatttaaaaaatattcacgtgggtcaaataaagactcttccatcgctttcctactcacttcttcctgcagctgccaaacatctttaatctcaggggtaaaatgtttgccctttttaaccctctatttgactcttaggtagctcttcagatcttccttattcttttcttttcttttttttttctctctctctgtcttttttttttttttttgagacaaggtcttgctctgtcacccaggctggagtgcagtggtgcgatcatagctcattgtagcctcaaacttcttggctcaagcaatcctcccacctcagtgcccacccgagtagctgggactacaggcatgcaccaccacccacagttaattctttaatttttattttgtagagacagggtttcactatgttgcccaggctggtttcgaactcctggactcaagctattctcctgctttggtctcccaaagtgctaggattacaggtgtgagccactcttgtgagcgtcacctactgaattcatacacctgttctgttcctgttccccttgccacatactccaacagacattttaagaacctttatttctatggaagtttcttttaaccaagtctagggccttttctcctctcttcttactatacccttcccccacaaaagacccaaaatgaattttttgaacaaaacaaatcatgaaaatgacttgttttatcttgatttcattcttccgtgagtatttatcctggtcctagagcaacaaatactaaaactatctatttaaaatattatagtttaatgaaacttgtttgacaaatagaccccctgacatttatggcacatgtatctgtgtatttaatatatcattgatcttttaaaagtcagttgcttgacctatattttgtctctgattacttttctaaatctctagtaatctctaaaaacatttagagatttccatactttttttttcctttattaatcccctatatccctgaattttgctcagagtaaggttctctggagtgatttggatatgtcaaatatctccagtaacaacagaaccaatacaagagcagataactggtacaattggttcctggttaaaaattttttcttcttaatagatttatcaaggcttgtgctttcctgaaccaaggagctcttaatatccctgtttgccttccataataatatagccagaggttctgttatctatttattgggactttacataccttttataaccattcagtgcttggctagtcctccctgatcaagtgtggaggcctttctaggaaagatggtgggggagaagtggaagaagtggtattgttgtccctgggctaagatgacagtgatagaaacagttccaggttgtctgagcaactcttgtaaacaggaacttatttgatacattccatatgattcaatttttgtagaaaagactatctagagaaaaaaaagttggatggtagtctctggaaggtgggattgccattgatatttttatttttgttctgatgatttttcccaagtttctacagtgaccatgtattgctattacaagtaatttaaaagaaagaaacctactttacctggcgtcttaagtctgcttcccaagggacttaatctttaacagatttatcacaaatcctacctattgcacagaacaacggtaaaaggaaagttctcgtgattaggcccagagcagttctgcaaacacaagactgtaagctagaaagccaggctttctgcccagcagcaggaaggctggggtgtccatgtttgttgcatgtcccagggtatgtgcatgtggagtctgacatgtgagcaagcgtgcggcccctgtcactcctttttccactcaaggattaagattgtattgcatttgggattttaactttgtcttctttctttttttccttacccttccccactcctcttccctttctccctgtttctcttcctcaggcctctcccacctcatgatgagtgaacaaggtaggtgctttgtgcttgtggtcctgcagctgcctgaactgcttgcctccgtgcctctggctggtcacagagcctcatcgtcactggcaggccattcgctgcctgtccttcctgcgctgggccaggctggctgcaggaccaccctgcagtgggggtgggggcaccttccttgatgcatcgtggtttcccacccctattgtccccttggcttctccattctccaccaccatttgtcattttgggcgctggccctgctgggctgcatccgagagggaagcatgaaaccaggcatgacggtgtcgataatgggggtgaatgaagctaatttcagagcaaccaagcggttaacttcctcctgctcctccccaggccccatgccggggctccaggctgggggagaggagctgggctcctccctgaatttccctctgctttttgtcttcccctccattacactgcccgtaatgatctgccttccatggtcaaaggaagcccttgtgggtttgactgttttcagttttatataaaagcaaaaaccacctaaagaacatgctaatgtcctcatggcagaatactaactcattatacaccctgaagaaaactgcatataaagatctgtaaattcagcatctgcaacctaaaatattcaaatatgcaaggaatgaactgtgcaggaaattcagctcagctaagcacagggtgggatgtgaatgaagcctttttctcctaaataaaaattttccacattatcagcctaaatcaggagttgagagctgagcctagttaaaattgtcttttccttcacagttcaattgctgctattgtgtttcttctgagccttgggatgattgcaagattggtctacctgccttgccctgtaaccaaaagtctaatttttcttgactatgtcgtgttgaaatatacatgggactcagcacctcttctggaggaccaaagaaaaagggaaagaaggataattccatatattcctgtttttcttgagcttttgaggagggtgggacttcccctcccctgctccctgacattgagtccatcagacatttttgacataaacggcagtatcatcaaatcaaggaactgcccgaggctggaagaagttcgtttatggcatccagttagctgtggaagtgggcagtcgagggcatcctgaactgacaaagcagggtaaggaggaagcctacttttccaatgtaaatgtatcctccagacctaagccaagatcagtggtgtggacttcagaaatttcaataaggagatggtttggtagagaccatatgtcaaaaaatagaactgggagaggagatcaggtgacttctctagtattagaaggggctccagaagaggctgagatgaagtctctgttcttgcagtttagtgagggagggaagggccaacagcaagtgactatgaggtggacatgagtaggggatgtacctgatgttgaccagtgtgcaggcagcttgagagagttaagcacatctctttgaggaaccgagctctatgaattgctggaatttgatggctcacctttggtgacaagttacaccagcaaaagcagactcttagagtcccaataagcccctcctacattcttttttcccctcctacattcttttttcccctcctacattctttagccttatgatcccacgtgccccttgggagttctccaagcttttatagtggcttggagaactgagtgcatcacatcatagggcagagtgtggcaaatgggataggctgatggggacttccttgatcttgatttaacttattgcagacacactgatgcagcatggatatcttggaaggctaaatcccaacactggtatgaaaaacatttggagagcctatattatattccttatgcacacacacagagcttcagatacaaccatgctccgggggaataagtctggtaccttctagaaagagagaaagacataatgacagacatggatgttgtgaattcctcttttgagaggttttcaagaaaggatgcagaattcttctgggtaactggtgctactaatattttaagttgcaacttgaagtttaatctgtttttaagacagtcctttgactgcattcctcttcctttcattctttccatttcctatccccttatctgttctcacccatttgatgattacctaaaaaaccgatactcttcttctcaccagtactcctttccttttccttattccttcaacatgaaaaaaggaggcttctgtctggtttctgctgaatcttaacaatttatttttgtgcccataaatatgtgtggaaatatgtatgtatgttgtgtgtacaacacctatacatgtgtgttatactcttggtcctcataactcatattaatgttaggaaaatacaggagaacctagcttctccgagatgtcccctaatcatttttagattaagtgcatgcaatttcacatacatgtggctgtgcagtacttttgcatgcagactttgtcatgtttctgaggatgggactgagaagaaatgaatgggatggagcttgaacatgaagctgagggagcagccttgctggtcacagcgtttactgcttgtttaagcttccacattgtatgtttgttttgcgctgcctccttaggatgttgcaatgctactgcctttactgttgtgagtttttgttttgtgtgttttatgtctctttgtgtgtttgcagtgtgctgatgtttgactctccttgctctctctctgtctctctctggccgcctccatggtgaacaccatgcttcctctacttaattggaccttcatttctgtaggtagaagtaaaggtagagctcactttatttttatcattataactatcaatctgccttttgaaatattcatgcatccaagaggattgtcgattctgaatacagtccagattataaattaatgcttttaacaacaactgaaaaataagaataaaaataaaaagccaatgctatcatttcccttcagtgcatttcatgttcagtgtttggggatgattctgtgttggcctgcctccctctaaactgagggcgggccttctgcatgatcttgtactctttctatcaggaacgggggagggtgttctaagatcccctcccagtaaatatattgagggaacaggggaagtatgaaattatgtatcattgttgctattatttggaataactgaatttggggataacattggtgggggaaggatgatagatgagaaagggagagaattggtgaattgcctgaaattttatttaatgtggaattgggggggatatttatttatttctctttttttcctgtgttgtttttcctgtatatgtgggattcggaattttctgatggggtgatgggttcagaagggtggaactgggagggtgtgaaagaacacaggaatgaaaatgtgttacacagtcaggaggaagaggagaaagagataacgtaggattttaacttacaaagccagccttttgccaggtaggcagagaaaaggagaggggctgagtgtgcaaacttgcgccaacactctgacatgcctttcatcgcaccacacctttgggtaacgcatccatttctaatcaaagctgtcagagacccgagcctagagaacctggctcaccagctcaaattggattagttgttcaggagtgaagggagaggttaattgataaattataaatatgtatctacatctagtcttccctgtttcctccctaattctccagcccctatctcaatgagtctgtgtgctgtctcttccttcaaagactggcaagtaacagaagtaggaaatgtgttttatgccatgaggatgttgaagaaagaaggggctgacaagttgttgaaaacatggattcagtgacacgtctgtgagatggctatcgcttatttgagttttatgcttttctgggtctttgaaaagttatgtatggttgccttggaagcagttcagtcctttccactttggggttggttgattgcctgttccttttatgctaatcccaggtggcttcattctcagaaatctgtcatggggaacccttaccccattgctaagttggtatcttttgaaaggaggtgggtgggaaagcagggagaggaagaggaataaatgattaaagggctacatctggctgtatctccacctctccactgacgctacttagtggaaggcactggtgacctcataggcacagccaccaatctgcctaggactcaacttttctgatgcgtgtggcactgttgcctcttctctcattggcaatacattagattcagtctctgtctctgtctccttgtctttccctaatcccctacaacatcccataaaatagatgttttgagtgttttttagattttgcacgtgagtatcttattttctttctcggagtcactgctactaccactactagaagctgctgacactttcatgcaccagccattgtgctatatgcctaatgggcttgtcacacttaatgctcataactcatctgtgaggtaggtggtggcattattcttgttttacggataagaacaataagactcagagtcagataacataagccaatgactactaagtgagaatcaaacccagaatctgtgcccctaacccctactctatactgtctttcccggatacaagggtgacctccacgtttaagccttctagctacctctctacactgacctgtcataagttccagcctaccaccttgcattctctgtagcatatgtctctgtaaatgccccactaagggaggcacttcagtgggctcaaagtcaaccttcatgtcatctgcccacaaaccagcttccctttatgatgtctccctgtttgttaacgcatttcccacctgccttatcaccgtggggtgtgaaacccaggaattactttctatcattctccttcctgaaccttcctcctcctaggcaattggtagagagagagcttgttgagactctcctccagaatgtctcttgcatctctgctgtcagctccctggatcagtttccagttagcacttactcaattattgccctctcctaattggtctttctgcctctgttctcttctagtctatccagtggttgagaattgcttaaactctgcggcccacaaatggagtgcaggattagctatctccctttcaaagccttcccttatatggtcgtgtttacctttatcttgctcctctgttaagcttaactacaaaattgctgctccagccaagtggaataccaaataacctctctagaatttcctcatctcttacctttgcttattctgtttctctaccttttaatagtccctcatccccttttttctgcccattgaaaaatacatatatttcatttcttatgtgatattttccttgaatgctccattcagagttgggctcttcctccatgtacctctctaacaatttatatggaagttaattgggacttggaccactcccctctactagattgcacgtacgttgaagacaaatgtattcatttgttaacatccagatgtgtctagcatagtgtgttccatgcagaaaggactcaaaatctctaatcctcttatcttgctgtcatttatcttcctaaaagtgaaaataaagcaaaattaaaattaaatcgggtcatgtagctcatctgttccaaagttttgggtagattcttcttgtataattgtcaaggtgccttccctgctttattttcagtgggcataccccctctgcccacctatcacccctgccagctcccccatctccaaaagtcccaaagtcactctgcttgcatccacactgcattctcctgcctttggacttttgctaaagctctattctctttcttaaatgtccttgaacatgcttctccctcttatccttgaagatccaagcctcctaagtctgccagactttgtgctgtgttataaggtacctatgccaaactgccttgagtcacgtttactcatgtatttcaatccactccccaacacctgtcccacaaaggaccaagacttgtgtctttgccctctctgtcactcattctacacaagctcagtactagggccagagtcgtacttaatgaatgcttacaaaattaagtaatggtttaactgaactaaacaactgattttagatatggggggaggggagatagacaggattagattttcaacactgatgttagtaatgaaatctctctacttactaacatgtaccccttttcacaaccctcatgaccccaaatcactgagcaaaggagtcccaatgggtcatgaagtaagaccacgtgttctggctccacttccctcctcactaaggccttctcttggccctgtgtgtgcaagtgtcagagggaaaattttatagattacaccagaataaacgtgggaaaggtcttgaatttattcttagacatttgtcagagaaaagaaggactatgcctcagatgttgtcattcttttaaagctgaatgatgaagtagtaaatccataatggaaagaattgtcaagttaaatctacaaaactgagcagggtgggtaggctataacaaaaaccactctgttgaggaggccgttgggcaggacatggccagaaacaagcgtgaacttacctagaagtggctcacacagaggacttcagcaaccagccttggtcaggtatttcgaaagcccctgtttaagtgttgagagtatattttggccttcttccccttcttctagtccatttagggattgcccgttctggatgaggttaccaaataccttcccttgaaactgaactcagggcaggggtcacagacccaaaagccagcagggacctgaccagtcttaagaagtagacctggagataagtagtgtcctagtgtaagagaagcaataggtcatggtgggaatcatggcaaactggagagtgcaagtcccatcaaaggcagtagtctccactctgttccagctgatcgctgccatgcaaggatgcaggcacagtcaccagatgctcaagaaaagccagaagtggacgtgataaaaatgtcatctgaaggtatcttctctgtatgtacgtatgaacacacacacacctgcgtgccagatgatttggtgcatgagtcataagtttttgacctttggcttgagaagacaggaggagaaaaagattccttcaagatttcttactggatgtcaatagtgggaggtagtttgattaattttctctttgaccattgctgtgatcagttaccaagaatccttcctacccttggcactaccttcggagaggctggtctgtgtgttgggtaaagttgcttttgtagagtggtgtgggaaagtgtggggagggtatggagaatgcagagaatgacctgggagagaggtatctgacatctttaataacgatcaagaactgatttttaaacctttagggcggccgggcagcagggggatttagtttctttttccttttgctctacagagttttgtattcactggattgcctggtgttgaccctaagatctattctagtcctttaaagttcagaagccctttttgatttgtttatgtgtatttttcccatgtagatttgatcactggccttctaatgctgagctaatcaacactggccaaactggaaagatataatcaagctacatgaatttgaacatgatttcatgtagattgcattttactggtaataacattaagaaagctgatttgaggagctgagccccctcttgtccctgctaggacttgagagccttgaaaataagttactgccttgatagccaactgtgtatgcaaattcctttactaatgccagctactaattatgaaaataaactcatctgtgctctataaatatctaattataataaaataggggcagtattacatttccatctcttgtctcatctgtttctcatccaccactgatttgtcctcttgacagtgaatataaaatcgctttgttttttcaagaagcctgttttccatgtattttttcttctaatgttttgaaagtctgtgggggaaaatagatttattttaaacataaaaagtaaattgcttgattttagcagctctgtgtttttggcagtgatgtctttgagacggtgcttgaaaaatatgaaaagtgtgtttttttcttgtttagaaattttgactggacaccaaagacattttttgcatggatgtttcttggagcattcaaaaaagtgttaatgtgaacagaagatttattaataaaatgtacaatgtatcagtagaacattttaattaaattccaactgacaatacataaaagaaattatttctcagattttgaaacaacatgtctgtttcctcctcctcaatgatcaatttggatttattgattacttatagattttatgtctgcgtatatatgtcataaaatactttctcctctaaggtatgaataatgatctatctgtttgtatagacctttgcttatccagttgagttagttaatcttagaagatatataattttcaactgtagatcaatatgtatacacacataaacttgactttgatagcacctacaggcaaagaatgttttgaattgtgttgtctttaagatacatctcatttgtaaagaattcgaaagagtagtctgatggaaagatacttaatgagagaacaagcaaagtgcatttccccttgtgcttaggcttgtacatgccatggtctgtttcttaggtgtgtagggcagtgtatatctgagtataggtacaatttgcacaagtacatattaataggcttatactggtgtattgtgtttttatgtgtagttgccatttgtaggtgtactgaaaataatagattccagggtgacatgtatcagaattaagcagatcctctgcttcaatattagaaaagcaatgcttatttggcattcaacaaatattgatggagagccaacgatatgctaggtgctaagtacacagaaactgagcaaacatagacccagccctctgacaccttgctcacagtcaatgggagtttgaaaatagctttcagatgtaacaaccacctttcctcaagtaaaaagccttaaatgcattgtttttaatgtatttttatatatgcagtttttaaattaatttttttattttaaagggaaattgttaggtaatcatttagtcagatcacccacgctttacattatcagaatcagaaaagaaaatgtgctttgtgtgtgaacacatagggaattttttatttgcttgtcatttatttgtttattggggatggcatacacagtgcaaagtgtataaaatgcatgctcttaagcatacagcttaaaggttttttttttttaacctgtatatacccacataaataccatccaaatcaagaaatagaatatgcccatcactataaggttccattgtgaccctttctgccattacttctttttctttattggttgatttattttttaaaaaattaccgtttatttttaataaatacatgtattttccccactcaatccaaaattgtgtttatccatgtaataatcagtaggcaggctctagattgcttaactttcattaagaaggattaaccttgtgagacacccaggcagtgtggtttttcactgtgtgtaaatagaagcaaaaatattgtcctcttgtgaggtagctttgccctgtttttgatgaagcgcaggtttccctctatacaaagagaatacctaattgatattattgagtttttctcttttttcctaaggcatttagtggtaagcagaatagcagaggtggaaaagaccatatgctttgtaaaaagccagactaataacactttttgatggatgtctgattgtaaaagtgctgcatctttcattaaaatttacatgtaaagcaagggcagaagcgatgacatgaaacctaatccaacttgcacatcttgacataataacaatcacaagaaactgcagatcccagatggcagcttggcctttgccatccttttaataagctactaactgctaattatttcactcttttgggcaagttaatttactgttgactcttaaagagatactgctctttttttcccccaacccacacaaaacagagaccttccacctggagctttgaaaagtgcttccctgcaggttggaagctttccagtcagttgtaacaacgatggcaagtattgggatgaaaaatgttgcttaataacattttcttgttttttttttatgaatatagagaatttaaaaaatttgttcgactaaagagccattgtgtgcatgtgcatgcatgtgtgtgcgtgtgtaagagcaatagatggagcagccaatgcagggagaagatctgaaatttggagcctatttaagagtgaaagaacagctgccttttaaatggttgctaattctgacaattaatgctgttctgtgagtgtgtgattttctgtgatagcagttaggagggatgatggtgtgtaatagctcatttcctaagctttatggtaatgtagcatagtcaagaccatagaactgaaagagaactgggtcccacatgctctgcagcccttttaaatgaaaccctgcaaagcctgcttttctctgtactttgacctccttaggatgattttatattttagcacagacacagattattaaacgaatgatgtgcaagtgggcttggatgcatcagaagtgagtttggaaaagaaccttgtttgcaatgagctgtctgacaatcaaaatatttacttaaagataagctaatgactatgcctcgcaaatgcctgcagatctattattgaaatgagagtcagtacattggcttgatactataaaaaataaatctcaaacctcaaatactattgtgtgtgtgtgtttgtgtgtgtgtattatacttctctccaaataaaagtctttcaagcaataaagaaatatagaaaagtctctcaacccattttcttgaaatatttgaaataaatttgttactgtaatccattgttccttgttgctggtaagaattgctaaatggcaaatatgcattgaacaacacactcttctattattagtgatatctctgaacctgaacttgataatgtgagttttgtggtccagtattttacctataatggcttgtgtgctatgaagttgatgaaaggactgtgaaactcaaatcaaatagaggctaatgcctcttgcttattaaacctagacttattaaacctatttgcgtattgactgggtaagttttaaatgttctgtttctttaaaaacaatgcattatatggtttcaaaataggcccaaggaaaaatagaaatctgggtgaatttgaggaagttttgtcatcttgtagaacctcgtattatatagcacgttcagccagattgtcatcttccaaaaaaattttgagaaacgctaataatgtttttttttttaactttttctttaggtttgggatatatgtgcagatttgttatacaggtaaattgtgtgccataggggtttggtataaattattttgtcacccaggtaataagcattgtacccgataggtagtttttccatcctctttctcctcccaccctccatcctccaccctcaagtagtccctggtgtcttgttcctgtcttggtgtccatgtgtactcaatgtttagagatgctaataatatttcaagaaaaaaaaactactgggaaaagtaagttctgaaaacatagttctaaactaagcaggtttattgactgtgggacttctcagagcctttgttatggcaatgcaaattacaaacctctgagaaggaaaatgtacatttcaaagttaccaaaatttatttgacatgaaacgcttttttatgattttcattttggatgaaaatagctagaattagaactagttagtgttcagttaaaaacactttggacagcaattttatagtagctaccaaagctaatattataaggcttaatgactctaaaatttgaaggaacttttggattggcttaactcaagtgtctttttaagtacattttctattttgattgggaatagtttttttggaagggttcgtttaaatagggaaattactgcttcctggtaaaatacacaccacagatgttaaaacaactgcaattttaaagatactagtctggttaaaacacttccagtttgtattacctgagtacttaaacagatatccatatagtgagcataaacaatacttctgagaatggctgcttaactctaggaagagctgatcttggcataacatgagaaaactgctaggaactttagtcttatttgctttcaaatttggagcaggtcaacagtcatcatggttatttctctactgtatatctaaggtcattcatcctgagagtctggttatgaatggcttttttttttttttttttttttccagacagtgaacatgtaggtgaaggaattgctttctggtaggaattacttgtttagaagtcattggctcagctaaggattttgtgggttgtcgcagtgcacagctgaggactttgtcctatttatgtgctgtctgttcagtatgaagtggcagccattgatccatctgtagtacaccatttgcctggggctatttatctggttgtggagatgtagtttgctgagccaggcatacgctcccttgtttccccaagtgaccagtaatgagtctttacaaatgccttggcccaaattgttacgagtgaggttctgcagttctaaactaattgatccatgtgacaactgaacctggaatactagatctccaggtgtgaataattctaacctagggtcagcattatggaacaaatagaacagtgagataaatgtgaggacctaattcagaatgctggggaataaaacatggtgggttagagtactgatgttagtgtttgacactcacaagctatacaaccttgttaagcttccttatcctaataagcaaaacgggagcaagaatactagacacttcacaaggctgctgagaggatctattgagacaataatattaaaggcttatggtagagcttagctaacatacataagcattagtttagttatcataaacattaacaacaaacatcagttatcataaatacattttgtcaatatcagcatcactcattaaatatgggaactttgaacatattattcaatctttttgactatctgtgtttttacctgtaaaatgcctacttggtacatttgttctggctaagaattgatacaatgcaggtgaaagtgctgtgcaaattaaaatagtgctacacagtgttaaataataagtagttcatgagactatgagcaccataaaatcagaggcagtatctgattttgttcgtcttggtatatccagtgcctgtaacattgcctgccccatcatagaaacaacttagtaaatacttgttgatgagttaagtaacttcttagcagagttctgcaacagggccagccccaagtcttcctgtgatcccattatgctttcaatagagagggtctttgggtacctccattgcaagagggaatcattagtctcttcctttagaacaagttcatccaaccccaggtctgcaggctgcacacagcccaggatggctttgaatgcaatccaacacaaattcttaaactttcttaaaacattatgagatttttgtgtgtgtgaattttttttctaagcacagcagaaatcattagccttagtgtatttcatgtgtggcctaagtcaattcttcctcttccaatgtggccaagggaagccaaaagattggacagtcctgctttagagcctgccatactaaaaatagtaatcctcataaaacctgttctttcttaggtttttgatagatgtgtctgcttttttttttgtgcacacaaagagctataggatttccttgtattacttgatggaactataggagccatgaagaaaacaaaaacatttggttgggttacttttaaaaaatgctgatttgcttcctcaaatcttagaagcatataatttcagagctcaaaggagacttagaattcctttagtcgattccactgtgattttgtggatgacagaacatgctgagagggcatgagtgatgtgtttgtcactgcacagaaaatttgtagcacaatcgggacttagaacagactttctgacttcagatgttgttttctttctcctcccaccaagttgcctctaagtcctggtcatcttcactgttgatggtatttgttatagatcattcataggctgctgagatcattgttgataatgccatataaggaagattctggaagtttcagtgtgcaaactttctaaaaaaggttatctcttaaattactagtctgcctgggaactgatacaactccagctttcaaagttgtcagtaagctgctttgaatttcagtattttatgatgctttgtaccacttacacagacttgctttgttgatggctttgtcttggctgaagtaagacggtgacaccagttgacttttaaaaagcttttatacccataactttttctttcttgctgtcccatgttgactatttataacagcgtggatgcatgttgagtgcaataaagatgagctgtgatgatattcaccagggactgatttacaaactgttgcttaatagttgtttgcacttcctttcttcctttaaaattagttgtcattttatttgtaattttttcaactaaaaagaaacattttttttttcaagtgagagtgtatttatctttaagccagtatcatttctgggttttctttttaaaaaacaattttttcggggttctaccatgtgtctgatgggttaagtttagtgcccgtccgtgaggcagccttgggggatgttgatgggtgcaggaaatcggttcttaaattgttgcaaaattgccttccttcagactgttttgatcacgagggctctcaagtgtcaaagtcatttgtagaactagatagataaaatgcatgagcactaagctttttttccaggatagaataaataagtgtgttttctactatgtgctccgcctttgatagtgatttgttaaaaggaaaaaagaaaggcaatgatattaaatatttacaagagtgatttagttctattatcctgtgcgctgcatctctgttttttatagtgaaatcagctactgtagaaataaatgccattaaaccagtggtagtgtgaaggtcaccgcctaggcaaggttagagtaatttgtggagagtaatgacttttgtcaactttccagatctcttcctgtttttagccggcttccctccaaaaattataggaaaaaaatacatttgaggattcacaggcttactgtctctcttgcatgccttatgccctttctggccaacctgatagttggaagactttcgtgcacttttttgtttgtttcgtctgtttagtggacagagacaggtctgttctccctggagatgagcagctgcattcccatttactggcttttctgttggttcttgcttgacagtttgttttggagatccagcactacttctttcttagaaatggtttatcttgtctgaaataatcctccagtttccctacttttacctctgcctttctttaaataaaggtttttttttttaacaaaactttctcgtatcagtttaaatacatttctgaatgattacatggcattatccccattttcacaggcaagaaaacagaggcccaaggttacaaagctagttacagagctagcagcagaaccaagataaactgagctttgtctgaccccaaagcctgaggtgacactactatatacgataccatcatttcaattaatttcactgaacctcagttttctcttctgtaaaatggggatgctaatatattattctaatatattctgaattcatataaatagtattacatatgatgtattataaataataagacattattttacttttggtaaaattgagaagtatataagctaacacatattaaatgcctaaaaagatgtctagctctcgttatggttttaatatattccctttcctctcgacagtaacaataaagtgtaattgaatttaacaagtattgagcacaagggatacacaaaatgggtaaaaatcagtctttgttcttgagcagctcacaatagagtaggaagaaaacccctatataatgaattccaaaagcgattcacttttttttcttttgtcttgggctttgtctgtaccaaatgccacttaaaatatgaaagcccttttctgggtgcaagtagtttgtttcctataatgttgagatagcatgttgacattgcagtggtagcgacttgtggtttgtttctctgttagtctgtgtttacttcatcctaaaatccagaagagtgggttgaaaatgggggaaaaacagggatacagggaagtagcaatgtatattactcagggcaggctaactgctatgacaattcccaaatcacagtggcttaatgctaacaaaattttctcacattccagtttgcggtgcagattggtgggtggtgaagtgggggatctctactccacacagtcattcaggcaccaagacaccttccgtcctgtagctttgtcattttctggagccttgtccttctttgcagtctactggcagaggaggagagagcgagcttggaggatttttcctaaagggccatgcctggacatagtgtgcatcatctatgattggccagaactcagtcacgtaatcccatccaattgcaaaggagattgggaaatgcaatttatctctgtgctcaggagaacaggataaggggcctggtggctacagtgacagtctctgccccagtggatgagttgtgttctgtgcttctgtgttctgatcttgtgtcatgcgtattagctttcttcagcccaccttcattcaaacaaaggtgagtatggtttctatgagatagagaatcacttctcattcatttttctattacacacatgtatgtgtattttgtgtatttttcttttccgttctttctttctttctctttctttctttctttctttctttctttctttctttctttctttctttcttccttccttccttccttccttccttccttccttccttccttcctttctctttctttctttctttcttttctttttatttttttttgagacagggtcttgctctgtcacccaggctggagtgcagtggcatgatctcagctcactgcaacctttgcctcttgggttcaagcaattcttctgcctcagcctcctgagtacctgggattacaggcgcttaccagctaatttttgtatttttagtagagaccctgttggccaggctggttttgaactcttgacctaagttgatccgcccacctcagcctcccaaagtgctgggattacaggcatgagtcactgcacccagcttgtatgtgtattttgtattaaacaaaacccttcagagttacttacattagtgtttctcaaattcgtgagaatcacccagggaacttgtgaaactatagactttagttcctgcctcagaactgtaggacctgcagctctaaattattctatgatcaggtaaatttgagacacgctgtgttacagcaaattccaaggaataaaatgaaccgaaaggaagtgtatgagactttaatagaagtattttgttgtattttaaatatttaaaacaagctgcgtttatgtataccaaatctatttgttatacgtagatttttgttgtagttcttgttttaagggatgtgacctctatcttgcatccataacccaaaagtgattgggatcttagcttgagttgatggagtggggccaaatgcctgattcaataggattttgttttattgtgatcactgggtaaaaatatctcagcattttttttcctctttatcgtctaaaaagggacacttttgattaagataattttcttgttgcattaagacaataataggagtacatgtttgataggcctgcttattttttgtgactgacttgtgaacagttaactgatggcaactcattttagtttgtagatatatcttaatctcttgtacgcatagtaaccattacctccatgatgttctgaaatgaagccccttcctgtaaagctgtgcttttttctcttgtagctagaggttggcccattgtactattggaatggatgtcagagtgtggataattctgggcttgtgatttttttctttctcctattttatctgcctctttttgtgtctttgtgagcaagtctgtgattactattgagtttttttccctaaatgccagcaattatctcacaggtggagggattaggaaagagctgagagaaatgcactgggtttagaataaaggctccccacccccactttaaatatggtgacaggagggagtgtagagttgggggcgggggtggcagacagctgtgggggtagggtggacaatttgcttctgatatttaaatccctagaaggagtaaaggaagaaattcctaaggaaagaaagaggaattaaagacctatataataagatattttggggttattgtttcagggagctggagatgcaggaagggaggggcagccacttttcttaacttgctttacctgcctctttatctgaaaggtgtttgtttgtttgtttttttcctttggtctgacaatttatttttggaggagaagggagctgggagggcctaatatatatgcccaggccaagagaattttggtgagacattccctttcttcccagcagagaatgatttatttatttgatatgtcagttaggatgctttcagctgcaaagaacagaactttcaactcaactgccttaaacaacaaagggcatttatgggctcagtttctaaaaagtccagtaactcacatgatatgaccaagacctagtgtttgtcttccccattttttggcttgactttcttggtgttggcttcatttttggcagctcctgcccatgtgattttaagatggctgatggccattcccaggatgatttggtttttggtctttgtaagtgagagagagtaacactcttccttgactgtattagtcagggttctccagggaaacaaaaccaagaggagatatatatgcacatgatgattgttatgaggaactggctcacgtgattagggaagctgagaagtcttatgatctgccgtctgcaaactggagaggaagccagtggtatagtttcagtgtgagccctaaagcctgagaaccgatggtgtcaatcccagtctgagggcaggagaagactgatgtcccagtgtaagcaacaaggcagagaaagcatattcccctttccatagcttttttgttatagtcaggtcctcagtggattagatcaggagtctccaacccccaggctgtggaccagtggtggttcatgacctgttgggaaccaggccgcacagcaagaggtgagtggcaggcgagtgagcattatcgcctaagttccgcctcctgtcagatcagtggcaacattagattctcataggagtgcaaaccttattgggaacagtgtatgcgagggatccaggttgtgtgttccttataagaatctgactaatgcctgatgatctgaggtggaacagtttcatcctaaaactatcatctcctcccctcttctgctttccccctgccactccatctgtggaaaaagtatcttccatgaaattggtccctagtgccaaagaggttgaggacttctggattagatgatgcttgcccacattggggagggcaatttgcttcactcagttcactgattctaatgcgaatcccatttagaaataccttcccagacacactcagaacaatgtttaatcagagtactgggactcagttaagttgacacgtaaaattacacttcacaagtctaccccttttcaactcgacactcatctatatctccttaaatgatacttaatctataaataaagataaaaagatcataatttcacctaacgtgatacacctatcctgagtataattgaaaatgcactaaagagttggttttcctcctacagtatattggatttagggggaggctggatatttgactccaaattttgggaatagggaaatggatattgagttgcaaatgccagctctaccttgatagaataactttcaaaatatgaaaccaaacccaactaggttcttaataaggacttgggaaatttgggggtgtatatttttcatccttactatctggctgtgaaatcatcctatttccatgagaaggggatgtcaaagagggagcttgtgtgccagcataggtaacatttggaagcagagaggtgaaaggggaaggccattggtatcctagcatctgtggaatcagggactcagcatcttaggatcttagttcattgacatgaaaagaggcagggaaatgtctgtgggaatggagtgaatgccaggcccaactttcttaagtggaaactgctctgatggcatcctttccttctgccttgatctcaggcctccacttaggtcacctgacatggattgctattgatggatagctgactgaggcagccctctagtctcaagtgtgtttttaacagagtggctctcagtaaatacctgtttctcaaatgcctcacctcattcacagagtctttctttttagctgctgctcaatcagctgctatttcttagcacactgacctaatttccaaccacacatttcatctaggattttgaggcagcaacatcccccccgattcccccaatgtcactgcgggtgttagctctaccttgacttgtggccacagttcttattacctgccttagccgtcagtataacaaggggcagccagtgtggcaggtagaacagaatgagttccctagggtgcaacaactggaaggatgtggttatcaggttcttcaaaccaaataccatgagagcaaaggcccttcttgaaagggctgctgcctcttagcaccaaggttgcatttgaccttctcaaactgctttctaggccagtgtgtctcacaatctaatgtgcacccgaatcatctggacatcttgttatacgcaggttctgcgtggggagggttgaggtggagcctaagattctgcatttttaacaaactcccaagggatgtccatgatgttgctggtatgtggaccattctttggagggacaagtctttgaggccatcactttgaatgatcttgcaagtgagggcatctgcttctttctctctaataagtcagaatgcaaagatccaaaggaggagaacagcactccttggaagtagatgggagagctgggactcagattcttaggaattagttgttatcttcaggcaaccacgcaagtgcctgctgaaactcaagccttctcatcccccttggataatagaagtggggcgtcagtctgcctctgtctccgtgtctgtatgggaaacatggaggtcatggcatatatgacaagtgcacatgtgctgttccattcccacaaggagagaaacatggggagtagcctataattctgtgtctaccagactcctcttcatgctcctaaaaaggcctgtttctgtaacaaatcatcaccatgaggacacatttctgggggcctacatgattcacagactgcccattgtaagttgcttgtaattatcaataggaaactcatgtgacccgtgagccccaagtcccacccccttgcccaaatttatcagggcttgccttacacactggtggttgctatgggcttgggtgactcccaacagcgatgacaatatacattctcagtaacctggagctggcactgaggctgcagccctggacatggggtgtcctctgggtataatctcacttaactttactctgcaaatgcaatgttggtcttgccatccctgtgttgtgttcagtcttgtttgatctcactctccctgttacccatctgtataatcccctgggaagaatgagatctaaacaaaaacaaaggagaaaatgcttaagaaatataatctgactgtctaacaaagcagatagttaagtctctggtggactcctttgttttatttggactagagggaggaagaaaaaagcttgggactgctgctggaggaacagaagtgcattaggaggctcatatttcacaactggttgccagtgtctatattggctgatggctctggtttccagctggcggtggccttggttgaaacatttacctggtgtcttcagggatgctgtatcaacagctgtaagtagagctagttattcagtctgctctgagaaaggttaaagtgtgtgtctttggcttccccagggactaatccagtaacaggagagtcagagagaacacgtaccacttgggagggggtttcttcaccgggattttcgttgttattttagttacaaatggaagcatttaaaacctaaatctgtatttaggcagtgagaggagaaacagggacggaaatgaattatttatttcatcactggggtcctggaagcgtggagtgggcgttaatctcctttgaacaggagcctctgggtcgggcttgaggtcgtctgtgtgagatctgaccttatctgctcctggccagacatctcggctttgaggaaattgacttgagaatactccaaataaaccctttaccttgttgttcagaaggatgtgaatatttacctagcatatagtcagaggaatcgaaagtgcttgtgtctgtgatttcttttaatcccattatttcccagtagatctgacgggagacctagaagcaagggaggagtgcctcacgctggtggtcaactgggagttgggggtaccgtgtggctttcctgtgtgttgtgctcaaggaatgtgtatctgcacatttatccagtgagagagctgcttttgttcccatttcactgatgaggaaatcgaggtttaaagagattcagcatctcacctaagatcacccagccctggctgggtgcggtggctcatgcctgtaatcccagaactttgggaggccgaggtgggtggatcacaaggtcaggagatcaagaccatcctgcccaacatggtgaaaccccgtctctactaaaaatgcaaaaattacctgggtgaggtggcgcatgcctgtaatcccagctactcaggaggctgaggcacgagaatcacttgaacccagcaggtggaggttgcagtgagccgagatcgcaccactgcactccagtctggtgactgagcgagacttcatttcaaaaaaaaaagaaaaaagaaaaagaaaaaagatcacccagccctaaattatccctgctgggattgctgggattcaagtccagggtgctcttcataaccccatcttgagctctttccagtgtctcgtgcatgctgctactttccatctgccccaaggcagcatatctaataaaaacattgaaaaactttcccaaggccaggaagggagaagtaaatgggtcaggggttacaatcactggtaaagacagaacaaaacccatcttcataaagaacagtgatttgcccttttaccctctcctgtcctatttctgtttttttctggattcataaatatttgtatgtgaatactcttgtatgtgtataccctctctttcctttcgtcttctctgctctttagagggcacaatgagtagttgtcattgttttttaaaggttcctgcaaggctctctgttggatttagtttattcttgctaaaacatttctgagacagctgttgaaagcaactggtgctttgtacatttctgtcttcagtcatcaaggtggggttcttggttccatggtagagagaaggaagggttgggtgtacttcttcctttcacagttttgaagtttcaaggtccctaaaccgagtcaaaagaggtatgtgtttgaaaatgctttatgcctccaaggtctcataggcttcaaaacattgctggtttccccttccagatccattgcttgagtgtctgttgtgtgctgggcgtcggagattcagagaccatgttccttgataaccagcaattaccttctgaatgttacctgagtgcagatgaggaaggtctctgaaagcatacagggcgggggcttccaatacacactccctactttggactgttcaccactttgaataaaactaggatcacactcccattccttccaaaattcttactcctttctaccgcactaccctcaatctgcataccagccctttttttttaatcagctcttaaattttactctaatccaagccaaaaaattttattgagccttcatgggttattaggggcagggggattgcataaatgaaataagccaaaccctcagcttctgaatctttacaatcctttggggaagatgcctgtcaaatatgtaattgggaaagccacagatgttaggaaaaggggcaaagtgtactagggaagttgagtaaggaggttgcactccctggctattcggaaaggggtgatcattcctcctggactctagtttgaacatcctttgccttgctcttgctactccatgaaaatgcgctctggagtccaagacctccaatagtagtattgtgtaatgttgtagccttatttaatgtctctttgttttctgattgtctctgtcatgttgcttgccgtgatataccaccttctgtggggctgcagacaaataaatcctccctcaactctgtgctccatgtgtcactctcccaatgaaaagacttttgatggctgcccccattccctagaagataaagttcaagctccttagcctggcattcggtacttcacagtttggctaacctcagctcccatcccacttgctgaaaccttggctagaaccccaccctgctaatccatgatgcttcactatcccaggtgccgtcttatctctgctcgtgcttgcccatttatcagggacatttctcccatttgtagccatatcttgaagtttaatttgagcctcacacactctgtgacactttgcctggccacctcaactccttagaatgtcgtgctgctttctagctgcaccatgcattagctatcttccccgcactatgcctttctgcaatgtgtgtcaccttcgtgtctccccaaccagtctgaaatgaggctgggcaccttatttcttactccttatggccaccataatgcctctacaaataaaggcttgatgttataggagaggagattgactgtatctgattaactagtatttcacagggtttaacacaatgcttgggtgggggataaataggaaaagaacttgaagatttaaagtgaatttaaaattgtatatatcttcccaaatatcaacctacgaacatgataaaagtattactttcatttttgtgggggatgaggtaccgtggtatgggctacagaaattgagattggggcagaggaggaacagtaacacagaaggaggtgagttgggaaagaatgaagagagacctaaaatcaaagtgccctgtgtgtggattgagaagccctggatttaagtcctaactctgcatttctgactgcatagcttgggtaagacgcagcacacctggagcctcatctgttgaagggggatttaacccctgccgtgcctgccccaggtttgttgggaaattaaatgtgtgcagtttgtaaactgtaaagtgtactgtgaatggaagggagtggtgttactataaacagcatcatcatttatcagctaaatcctccctgagccatactgtggcaggggaatagatcgatggataggtctgctgtgacaggcaggaaaagaccagactggagggagcctgtggtcagatcctgtaggccctcccatctgtacgaatattctcatgccaaggaagtgcttccctaggccttgtgaataaagataaggtgcataggtcctaaccttacctgtgacaggtacaagtgggagcccagtcccaggatcctgatggtcagatatcaggttttggggtataaatatgaacacaggaactagcaggagaggtgggttgtggttctagatctgtacttaccagccatgagcagtttctccaaatgtagtattattaatacaatgagtgccaaggatggagtgcttcatggccattatctcacttcatccttgcaacaacactatgagctgggtgtatagcaatatgtgttattatcctcctactacagacaggagaacagggtcagggattgagactagcccaaggtaactagctaatgagaaacccgagctgggattggaacccaggcctgagctcttaaccactatgctctgcagccttcaacctcttggagcctgtcttttcatctgtattatggggataaacccgcttaccacatggggtatgaggatctgatgagagaatggacatggaaggactgtgcacactgcaaagtgtctatggtacattcactgagcacctactgcatacctggcattgctgtgggtactaggacatagtggagcataggacagctgagacacctgctcacaatgagatgtgttctacccatgatctgttaacagaggaagctgtcagaaagtgggaagaaaaaaatgcagtgatctgagagtgtttttgttttcaaaaaggaagaagtcctgttaattgccagtcattgccctttaagtctaccttcattcattctgaagtataaataacaaaaccaaattaagagattacgcaatgtgggaaatttacagagacagttaaacagagaaaagcaaagagagtgcattaataaaaggacaaatcatgtcaggacattctgatcactacagaaaagcaaatcacagttctagaaggtgagaagtatgcagtggatgtaatatatctggattttagtaaaatcacttgatggagaaatggcctgaaatcttgcctgagaaattaattcaagctggccaggggggaagccatgtcactcagaatgagaactggctgggagatgggagtgaaggttgtgatgacaaatggccttagctttcggggtgtgatagggtcaggtgagaagacccaatttggccatcatcacttaatgatctggaagaacaactaaactcctggtactgacattcatacgtgatgctaaattgggaggtgtcatggcgatggcttgtggaaggaagcatagtataagaggtcagcagtcaaggacaggaggccgaggcaggtaggaacaatgcgggagagtacaggcaaggacaaatggagggaatttccttgaggacaatctgcaaacattaaaaaatttgcaaatatataaaaattagcatcaggacaggaatgagacaaaggtccaaggccgtccaaggatttatccttccataatttgaactgaacgtgaggaatggacaggggttatgtttcggggtgtgggaaggcacctgagccatggtggtccttatagccacagtgttgcataggactatcccttcctctctcttcagtgtgatagggtcagaggcagaagtactctgcctttcacagtgtcacagattgcttgaatgaatgtacactgtgcacatttgcattctgcctctactactgaatctgtaaaatgggagaataatagtccttactttgggaattttatgaggaatagacaaatgtgataccctaacaccatgcctcatatatggtaagtgcttgatagatgttatctattattatcgttatttttatcattatcatcattgccctgtgtgcccagtctgtacctgatggaatggcctttctcattcaagtaggggaagaaacatccagagaacagtttgaaaaaaagcatagggtgtaaaaaaaaagcctagggtcaggggatctagattctttcccaagctctgctatagctgaccttgaatgagttgtttcatctctctgcccctgtttccatttgtacaaacatctggggcttgacctggtgatctctgaggtcccttctagctggaaaagtttgcaaatctatacaaatatgcaaagtgagttgagctttgtattattcaagttgtcatttttgagggatatcttctaacacatctcactctatagacttattctttacccagcaattgccatcctggagagggtgacaaacttgtatacttttagcactgaaagccccgtcttccagaaacccccttagtcctgggcaaaccaggatgattggttagcctgcccataggataactgctagcctgttggaatgttgcatggaagtctaaatacacatctgcaagaatgcaggagttttactgagctcaggggagccatccctagaaagccacccaacattttttatggggagtagagtgatcaaagttggggaagtgtgtgcattggaggtgccagagacacgagtacctatagaatgatatctgtggccatacctcatctctacactgacccagtcccactcagggttcttttggctgcttgcagccttaacatgtgctgagaggagagtcatgagtctgagaagggcaccatttcacaggataagtaaatgtgaagttactctgtgaaaagaatgagctgaaacaaggagttggttatgttttccacagctccatctggaataacatgttccgttttggattcctcagggaccagaaaggtgacaggttgaagggactgtgagggagtcacgcatgtgattgacaatgtagaggaagtaattgaagggaaaaaaagaaaagaacaaaaggtatacatcgtggtggggtgcacatgtttgtgcagggaaagagaagttaactaggacatccaggagcagaagtaagatgaagcgtggtgttcacagagcaatggaggttgaggcaaaattcgctctgaagttacacatttaattctgcaaatatttatttagcagctacttactctgtgctatgatctgttctaggtgtggggaacacataaagatgattactgccctttctttgttctagtggaggagacatgcagtgtgtgtaattgtgaacagaatggatctgaattcgaatccagttagtctgcttactcacacaactcactgtgttgccttgagtgagttacaaaaaaaaaaaaaaaaatctctctgttcctgagtttcctcatctgtagaatggacataatcatagtactgcctgttatggttgtgaggattaaactagtttatgtattttaagtacttacaagaatacttggcacatgatccatgttactaatattattattaagtgaactaatgcattcaaagtgctcagtgcaagactcaataaatgttagatattattagttattgttaatggtatatcgaaatgaggcataatagaaccatgtttgaagtgcaaaggcaacaaagacaaggcaaaatcacttggggtcggggaaagaattaatatcacagaaacctactgtcaacctaaaggtgatatttgaatggggataggaaggatcagtagagctttgcctgctgggaagaaagggaatcctaggtgaagcaaacaacatgaacactggctcatctcctgaggttgtagctggcaatttgatcttttattttttagcttcttaggagctttttgtagcaattcctgctgcatttgctgatgaatacagcaccaaagacagtaagttatttaccctacttattatttatagctcaaactccaggcttgaactcaacgcattactttatggtacttcaactataagggatttttgttgttgtttggcagacgcattgactgattcatttattcactcattcagcaaatatttatggaatgcctattatccgcctactgctcttgtagatactgggcatatagcagtgagccaagaaactgctgctctcatggagcttccatttcagaggaggaggcaggcatcaaaagaagaagtatatactacatcaggcggtgataaatgctacaaagaaagataacaggagtgggagcctccctcacagaactgaaaacatgcactcagcctaggcctgggctcaggatctggaggtgctaaaggaggatccaggggaatgtagagcagttggaggtccagccgctgcttcatgtcagtgaggtgaatcagcacatcagcaacaatgtgtatgggctgcaaaatggctagtgcttttcctctatcctccaaattgcccaagagtcttccttaaggccctctctaagcagaaacattcaagaaagagaattctgggaaacgtagttcagcctagccaagttgacacataacaaagccgacacacaggggatggggtgggtggaggctcctaagactcatcttgctctaaatcatagctctctacagggaaggcttctgtgagttaaaatcccaattgttcctaggcagtctaggaaaaaataattctcatgagacgtttttgactgttcgctcaatagacgatgactctccagttaaagctatttctcagggtaagcttcttttgattttccagcaactactcaagtacccagatggtaactaataggagatttgattcatgttccctggggtggaagatgttgagttgcatcaatcatcattaaccacagcatcatattcaactatttgacgcaatagaattcaattgacataattattccatgtaatagaactaaaaaatgaaacaagagcttgtctctgggaaataaaaaaagctaatgcaaacgtaaagacaactatccaattgaatttgatcatttatttagtcactcatttcacaagtatttgtgttcaacataggcacattaatgggctaagcatggaggtgatgcataaatatccacaccagtccttcttgatatcaagaattttccagatatgtaattttaatccagcttaagagctagggatggagatgctacaagaggaagtgtgtaagtctctctgggcaaagaaggaaaggctttgagataatttcttacctgcatataagatgatatccccactttcaaagaacttaaaatctagttgaggattgacatgtatacatggcaaggtactatcttacaactgcaaacctaggctgctgaggaagtgcagcaggcatttggggtaggggtggggacaggattctgccacatggtctccatcacagctttaaaaaaaccagatctttttgtgttcattccagaagctgcacagtttctagagacttgtcttttcacaggaaatatcctactcagaaatagtgtatttggcaggggactattctcctgcaatctttgcctttgtctacagcatgttaaaatgagagagcttctgattcataggagttataaaaataatatagtaattacaaagttcactttcgtgactcactttgctctaaattctggcactctacagggaaaccttctctgagttaaaatcccacttgctgtttctagtttgaaagtgtcaatgggtccacaattttgaggttgaatcattctgcaacacgagggcttgagggggaagcttggggacctgaagaatgacagttttcagtgtttgtatatgtctctttaaaaaagtaggaaataaattggctgatttgtcatgattacatcatgtgtaatacttgatcacagagtaccttgttttggatttgtatttatttttctccctcctgctcctatctaattgccctctccagaatgaaggcttccactgccttttggcttcattaacagctttcattttcattaagagctttgcgctaatggactgttataaaatgcacagttgtttcttgcagtcactgccaaatgcctcccattctactgacagttttgtgcattaggccaaaaagaagggggaaaaatccagtaggaattaatatccaaggagaagatataactacctctgtccttgaggttttttggggaagttgggatcagcacctggaagcccatgactgttttctctctgctctttaaatgtttcttgattcgacaaatgaaagaagacaataggaagctcatttttctcataatattttggaatttgagggttgttgagaattagacttacagaggcttcacaagaaggaacactgatagtgattagatttcatcaacctggctccaattacacatacaatggttattattgcagttacgagcatcaaaacagcagatgctcccagggtaatacttggtgtaccgtccaccatatgcaatggaaggctcagtattgatgtatggttgcagagtttgatttctttatacggtagggtggtttctgtactcctagtgacacagttaaacagagaatattttaaaatcttaggaatttaaagaagcttagagataattaatccaatctcctcaccctttcattttcttgaaacagagagagcttgaggaatgggtaagtgtgacctagatgtcagctgcagtcaccttgaccctaagagatttggctaagcttgacaggagtccccacaatgtgccttatgagttaaactctgcactcccacccccattctctttcctgttctctccttctggtgtttttttcctccagaacactaagaaaattcttcctctcatttcacatggaaggagcccacctaatttaggtgggcttggtacactgttcttccactctaacgcctttcccaaacaaatttaaatctttctcagacaattagtagggaaaaaattactccatcatattacattaatctcagagctaatctaaaactcaggttttaaatttttgattccatgctgtttctacaatataatgtatttccttgaaataaggtatgccatagtgctgaaagccattgccatgtatgatatacttgggttttttgaatttgtccagtcttttccactttgtaggaaggttctaagattagccaaccccttaatgggctgatatctagaatcaagacttaaagtttttatattaactaattaaaatctttgtaattatacacttatgtaattgatatggatgttaatataacctcattaatatctttgcaaacgaactgatagtatatacaaatttactagcagtttttcattactctgtaagtacatacctgttgccccttattaaataaaatatatcagtacatttcctaacatttcccagttttatgttcttgtatatttgaaacattggagtcagaatctgtttgcctttgtgtttgagcatgcaaattttaaagggtcagggctctagttcttagattttatgcaggatattttgctcatcatgagtctataatgtcaaataataaccacaaggatttacaaagcccagtttgagaaaggtcaccaaaatatatgagttgacttttagagctgatactctaggcttgaaatgaggatgattaaatcttaaaccttcactaaagtttggaagagcctggctggatttgagttttaaagaccgaggcatgattagccttctttttctatcatacccttctcccagtttagctactgagcactgtctttaaaagtactgttgttttaataaaaaaaggaacaaaagtattacctcatcagcatttaaaacatgaaaaaatgggatggagaaaagacatgagatgaaaagactagtttgaaaatgttccaagatcccaagatgcaaacatgcaaagcatcatgggggcagagaacgtggccgcatgaggtagctccaatctcagcaacataaaaaggcagagtgtttaccaaatctttgaaacagctttattcccagaaaggaccaattatagttgaatataatccagaaaattgtgattgaaggctacttcctggaacaggtagcctgagagttccaggatgtgtgagttgaggaggaaatgctgttcacttccaaagaaatgactggtgagtagaaggcatctgaaggacaatgactgacatcctaaagactggggagtgtgcagagggtaagctgttatcatttgatgtattggaatgagagtgcttgattactcaatataaaaatagttttgtcctgagatctggaatttcactctgctgcatcaatatacagttttacgggcaaccttaaaacaaggaccatgtaattatggccagccaggccaattagagagaaaaccatgaaacagctgggtgttaactatctctggaggttgatgttgagaaaaaaccatgaacttcagagctcagtagacttgagattagggctctgcctctatccttatcaactgtgtgactttgggcaagtcatttaacctctctgaacctcagtttcctcttctaaaaagggagtaataatgaagacctcatcatggtgttttcaaagtaaattaattggcatacataaagcagatagtggaatacctggcataaggcaaaccctcgataaatatcttttcccttatctcccttcaattcttttcttcctccccatcattgttgccctctttgcctttggcccctatcttttaccatattttcttttcttcttctttttttttttttttttgatggagtcttgctctgttgcccaggctggagtgcagtggcatgatctcagctcactgcaacctctgcctcccggtttcaagcaattctcctgcctcagcctcctgagtagctgggattacaggtgtgcgctaccgcacctggctaatttttgtatttttagtagagatggggtttcaccatgttggccaggctcgtttcgaattcctgaccttgtgatctgcctgccttggcctcccaaagtgttgggattacaggagtgagccgctgcacccagcctgtaccatattttcttagagctgtcacactgcccccttccatggaactggctgataaaggctttaagtgtcatctaacccaagtgtacttcctatactgtaatcttttaaaggcaactttgaacaatttaaaaattattgtgacttaaaggaatcgatatctaatgatagaattctagttcctggcttactggtatgggagacagttttgtctggggccagtcccatcttggtatcacactttgtaattttctgagcatttgaccttttcttcatgtggtctttgtcaacctacttgtaaggccagcctgcctataaaatggaggactctccaggaccactttaatcggaggtcagaataatttacagttactgtgccagtggtttgtgtgcaatgagatcgtgcatagcttcattagtgagtttactgtgctgggcctttccaaagattgtgtttcttgatttggtccctggataaatttgcaagtgctaatctagttgttgctggagagcatccaaacctaaggcagaactcttgctccttggattgttaggcattagattggcagggtcttggactctggtaaattctgcaggcctaagggagactggtcatccagccaggtgtagggtaaaggaattattgggaaatatacagtaagggaggcctgtgaggtcagtaccttgagggatttgtgctgtgacttccaagtccaaattcaacagagatttagtgcgtgcctactgtgtgccagacaccattctaggaattgaggatgtatcagagaataagatgaacaaaaatattcctgcctttgtcggtcttatattctactgggagagtagggtagagaagtacacacataaagaaaaatcacaataaatacactagctagatacatagatagatgctggtaggtgatatgtgctatagtagaaacaaaatagatccgagaaagggggatttggaatgtgggtgagagatggaaaacaatttcctataaggcagttagagagacctcactgaggatatgatatttggatatttgaatgatgatgacatagggagggacctacagattaggaattagagtgggaagtggttgaggtgtgtgtggggggcatattttataagcctttgatggcttctgtgaggactctggtttctactctgagagaatggggagtcaacagagggttctgtgtagagaatctctcttgtattttaatagtatccctctggctgcagcagggccatttgggaggctcctgccgtaatccaggtgagagattgaggaggtgggtgttgggctagagtggctgcagtggacggcgtgagagtggttctattccagttttgtttggaaggtagagccagcagtatttgctgctggattgaatatgggtgtgagaagagagggatcagtgagaactccaaggtatttatcctaagcagcaggaaggaaggtattgcctttcagcaagatggggaagactggaggaggagacaatttacagggaaagggcaagagtctagcttagtcatattatatctgagatgccagatttgggtttgctaaccaagaggagatattgaggaagcggttgggtttgagcttacagttcaggggagagggtcaggctggagatatacacttgagggtcaccagcatacagacggtgattaaagccagggcactttccagaatcacttctttcctgtgagagtttcctaactttgtgtcagaactcatattccctaagggtggattcagatcaagcttctagccataggtcccttccacttgcttctccatctatctgaggttcatacctggatgggttccattgtcttcccatggaagacgggagggctcctccccgaggatgatacaagatgatcccctgggatgtaggatgaacacgtcagaatctctgtctttgatctcgtctgaagttgtgtgtgtgcgtgtttgttttttaaagtgcttaatatgtgtttatattttataaattatttgttcattgagaatgtgtatttaaaaacttcttactagcaaagtgggagatttgagaagtttacgtaccacagtctgaatgaagaggagagggaaactttgttaattctggacctctcagtggggatgggtagtaattagggagtcctatttctttgtccctgttggagtaagagggacactgagcttacctattgtagaaaagctgcctttttaatgattctgtaaacacttattgaaacacctactagggctggacggagcagtggaaatttttgccaacattatatcctcagagcaaccccaggagtttggaccagagaatcgctctccatgaaggaaacaggaatggggaggtggattgaaggtgggtacaggggatacccctcacttcataaatgaggggaggcgtcatcccaggctctcaccccaaggccactcttctctagtttcaagcccacccttaccccatgaattcctgatttgagatgttcaacttctttccctctaaatcccttttgagtttcagaaaacattctcctgaagtctgcacttgagatgataaaaataattgggcaatgttaagtggtgggcagtggctcccttgggaggaaaaaggctgttgcattattttcccttttttctctcccttttaagacttttataggaaaacctcaagttttacccattgtctgtggccctctggcactctgtcagctcttttaaatcatcagttatcttttcatatgttgatctcttatttctcaaggtagattgtaaaagccttgagggccaggactctgcccaagctgagccaggctccctttctgtcactctcccctatcttggtgccttgcacctggcaggtgtttagtaatgactgattgattgattgatattaatgtataatatattaattactagtatcattagttcaaaagctttgattatgagtaaaataaagtagacacattaattcagcagttcccaatagccagcagctgaaaggaaggcagctgtggcctgattccttcctcccacctgcctttagtttgctgagcataaaggggaagtgttgtctgcagctcttggaggtctactgaggtctctgagtcatgacaaaaatgacttcagagaccgaagcactctctgcatgaaaagccctgtctccagctccatgaaatgtaaatctgggaactgctggggaaggcacaggcagtcaggtgaggctaatgggaaaagcctgagtctagagagagcatcgctaaggtaaccagaaccctaactctgaaggttttgcctgggttcacaaaagccttccagctttccattttaaaaaggaactccacaaagtagactcaggaaaatgtgctttggagctgtggtcttcaaaatccagagctcctcagaatcactggagaagcaagttaaactcagattcctgggtccctcctccccacccccatagagtatgattcaataggtttggagttgtggccaggtatctgcacttaaaacggaagttcatttatttgtttttgggtgtaagtggttctagagaccacgctttaaagaattcctgtatttgacttggagttgcagtgaggctgggacctgggttcttggaattggtctgattatctttaatgtgttaataatctctttgccagtagctgcattttcttatgcgtccttggtcctgagttgactcgaagctgtgcctctcttcccaggcctgagtttgaactggtattttagaaggaagaaaggagacaaactcattatttagcaagtgtgtaccgagcatctgctttgctcctggcagtgttctaggtacttgggatgaacaggggattaaggtcaagaccctgctctcatggagctgcttctattctaggaggctcctgggtttatatttatggtcgagaagggactccttctctgaaactgagcaagtatatactccacaggtcttaagtggacatcctctgctcattgtttgatagatgaggagagtaagtgcctctagaggttgagtgactcatctgagatgattgttagtaacagaggtgcaatgggtggggtgtcttttcagctcccagcatgttcaaagggtcagtatccacatatgaccacccccagggttccctcttatctgctctcctatgagaacagttttggggaagatggctaggggacagcatcctgttgtgatgcaattcattggactgggacaatgactttctgctaggctctaagccaggtcattgaatcctatgggtctctgttgctccttgtgcaaattttggtagactttggatcatctgtatgtttatagcacaggtcctctctgattttctagaatttctaattttttagaattttctagaatttagtctaagcccctttctattttttttgtattttctagaattcagtgcccagacttttttctgagcacgcctggtgtctgcctcagtggtgtcttaaggtgcgaaataataactagcagtaatttcacttactgggggaggcagcaggcatgccttcacagtaatggacatgtatggaggtggagagcaaagagccaaatggaagagggaggtgcagtttccctgactgtacagagggaattacatgacctccctgcctttaaccttgagctcagggataccacttattttcacaccatccaaattctagcattctggagcaaagagctgctcacttatcctagttatgggttttactgggttgtaggtaccagggataattagtgaaggtggcaatgggggttatgagagaaaaggaaggtaatgggaacggcagggacagaaaggaagggaaaacagctaaccagctttggggatgataaagtaaatgctcacctaggcttagggacagcctcctgcctccatcacagtgagggaacaagggagtctttaagatattggtggctatgtgcctgtgcatagggcttgctctggggtttcaaaggctgtctcaccctgtgtgttaggcagagcactggatattttctctaagcactgaaggtctaaatgaaatttagctttctcaaacatcctaattatttctacattcctaaagctctgagaaggccgtatatatagtactgatattgttctcccaggtggttggcgacatgatttttaaacttcctttgtttggaggaaccagagatgaacagatgaatctggaatgtttggggcagcaatgaagtatatagttgggtggactcacagtcaaaaagtctaagatcctgagggtcatgactgactcagcttaggctgtcatggcactgagtgacttcagagtacccagtgggaaggtgggctggaggtacatggatggggggatggagaatggggtgtgagtattgtgtatttctctcttccctttggtgtttaggttgttattgctaggagtgagccaggtctttctgtcctcaaagactaaattattcccagaagagtaaatgccatccacagacatattggtgacttccaccagggctgcccttgatgctgtatctctgtaacatttccctcaaagcaacaccatctgacatggtagccattagccacatgtgactacatttcaaatgatgaaaatgaaaaaaacaaaattcacttccccagtctcactagtttaacgtgtggccagtaactaatgtgatggacagtgcagaatggtagaacatctccatcactgaagaaattcctattgaacagagcagtcttaaagtcctttctagtccaagggtctagagcccctttgggcctgtgtttgctggtgggggaatggggactcttccttatcaatgagccctgtagttgtcccatagcaagccacctgatggatagcctagaagtggaaatgacagaaagggcagaggttggtgcagactagctaggtttccaaaagtagataaaataaactacagtgcaagtgggacaaccgacccactcagatgcttggggacaggggaagtatatcagttatttattgctgcacaacgaagtgatggcttataacaacaatttatttttcgtgattcagtgggttgactcagaagtttaccccaagttagactgaaaaagaaatgagagcagaatccaggaccacaaaaattaggctttggtacttttaggtgaaaattttggacttaacactttaacacttgaaagggcctcttcattgtggtttcattcaccttatttagaaatgaggaaatccagtttctgagaggttgtgtgacttgcccaaggtggtggaggtggttaggctgagcctcggatctaggctcctgactttgaattattggctttttgtattggaccaaactacctctcaacaaaaggggaatattatggcctcattgggtctgcagtcctctgtggtcaaacaagttgctcttcttacctgagaaggacagataagggcaaatagactatttgcctaggggctggctgctcccactaaaccttgtgacaccttagttggagaagctgaaggaaagaggtaaatattatttgttgaatctttaccacacgtgaggcactttgccaggccttttaaatatattttcgcatgggagcaggcattattttttcattttaactgatgaagaaactgaagcacagaaatgtttagaatcttgctcaaagtctcaaagctagtaagcagatgggttataaatctaggtccatgctactctagagcctgatgtccacatcattccatagctctgtgacaaacagacacaggcccttagagaggaggtgcacatatagcattgactgtgtctggtggtgtgtttgggaagggtgtcagcagagcctgggtcacccttccttagacataggattattctagccataagtgtgaggagaaaaaatagctttgaggtaaggtggtcaaataggactgctgatttctttggaatccaactgcttgagtcaagaagggattgcctttttgaaattgctggcagacaggagctcccagctaatccctcctctgtacacatgtggacccttaagatgagttccttggatgctaggattccagatagaagtaaatatctttaggcagccatgttgaccccagaaattagtgccagggactttcttaaagaggattctaagattttctggaattcctgaagaaaagtagatgaggagcactgagaagaagaagtacgtctcaggtcacccagttaaatttgaatttcagtgctccttctccttttcagtgacacaaagggagacagaaagagagatattagactctcccttttaatccagaatcttcggtaactggaagacaagttgtagtctaccaacagctgaaattcatggaggcaagaatgagtgagaagatagcaaaaaagaaagctgttcatggcttagaaagcaggtctcatccaatggactgtacgggtttctgggagagaatcatgccttggaaatatccgttcatcaaaagcatagtttgcatctgcaagcccgaagggaaactgagaaaaccagccaccaacttggcaggcaacagaattgtctcctccaagatagtgagtggaggagagaaggctgccttttcccaagaggaccagtccagcccttgttaggccatctccgaagatgtatgtttcctttaccaggtgtagccttacaggaagggactctttggagtgaagccaagtgtctactttgggacaggggaagtatatcagttatttattgctgcataacagatggcttataactacaattatttttcatgattcagtgggttgactcagaagtttgccccaggtctattgctggggtcacttatgcagctgcattcatctggcagataggctgggtttcatcaaggtctctctcacacatccagggccttagtgttgactggaggctgagacccttggttctcctccatgtggcttctcgtcttccagggtctcttcttgcggctcctcaaaccagaaagatggcctgggtttcctgatagcatgttggctgggttctaaaagaatgaaaatagaaattgttaggcttcttcagggcaagacctgtaactgacacagcatcacttaagcccacttctgttggtcaaagcaagtctaaaggcccagccagattcatggagaggagaaatagatgatatctcttgatttgatgggtggtgtgattggcagccacattcgaaggcaaactgttataggaagtaagtacttttatacctgcttagcccaaataaacgatagcaagctttccctttggtagggttgcattatttagcaaataaaaatataggacactcggttaaatgtgaatttcagataaataatgagtcagttttttattataagtatattccatgaaatgtttggaacatgcttgtagtaaaaaagtatttgttttttattagagattcacatttaactggacagtttgtattttattttgcaactttggtaatagtggctttccgagggtgagattctcatgagggcataagtgggtgttttggggggaattggtccccagaatttgtagtccaagacatgggtaatttgaaaaagcctcctagggcaatgcttttcagactctcatgtgtgcaggaatcacctggagattctggtttagaagtttggggtagggcccaagattttccctttctaacaagctcccaggtgatgcccatgctggtccatggaatacaatatgagtaacaagaagctaggtctgtaaaggcccagataggaaatatttttggctttgtgggctgtagagcctcctttgcaactactcagctggtgttttatcaggaaagcagccatagacaatatgtaaaaaatgagcgtgactgtgttccagtgaaattttatttccaaaagttgagagtggataggatttggcctgtggctggctgtcatttgctgaccctgagttaggtgattctcatgtgctcccttctgtaaagataatctctggtgcaaggaagggaaggcttgtactagaagtctacgatttcaggagttcagaaaggattgcactaaatcccttactgccaaacacagatttctctctgctcgtaattattcagatcttcaactaatatttggttctctattgaaatgcaaattccctgaactaggaatcctgttaagctgataaacagtctttacatcccagagtgaatgtatttaggatcccttcttgaggggacagagaaccccagaatagggaagttgggctctaactcactcatatgtttgcctagagtaggccagctggtttttaccttgctctctacacgtaaggtgtgcttgccaatgtcaataactaaaatactcatgttactgaaaggtatttaggtgtgtgaacaagatgttgctttatcaactgtccaggtttgcctgggcctgcaggatttcctgaaatgtgggactttcattgctgaaaccaggacagttccaggcaaaccaggatagagagagggagagagatgtcactgagctctcaatcaattcccacaataatgatttggtgacaacacagcgtatttccactgaactcaaaggcagttagaagagtctcaaaggaatatccattttattttagttgaacttgagaaatacatgccattctgttctgtacttttagggaggcattgttatagggaatacaagcacagggttgggaagtgcttgctagggccacatttcgtggccctctgtaattaggtgccaagattgccgagggtgacattagtggagatggtgatagtaataataatagttattataaataaccactaacatttcttgggtgcttacatatatgtcaggtaaattgtatgtttcacattcattatctgattaaatgttctctcagcaaacctgtgagctaggtactattattttctcaattttacagacaattaacttatggtttagagagttgtgttgacttgtccagtcacatagctaatacattggtgttcaaatgcttaagaccttgaattcttaattactcattactcatgtgtctacagcaccaaagcctttcctagattttctcttgcctctagtacccctttcctggtccccacccatctctgatgtgatgggaagcacacttgctatgtgtttttgataggatattttacttcactgagcctgtttgctcatatgcttaaaaacagggggtggttaataacactttagattgttcatttctttatctactccccctgcctcccactttttgccacagtcataattatttcattctgcagggtgattctctgccatcagagaaagtttggcatagttcagtcgttctcaaagtttggctaccagactagccacaactgggaactgttagaaaagcaaatttcttgagcctcaccctagatctactgaatcagcaaatctagaggtggggtccaacaatctgttgcatggtaaagcttgagaaccatgagtataatgaaaagagcttggggtcttaaatcaacacaaccaagttgaattttgcttctaccatttgggtgatgcttacatcaacaccacactataaactttttgagcctttgtttcctcttctctaatatggaatatcataatctcacagttctatctatgatgagggtcaaataagaaaatggcacaaaactgaatttaaacattaaagcatcaatgttgacattatccatctgtgggcatctctcccaaatcgctcatgttctaccttcctactgatgtataaatcctgtagaaactgatttttggctaagaaagggtaaaaacagccagataagtaatatttatatggcaggccactatctttagagtactttcaaatgattttatttaattcttacaccagttctgtgaaatagaattttaagggagctttgagtttcagagtgttaatgacttgcctgagttgccactgcaagagtgtgtgacaaagctaaggcttaaattcagtctcaattaaaaatctggtgcttcctctagatcactctggttaaagccagagacaaagggcaggcagctgccagcacaaaacctcctccagcccactgttctccaccttggccgcacattgcaatcacctggggagactttaaaagtctcccaaccaattaatcagaatctttgggcatgggaccccagcatcaatgtattataaagctccccaggagattcagttgcaatgaaggttgaacacatggctttaagctccctggcagttctattaggcagtgatgcttgatgcttgctgcacattagaatcatctgaggaaccctaaaaaaatacctgtgcctggcctcatccccctgggttgcaacgtctgcagtgggtggctattgtggctattgttattttgaactttcttgatgattccactagatatccagggtcgagaagcacagcatgtctttggctccaagcaggcttgctagccctcggaatgaagcccacctctctacttctggctttatcacttggcaaaaaagcacttgttaaaaatgcacacacatgtgggtttgccctcttcatggttcagcaccagaatttaagcagctggtggacaagacttatccttggaacaacatccaacattcctaccctagggcatattggagtctctcaaccaatgagggcccacaaataaagcagtcagcatttacctccagcaactgcatttaggattctctcacatgacaacatttcctaaacaggtagtcaaagccagagaaagagatgctgactttattaaaattcctctgggcatgcccactgactcacaacacatgctcattaatacagctgagcaggcatcctcccttcctcctgcacgtgaggcacatacacagaaagccgggctaccactggcattcaggatgggggagctgctgctctgacgtggctgctttcgtttgagacttcttgggggcactttgataaccaaatctgaaatggacactgagtctacctggccttgttctgaggtccacttttctctgaatgatggtacatggacacgacattgcttatcatcctgttcactgtgcacctgctaatatagcgttcattgctgtatggttttttggaccttctgggagtgcttgttacaaatgctggtacctagaccccatctcaactctcagattctttgaaagggggttgggaatttgaatccttagcaagctccccaattgtttcctaggcctttgaaagtgtgagagccactgcactaacaactttgtcatggtttagaaagcctggttccaccagttcttaggaataaaccaagtgagagccttgcactgtagagaattgtgttgggagggtatgaatcaggtaagtcaggagaaaagggaattgtgagatgtctagggaatgggataagggaggacatgcacatgcgcatgtgtgtgtgtacatgtgtgtgcctgtgtgtgggtacatgcctgtggcccacacttggggggcagctgttatatttgctgcttaggtattcatagccaattgttttaactgttccttgctttattagcttttgccaagtagttcagcttttactaagggcacccgggtttatggcagcaatatttctcacagtgtcagagataaaatatcaagctaataacagactccctgctaatgtaaatcgcacaaggaaggcagtcttgttcaggaggaagtcctaccagggaatgctaagtcttacgattttgaaacagcagtcggtgggattggatacactttgcacttgctaagaagataaaattaatgatttgtgttaagtggtagcagctgcagaaaagagcattttcctacacctgcctcttcccaagggacttgggggctcccagaggctcagacaaaggggcaggggcttaactgtgggacttagggagagatttcctctctctcctcccctctcttttattaccacttctcagtctcgatggatatagcaaaccaattggtttcccttatgggttataaagaggaacccgttttgggatgttgagggatctgggaaataagtctcctggcaatttctgagatttcctctcttcttcctggttacatccaggcacctgctgggcaaaccggctgccacttgttgcaaaaaatgttgacaataccgagggaaactgagacttgaaagaactggagggagcaaagtgctgcttttctgtagcatcaggtccctggggacaggccctgagtgttgtacctactctagctctgaagggcctggggcagatgtgtcagggacttctgagaagatggggttgttttcaaatgggaaggccattaaaggctttgggacacttgggaggctaagaggggatgctcaggagagggaaaggccatgggtgctggctcagcaacagggatctgaaactgctgatgctctattgagacctgaagcacgggtgatggggaaaagcaggcatcttctgatgcatgattctcccagcaaccagaaggccctacaacctctggctgatctctgactacagtcttgactgcggctcttgcccatcctagggtcactggaatcagatgtccatcttcccaactccagaaggttggcctaagtctcatgtcctttgtatttgctcctaaaatcaggccccactcttacctggggcctggtctcctccctacctggtctcctggtctgcctcagtaattctcataatcacttgctatttccactggggaaaaattggagggaaatgtcagctccgtgtgaatcaagtcagcttcattgactccttgaaacagttgcagtggccctgtggaatagggggcaggtattagggcccccattttctgggtgaggaaacaggatcagggaagttaaatggcttacattcacacagagaacacaatacaactggggtgagatgagctcttctgacttctcaatctgtgatccttctaacaccccaccttacccaggggagccttgcactgttactgcactgtctgcacctgctcagataactctgcccaaaccacctaacccaccatgcctccatgccacaggacatgtggttgagacacaaacagctctgagactaaatgcctgcccccaagtgagctggagacaatgaaaatctctacctggtaacccagtgggagggagcaggagcaggtggcatgtgggcagaggcttgtccactaaatgtggaaagaaaagcagtcatgtttttacgtgcagggaaggaatgaggactttgctgacagcaaagggtgatggatggtgtgggagactgcatggggcgtgagtagtaatgtgatagagggtgcacattacaggcaattacaatttgaataagttatcaatggaaagaagtagaggagtggaaaactgttttattaaccccctgaagttacgttcacagcattttgaaaaagtttatgaattgccgtcaattacaatcccggcgacaaatgcggatgctgggagaatccctgattgtagcttctgtagcaggcaatgttttatggggacaatttaaaacaacagtcttatgtattttaaaacagcaaaggaggaagaaaaaggaagtgctcagggagcatagtgaatttacctgctcgtgagcaataaatcttacttatgatttttcggtgttatctgtttttcttcttttgatagtgtacaacatttctccaggcatactgcctggggctaagatgtgtcctgtatgttatcccacggagtgttttaccaagccactccctggatgataatagagctccaaatagagacaagacaatgtatactttctaagctgttgccacgctgaaatttccccttcattcccctacccatattcccatttccagatagcaaaaggtaaggtggaatacaagacatgcatccctgcttgaggactcccacagagctctgttgtcctccaacagacctgaccctgttgtgccacaaaactctctgattatttattatcttcaccaccaaactagagccccttgaggccttagtctctgtgacgttgggaacagcatttagcttggaatcaggagtccttggttgtattttgagagctgctgcaggctggctgtgtacttagtatatcagaagctcgtgatttcctcaccattgaaagggagataagattgcccaacctccctggctcaaaaggttggataataagaagtgagagaagggaaatacaaagaagagtggagtcgttgcagaagggtttgtggagggggcgagagggtactaggatgctatgtggtttccatgtattacctcatttagctcataagtatatggagtaggtattcccattttgtagatgaggaaactgatgttctgagagattaactgaatcactctaggaaaaacgtgtcggaagtcagttgagcccaggtgtgcatggcatcaaagctcatgtttttcaccacaccaggtcctctgtgttttctcagatacagaactattcattaccatcacctgggaacagcttggaaatgctaattcttggctcagcctacacctatgcattcagaggctacggttaacaagattcccaggggattcctatacacattctaagttgagaagcataaaacttggggacaaaagcctcccctatttgaatctgacccctccatttgttggccagttgacactgaataagtctgtactttagtttactctttcaagggcttgcgataaggattccaagatgtggaaatgcctaacacaacattcagctcaacacatgaaacatgaagttcactgctcatctcactaggtgtggcctgtaagtttgctcaggaagcatgggagaaactaacatcttattcttaatcttcactcttcccccatatggttcttggggatgaggaaaatgttaccttggagtgtaaggctgcgtatcattctttggggccatgcttctcaaagtgtggtccccggaccaacagcatctgtatcacttgggaacctactggaaatgcagaatctcaggccagcaccctagacctgttgaattagaaactctgggggcggaatccacctctctgtgttttcatgagctctgtgggtgactgtagcaccacgactttaggggtttggaggtcagacacctgagaagtagctggtgagggtaggatatttgcaggtgctggactccagaggctgtcctttgtggcagaccccaagtgctccagtgggcaccgaggtcatgttacaactaaatgatcatgtaaaggtggtcactgtgcagagggcacacaagcagccaatttattaaccaagagcaactttctgtaaattaaaaattgttagtgatcagttttgaagcgttgagagcctatcagggaccacatgcctggaatgagcatttaccatgtggtgcctttagaagctaatattgattctcattattttaaatgattacaaacattgcaggtgttttgtaataatctccattgtctaattagaacatgcgtgaaatgagctcattgtgcctgctaacgaatattggttcgaacagcagagctctggtgcaggggcaagactggggctgtctggccaagttgccggccaatgttacccctttttctccctaaattatgaatcctggggatacaggacattttgacaggcagttattcatggggaggcctaacctgatttgggcctgctccagccttcagtgcctattcccatcaggatattagctgggaaatgtggaatgagtgtcagcaatttgggagccctttcttcctttccgagtccccatttatcttcttccacaatttctcccacatgttcattttaaagtagctctctatctaaatgctttaggataaatctggattgtgtgtcactcattttagctttcaattacatgcggtctagttataggctttcagttgcttcatgtcttagtattatttctccagcaggactgtaagctccttgaagacaaaagatatgtcccatccttgctttgcattccccttcaaggactagcaagtgcttcatagacactcaatataggatagctgttgttaccagtattattcctagtcattgtcaaatgaatgaataacacaactcagggtgctactgtgtgctcagtgggtgtttcatatttgcatgcatattttaatttactaattgaacaaaatttactgagcactaattatggcatggggaaagtgccttaggacacctagctcctgccaacttgaagctccaaatctccctagggagaaggcagttagagagtggtatggtaactattgaaattgttagaagagggatggggcatggtggctcacgcctgtaatcccaatactttgggaagctgaggcaggtggatcacctgatgtcaggagtttgagaccagcttggccaacatggtgaaaccctgtctctactaaaaattcagaaaattagctgagcatggtggtgcgtacctgtaatcccagctactccggaggatgaggcaggagaattgcttgaaccagggaggcggaggttgcagtgagccgaggtcatgccattgcactgcagcctggacaacaagagcggaacttcatctcaaaaaaaaaaaaaaattgttagaaaagggttctctgggaggctggagaaagagccctgaatgcaagctaggatgaccaggaaagattgctgagcccaatgctgaaggacaaatagtaaggggagggggaaagggcaccccaacaaaagcatgtaggagttggggctttggggcagtgaatgtggccagagcagggtatgcgtgggagacaggcagggactggtatttggggccaaagagggaagcagaaactggattatggaaggttttgtctaccatgcaaagaagctaggattttattctgaaggtgaaggtgaagggtctatattaagacagttagatttgcattttttcaacaatttaaaaaagatttatgtttcagaaaaatcaccctggtaacaatgtagaggtggaaacatgaggcagggggctcattaatgacctgtatgagaagggatgaaagtctgagctcaggcagtgagatggagggaacaatgtagacatatttagggtgtgagagtttctatacaatgtgagagcattatatgcttttctttccttgcttctgaaaacattaaaatagaaaaatctggagaataatacaaacccctaaaaccccattacccagaatgaacaaatatttacattgtatcttatgtacttcagatctatttttattataaaaattaaaaaaaattacaggtaaagtttctccacttagttccatccactactccattgccagaggcaatctttgccaggaattggcatttatcacagtagtccagactttcctatgttagtctcatagttaagtgttcataaacattatatagtactcacagaaatggtttctatagttttctgcaaattgttctacatagtgttgatatgtttagctctagggcatctatttttgcctgctgtatagtgttctatcaataaatatactacattcctttcttctagtagtagacatttagattgtttacagttattagcttttgcaaacatttcagtttttgcatacatgaatgaggacctttctaggatatatactagaaatggaatttttagtcttaaggaatacatattttcaaatttattacatactgccgaagactttctgaagtgattgtaccaactaaaattcccaccaatagtagacgttctctttctccatgtcttctccaacacttgctattatgggccttataaatttagccactctgatgtgggtgatttttctttgcatttctttgattaccagaaagaaagagcaactttttatctgggtattggtcttgaggttcccttttctgtgagttatttgttcatatgctttgctcatttttctcttgggttgtttgtcattatttttcctagatttgttggaattctttattattctggataaccactcctttcactggaaaggattatataatatctttcccagtgtatctcttgtcatttaactttttggtatttttcttttttttttttttttgccaaaaagaggttttaacattttgatgttggcaaatttattaatttggctctccataggttgtattttttatgccttattaaaaaaaatctcctcctatttcggtgtcataaacatagtaggcattgccatacaaaaattagccaggtgtgttggcgagcacctgtagtcctagctatttggaaggctgaggcaggataattggttgaatccgggaggcagaggattgcagtgaaccgagatcgcaccactgcactccagcctgggcaacagagtcagactctgtcttaaaagaaaaaaaaaaaaaaaagatagcaggcattgccttatattttcttctaatagtcttaaagtttttcttctgaccattaggtctctagtgcagcagaatatatttttgtgtgtggtgcaagaagtagggaatatgattctcttatttattttcttcctttgaaagccaattaccccacagtatttgttgaacaatccatcccttgctcactaacttacagtgctcttttcactatgttcccagctcctctatatgtccttatctctggaaggtctctttcctggctcttgctctgtgtgtttccactgggtaagcactacaaagaagccaacactttaccctgcccccatgcccatgtagcaccattggtgaccttctcctagtaactctagatagctccagttgagtctgagcccaccatgacccctggttgaagaaacctggtctcctggctgggctgtttattggcggggttggggaggggtgtgggatttaccctccacactgtcaacaggctttgtgcggacatcagggcacaaaaagcaactccttggattttctgccatctcagaaatcactttgagataagagagatttgtatttaactgagagactgagtgaggacataaggggaaaacatctcagtggttgcaagctttgtggcacctgagacctagatgtaagcagagagcacggctatcagctgggcaggcccttgaggggcttgctgtcatcaggaaggctctgcaaaggcacagaagtcaggcttcatctttctctaacttgggggagagaagctgttttgctcccctcaaatctgcatgcaatctgctcctgtcaacacagtgatccaagagcttcagccattgaaaggaggatgggattgggctgggaatttctgactcttccttaaggtcatgagcagggagtaaggatcgatcacattccctgcaaaaggggtaaaattctagattcttaggactagaaggacatgccagatgatcttgtccaacatggatttttattcttatagatgaggaaaccggactggagagaggctgagtagctggtgcaagttataatgctaaggaaagtcagggaaagcacaagaccccacgtctctggttcccacacacgttcacttttcactgcagtgctctctttgactggggtgtcttagagtccatttgggctactaaaacaaaataccgtagattgagtggcttgtaaatgacagaaatttattcatcacagttctggaggctggaaagtccaagatcaaggcaccagcagattctgtgtctggtgagggcctgctttctggttcatagcattttcttgctgtgtcctcacatggtggaaggggcaaggcagctctccggggactgttttataagggcgtagtcccattcatgagggtattactctcgtgatctaactacctccaaaggctggggtcacattggtgatcaggtttcaacacatgaattttgggggaacacaaacatttagaccctgagaaaaaactattttgaagaaaaaaaaatctgcaaacattttaaatgtatatcccttcctctggtggcttgaagaggataaaggagtctaggcatttgggactaagggagagacagcaattccagagatgtttgtacctggaaatgggcaatttctatatcctcggagatgagcctcaggggaggtacagattgaaattcgtaaggggataaaataaaactacagtcctgaacttctggttcctcatagaaaaaggcagtcacagtgcactgggtagtttatgaaggctgacttcagtttatgattatattccttaaaaaggccattcataaaccagacctttaaaaatgaagtcctttattttttctcagtgacctgcactattatttcaaaagtcttctagcttcatttctgattgatatttacttgtcattgactgttcacactgtagctttaggttcttttgttgccgtctaatagatttgcccaaaaggaaagctactattaatgaaaatctgtttgaaataggaagcatccatttgaaatacgaatgatcatctaatttacttatctctgtatcttcaaaaggtggaagcctctgtagacatctggagtttggaagagaaaatggcatagtatcacatccattgtattccactggtcaaagcagccataggacccaaagcagccataggatccagaggacacagaccctgtctcttgatgagagaagtatgaaagaatatgtggttgccacacttcctttccctgtgaaattcagagcagacatttgccccagactgttgtcccagcctctcccatctagccactcctagtctattgaaaccaaatcattcatctttgagagatgagatgccaaagtctcactgcctctttcgctccccatgcagctgaatgcttagtactcagtcctaagacagatacaatctcgaatgatcattgggacaattttctaaagaattgtccctcagctgttagaatacttttggatacatgaagagttctaggactaggtttccctgtttctagaagagcttacatcaccttttggcatccagtgtcttaccatgcctgaaagatgtgtgtttgctaaacattctctctttattgcaagtgactgttatggaataaaaattcaacaaccagtaagaaggtttatgtgctctctgaaggaacaaggactagaaaatctctgcagggaccaggcttttaattgagtaagacatcagtgtaaagtaagaaaacagaggtagtggctaccaaggggctgagggaatctgttctccaggttgagacctgagtggtcagcacacaagtctcagggagtgacaccgaacaaggtgaggcagagaaaccaggagaccctaccttgaaccaggtaagaagaaagaggctgcagcccctacgtatgtgtgaaccctccccaccttttgaaaattatccattaagccaacattatctctttgcctggatcatgaccatagactcctaattggtttcctcatgtccttaactaaattcatgttttcaaaataaaatattttcacgttaaatccacctttctcccctgccaaagtttccaaaacgcttaggatgaaaacaaaaccatataaggctgcctatcttgttcccttatctctccctttgagggagcacagtgagagatgggagaacaagataggcaggagctggcttgtgcaataggctctaaccatattgactttttttttttttaatcaggcctcatatgaacccatttctttcagtcatagagtcttttttgtttttgtttttgttttctcctgagacagaatctcactctattacccaggcgggagtgcagtggcacaatcctggctcactgccacctccacctcaaactgggttcaagtgatcctcccacctcagcctgccaagtagctgggattataggcacgtaccactatgcctggctaatttttgtattttttagtagagactgggttttgccatgttggccaggctggtcttgaactgctggcctgaagtgatccacccaccttggcctcccaaagtgctgggattacaggcattagccaccacgccctgccaacagagcctttacatacgctgttccctctacctagaatgcttttccttttctccttttctgagattttacggatacgtcatttatcaatctttaatacatgattggttaggagagttgaggcattcagagaatcatataaccgtaataggaaaagggctagctccagctgcttccagcactaggcaacagttgagctccttcattcattgtagcattcaggtttgttccatttgtggtggaagttggctaagtctgagggcaactttaaactttcctttaaaggcagcctcagagacaggtggcgaaaaatcttaacttagttctggagaatgtttgatgagagaggagaattttacaactgtgattgcaaagggaaaggccaattgttgacacagaaattctcacccactttgccttcatgggcttggttggccctctctcttctctgatgatcttacaagccttaaaaaatctctggatcctaactttctggatattacgtagatgtgatttatccagggtcacccagtgagttaataagagagatgggactagaatccaagcctcttgacaactagtccagcttgcccttattctcctgatgaggaatatgggcaagtcaggaatagatatgagatatttcaattctatgcctcacctcaaacatccacaaggaaccaaatatacattactttcctcaatcctagaaaggaacaaacttgggactcctcccaggtcttcagtgactcccatacccctttagtccttgcttccacctttgaattctctgcttttgcattcacccagtctccctccaagtggaaactcattcctcggggtaatcaatgtccctctcagccagaaccccgttaccagggaaaccattccaggcagccgactttgactcattgagatgcagctgcagaacccagggcctgtgtaagggcaactgctatcagagtgggcagtttttggcaactctggagtgtattgtaccaaatgggacatagtaattatgtatttgtggctttcattatatgccagtttaattgtcacaaattcattgttgtttctaagtttttattttatttttttctggactactcagcaaaaaagggaaattggtgccatagggcaggtgtctttctggaagagacactcacttggatgaaaaaataaatgcagtgacttaacgtcatttgattggtcaggaaattttccctatatggcaggggaacaaccctgacatgggtgcctctgggccctcaccaagggcctagagctgtgtcaatatgaaaatcgacaatagaaggtgaattgggtttgacatgatgggctgtcatcccccttgaagacaggggtgtattagtcagttttcatgctgctgataaagacatacctgcgacttggcagtttacaaaggaaagagatttaatgaagaactcgtggtttcacgtggctaaggaagcctcacaatcatgggggaagacaaggaggagcaagtcacatcttatgtggatggcagcaggcagagagagagaacttgtgcgggcaaactccctttttatttttaaaccatcggatctcacgaaactcattcactatcaagagaacagcgcaggaaaggcccgccgccataaatcagtcacctcccaccaggttcttcccaccacatgtgggaattgtgggagttacaattctagatgagatttggatggggacacagagccatatcatatcaagggatcttaaaaagacatggaggtcatggtcccttttctttttaggctttgtttccctactggtgaatttctggttgtgggactataggtttctgaagttggacgttttttctaaaatcacgtctttgccctgtcccttgcccatgacagcttggaagcatgtcttctcttattttaagcatagccaatacagaaggcctcaatataggcatggaatagttaagctaggtgattttaatcatttcaccaggaagaattctgtttttaccaaagggcttaacattggattcactaagatagccagctcttcacatgaatctatgatatggtgaatatggtcatcttaaatgcaatttttctggaagtttgtcaattgtatgttaacaatatgttaacaacagcaataataatagcaatagctaacttagattgagtgtgtatgatatgacagcatcctacatcatcttcttcagtcttagagcaaggtatggttgcactacatctcatatatcccatagaaaggctgcagagagagagagtctctgctcagttctcaagtcaggtgagttgagggggttgagaatataggacagaaaacatgagttccagtcctgggcactactcttactggtttttgggtcctggagcccattgcttaagctctttgaaccttggtttcattttggaaaaagagagacagaaagtcaaaagtgttttgtggagtgctgtaggggtggtggtaatgaggatggtagctaggctaacatttactgagtgtttaccatgtactaagtgtggttgtaagtaccatgtgtggattatctcatttaatcatcacagtaattccatggtactttattagctcaattttcctgataggaaagtgaggcacagagtggttacacagcaacaaagttgtggaaccaggattctaacccatgagatttacctacaaagcattccatgtctctctgttgctgattgcatcagaattaataactttagtccttgctgctattctgagcgggctggtataaccgcttgcttcaagaacactaaaaagagattggcttctccaatgcatgttgagtctaagattcctggggggatgtctcatttttcctgtctttactacgtcagctcatcttagtggctgcatttgtggctaagaacgtttgggtagctacgcatccagctggttgctgcccagctaggatgcttggatgatcatcctcatttgatcctgtctcttgggataaatctcaggctttgggcttggtgacagtcagattctcctgccttaactgagcattctgttcaaagatcactgtggcttggaaggaccttgtgtcatgcattattcagaagggtagacaagctctgggccagtgcccagaccttggaagaatgcatctggtagagccaagaaaattcaggaaggggcctcgcaggaatttagcatggtctccattgctcaagccatctcttatttttggtttgtatggtaatacatgtatttattataggaagagatttacattcttttcctttatactaataacctaagccagtttatgggcataggtaggtggagaaatgtaattcattactgtgtaagtgggtctacagcccatttagtagggccattatatatttttttccagatagaatttatttaaagaaaatgattttcaaagctgatattaagtcagattctgtgacaagtacgcagtggttctcaaccttggctgcacattggaatcaatggggagctttaaaaaattctgatgtatggttctcagccccccagagagtctggttttaattggtctcaggtgtggcctgggcagtggacgtcttaaaggctctccaggtgattctaatgtacagccaggcagggcaggctttgtggataagcaactgtgcagtcacagagggccccgtgctcagaagggccccatacttggcttaatgctctgccattggcttcttaaaattcttaataattttccaacaaaggattacatattttccctttgtgctgagtcctgtacattatgaagacagttctgcagctagagttgagctactgtattagaacaacatccccatataagaaacactccttgcatgccagctgatggtcctcttaggagcaacatgtcaatcaagcaaagcccaggagggtgtggacgatgccttgataatattgtaccctgcggtacttacttttcaagagactttgaaaaaactgttcctaagatagttgttaaccttgctctgaagtactggttgggaaatacacacttgtactgctagacacagtgccaagggcctggtgtgagtctgtctatctaggcgggtctctctttccgtggaggtgttggcaggtggactcgctgtggttgccctgcaccctcctgccttctccagaaccttattctgtcatcaatatccccctgtctctcttgaatttttaatctctccctttcttctggcacttttccctcacctaaaaataacttttctcaaagtactatacccttcaccaataaagttttaggaacaggagctgcccctcaccaactccatgtcgtcataaccattccttaactctttgcagcttagctcgcaacaccccagcttcctgaaagggctttcttcaaggcttctaattccctcctgattgtgaaaattccttatctcagaccccatcctgagcttctctagggaacttgacagtgtcaaatgacttttccaccttcttaaagatgcaagttcatgggccccatccaggctactgaattagaccgtctaggggtcggggtcctttcactgtttaaaaaaaaatctattccagtgattcttaggcatacaaatatttgagaccactgctttatatatgtttattgaataaattgcaccctagcacttgtaagacttgcttttagtttttaacataaggtgtttgctttgtgtctaagttatgcactactgataggtggttaagagtaatgattaaaagcatgagctctggagccactctgcctaaattggaattccagctctgtcatttactacccatgtagccctgggtgcctagtttctttatctccacaatgggatagtaatagcgcctaccccacaaggttatgctagatttgggtaagttaatacacgtaaggtacttagaacaatgcctgcacatagtaagggttcaagaaaaattagcttttaaattgtatatgtatgctttttaaaatatatttacatttaaattttctttctattctattcaaagctaaagttaagaagatcagcagaggaactccaaatctgatggatttctatttttggcagctctccatgtagttaattgctcctgatgcagttacttgggaaagttgtcttttccctctgagtttaaagccataaacctcaaccactttttcctcaggtaccccaatccactgaggtatatgtcatcctcccaacagtgatgatgatttctcaccccagtggttctcagctgatgctcctcagccaacttggattcactgatttatgatcatctatgatattacagagagcctggtagtgttgggttaattttaacatggccaataagaaagcattcaaagctggagaatgaataactgtaactgaatcttagccccttctgaactaaccactttaggatcactgggctgttacaaaaaataccagtagcatccaggtcccaccccagatcaatgaaataaaaatctctgggcatgggtcctgatacaggtatatatcaaaagcttcctgaatgattctaaagtgcaatcagagttgacagtcattgatgtagagtaagacataagattccatattggtaaggaaggaatgggactaagtttcttgggaaaaggaacaagccctgtatctgttgaccagtacaacttgcttagataaagtggcccaaatatattgaaagagaatagtctgcaaggggccaagagggagatgcggatgaaatggatgatttaatgggtcatctctcctgtagttaatttctctagatctcttgtgctatattgattttgtaaatagctattgtcacatctgccccttctgcctgtgggaactagtgggtcttaaaaaattgaattgggtgagagtgtagattaatcaataccaagatttattgactcgggacatttatattaactgttgtgaagtcaagaataatttgaaccttttcaatacttcattaagtggcatagtgtattatctatggtgtattttgaaagtatccttcctggatttggtacagctctcacctcgacttcctaaaacggctccctttatttgtcaagctattaggatttatattataataggaatcacatcaaggtacttttcaaaggctaagtaaaaatcataagaagaaactaggccgggcgcggtggctcacgcctgtaatcccagcactttgggaggccgaggcgggtggatcatgaggtcaggagatcgagaccatcctggctaacaaggtgaaaccccgtctctactaaaaatacaaaaaattagccgggcgcggtggcgggcgcctgtagtcccagctactcgggaggctgaggcaggagaatggcgtgaacccgggaagcggagcttgcagtgagccgagattgcgccactgcagtccgcagtccggcctgggcgacagagcgagactccgtctcaaaaaaaaaaaaaaaaaaaaaaaaaaaaaaaaaaaaaaaaaaaaaaaaaaaaagaagaaactatagtttctgcttgctcataacttctttcagattcctccttttgaaacacatttttttttttcaactggggttaggttttcagtgagatcaaattcaggcatgggaactagagatacgcatatcttaaaattttgttctttgtggaatatttgcctattgcactttaaaaagtcaacaactactttgtttaattaaataattaatgcctctcctttttacaagaaggagttacatcatctttttccaaagggcataaattagaacacttcagacacaacctgttcttaacagggatgtttttcatatctattaagaaggaaataattttgagttgtatagtcatggtgagaaagatatatcaataattattaacttatcctatctcttttggtgctcttataaaaaattgcataaatctataagaatttggttttgttttaaggatatggttcatggctatcagctagatccaagctcactgttttccctaggaacagtacacatgactttggacttggtaagcagcttttaagaccctctaaaatgatgaaaagatgctatattcacatgaaggattgtggtagtgggggatactgttgagggacacgttttggttgtttcttcaagagcagagtaccacaatataaggtgtggagagccaggttgcttaggcatggcttgagtccataggtattgcatgagaaaagttagattggttctaatgatttgcaccaagtgagtcctctttgttgataaagaagtaagatcctattgtcaatctgccaggcctcctgtcttcctctttgcccttcacccacctcatttagggaatccttgagtcgggaaggtcattcctgctgcaggctgccagctgcctacctgcccttcttccagcctggcccggtttgttgctttgttttcactgctcatcatctgtgacttcttggcaaagtcttgcagggcgtgagcatccactctgcatggcccgtcatgaagcactcctctaacctctgatgtaggtaagcacttgccaagcctagctcttaagtacttggcaaatgatagctatgcctcatttatttccttttaaagatgggctaagcaagggcaaaaagagtgattaatgattgtgaagaagagaactttttattgagaacctatgacatgctaactcctggattctatcaggtatagctgctgtttcattaaattatcataaagatgacacaaagtagctattattatccccactttagttatgataagactgaggcacatacaggttgattaaattactcatacagttagtcaatgtcagaacctcaacttgaactcagccctgacttccaaacccattgcagtgctccactcaggtctttcctattcggcccatgataaggtgctatctggctggagaatctgctgtgtgttctgtcctctgagtgcctagggaggcttgctcttccatgcatccactgtgaacttaccttctcaaggctcctgattaagggcatacgattctgaaatcatctagggcttctcttatcctgtgttgtcctaagctgccctcatgattttcctggaggataaaatgctcatcagataaaatgcttattgtttttgagaacctcccttctcaaattcttgtgaagatttcctctatggagccctcatgtggcccactcaagccagggctctcaggagcctcttctcccacaacactttattctttctgaaatacaaggactatgttgacttcaccaaagggatagtcaggtcgcacctggatatcataacttgtagccctggggccttgtcaccagtcatactgcctgccagtcaccatctttagcatgtgtatgtacttgagtggataagataggcttttatttcttttatgatttgcctcaggacaaatcaaagagagcttcactaataacttgtaatgttactcggaaaagagaccagggcttctagcccatgtaaagaagtagaactctggccttgggataggtaaggtaggaggctacagtgggagagagtttaagcagagtgacatcagccattttactgtatgcatagctgggaggcagatcaaggacttcaaacttcaagagtaatggaacttgctgtccaaagcacctgctgaacaacagtttcaaaaacaaggcgtgcctattgcagggttcctaggtgctaaaacttccacttattttataatgaaaaagaaaaattttaagatgaatatatttttacctatttttatatgtggattgacactggcattttcaaataatctgatgtcagatgtatacatgtgtcagatggatacatgtgtcatacgtatcctgaaaggagggcatgtttgatgtcagtactttcatatgttcattggccttcagtgaactggcactcgtcacgttttagttgtgcctaggtaaatggatttatgtgttaggtgatctaattttcatgaaacaacatccacaaaatagacaggtgtcttatacaaactcccaaagaaactgtgggtggaggagaaaccagcactgtatgagagcaacaatgaagtggccgagctgttacttctcctgatttgagttctttgtccagccacattccacggtgaaaacactaaaggtacgttcagaaccgatacaaactcatccaccacaaatatcaagaagaccatttgaaatataaatttgttttcactattgttaatgattaacctttccctaagttccactgtacctggaaatgttgcctagtaatgcaatggaaccaacaggattagcaagaaattaaaaaaaattaatctacatctcattctttttacattttatattttgatgtaggttttatagttaatgtaatgttgcaatagatcatgtacatgatttataaatttatatatatatgttatttgagcaggctctgtatattttttttggaataggtcatatatatatataatatacacaaacaatttttaactgatgtggatgtgcattagttggggaagaccaattgctttaataaatgacaccaagatctactggtttaacaaaacaaaggtttatttgttgctcacatcttgacccagtacaggtcagctgagcagagtaaggctttactccatgcagacattcagatcctagattctttcatctactgtctctgtcatgcctccagctgacaaatgaaaaaacagaatgtggaagataaggttttgcaggccagatctggaagtagctatatcacttctgctcatattctattggctagaactcagtcatgagctcattctcaactgcagggaaagctgggacatgttgaccggctatgagtccagtaggtaaagaaaaactgtttggagaacaatttgccagtcttgatcagagtggaagatgaaaaaaatgtggagactaatttgctcatatgaggttgaaaactcaaggatagaatattgtcgttagaatttgatgtactgaagtttgttcataaatctaacaaatgtttactgagtatctattatatgccaggcactcttcttggctctggagatgtagcagtgaacaaaacagatacaaatttctaccaagaatcttatgtttgagagggtaccccgaatgaaagaggagcaaccaagagtggagaaaagcgtaaaatataatgttcgggaaagttgctttgatttgaaccaagtggcttaaaactatgaactcagacagatctggctttatatactggttttgatagtcacctaattgctgtgtgatcttttagccagttatctaacctctcaagcctcagtttcttcctctgtaaatggggataatgatagtgcttatcacataaggatgttttgagaattaagtaaagagattaaacataaagtacttagtacagtaccctaacacagactcagctctcagtaaaagctagctattataataccaccaataaatagtaacaattattaagaaagatgattccatttcccatgcaggttacctgggctaatggtgtgtccaactgaggtagctctgagagagctttctgtctctgtctcttttggccgcccagatggttatcaggtcattattgtgcttgatatttaattttttaattaaagtgcacatttaataaaaaatttgtgtttaaaattagtgcccatctgctgaaaatattagaacttatagaaaaacataaaagaagtaatttcccataattccactattcagacacaatgacttttagcatgttggctgtattagtttgctttcatgctgctgataaagacatatccataagactgggaagaaaaagagtcttatggctggggaggcctcacaattacggtggaaggcaaagaggagcaagtcacatcttacatggatggtggcaggcaaagagagagagcttgtgcagggaaactcccattcttaaaactaatagatcttgtgagacttattcactatcatgagaacagcatggaaaagacccacctccatgattcaattacctcccactgggttcctcccataacaggtgggaattgtgagagttacaattcaatatgagatctgggcgtggacacagccaagccatatcattggtgtatttccttactgtctttaatctgcataggctcaagagtgagctcctcagcgtggcaccagctcttcagggatgacaatcaatgtcgtcttttgccccttcagaggcctttagtgaagaggttctctgtagcaataagggcagctctataatcaatccaatagactcattgcccactctctgattctcattcctgatgctctctgattatacaatttcagctactttattttaaatgtgctggaaacttctgttctctgaatactaactagggtttttctgctggttctgtgcttctgggcaattggtggaaccaggtgcactcataaaaatgtgcatctctcaaaaaacagaggtatagttttctggctttttcttgcttagtctgtggttgtctaaaacttgcactgggctgtgggactaggtatgaaaggagaaaaataacaccaccaagaaaacctgcattgtcccttggaagttactaatttccatgagctaaattaaaaaatcaatcaatcaattaatcaatcttcatcttttgaggaatgaagcagcccaatacttaacagtggtctgatagtgaccttattctcatcctccagtaatactgattatatgcttacaattcacaaccaaccagcatttatttgcatgtcacctactctgctgaccctgtgtgtgaggtctttctcatgtatgtgccattatctcctaagacaaacagagaccacaggatagaggattttgttcccttggaatcaaacctgcctttgggaaggactttttgggagagagattttaagaaaagttttggagaaagaaagaaaagaataagctggcaactgtgccttgggagctccttggcatttttctgaatctgattctgatttcatttagatttcccctatctgagctgaagtttacttttgcttctcaaaggcttgcttccagggtctggataatgcaaattgataatgtaaacaaagctgtgggagaaagatgggtacttattgtaatactttaaagacaaatatttccttcatttctatcactaactaggttttcaacaaaagtctgggggatgcctttaaaaggcctggtaattgcttattgcttacaaacaattcatatgctaattgaaagctgctcctatctattcattgaagcccttacttcaaaaattttactaatgctttggcagttttagcaacgggaaagtaagaaaactaccgtttaaaatgccattatttagtctttttactaaattaggctggccttccttatcccctatcccattaagcttgcttgaagattttataattgaacatgcaaagtgaaacatgttttacacagagaaaaattcaagagcatttaaaaacaatgtagaaagtaactgcagttactgaggtatggagcgtggaaataaattttacttgcaggcgcaacaccagattgtggccagggttgtctggggttaaacgtgggtgccctggtgggattttatttctatcatgtacatgttttataaaatgggatgtaaaaaattggagatggccgggcacagcggcttacgcctgtaatcccagcactttgggaggccgaggtgggagttcgagaacagcctggccaacatggtgaaaccccgtctctactaaaaatacaaaaaaaattagccaggcactgtggcgagcaccagtaattccagctactcaagaggctgaggaaggagaatcacttgaatccaggaggtggaggttgcagtgagctgagatcacaccattgcactccagcctgggtgacaagagcaaagatccatctcaaagaacaacaacaacaaaaactggagatgtaaaaattccatgggtgtggccacatgctatggatttagacaatattaaactgttatgaattcttaagtctgtaagaatggatttatgaggttttaagggctcctaagaaagacttacaatatggtcatgagaggtcacatcctgaccactagaactcctagtttagctgagaggcagggttgccgagtgaacaccatttgtctgtgttctacaaattatttcttacctagggttactcactggtcttctgggctggaccagctccacagatgaatgggaatactcactgaactaggaatcagagaatcatagctccagttttgtttctgtaggttcttgggtttctggattaatcgcttaatatgggcatctaaatttatctacctgtgaaatgaaattgctaaggtttactctatgaacctcagaaggattttaagcatcagtcttcatctccattttataaatgagaaaaataaggctcagagagattaaatcatatatccaatgcaagtggtggaaataccagatgcagtagtgctttgccaataaaggtttttgcaaaaaaaaaaaaagatgctattactatatatgtgaagacagccttcagaattccaggtatcctagacttctttgcatgtggtcctatttcctacttttggggatttgtttcttcccaagtgcctcgtgtccaattgctgttcccatctttttccctcatcccatgctcttacctaccttctcttggatgtgctgctttggaaagtttttggtgtttctaatcatgttaatgaacttattctgtgtgttccttcagtatgtatgctcctggcctcctctttgtttttctgacacttgtttaaatggaatagtgtattaaccaccctaggtgatgtgttttaacagttacttattggaaagactgctttgatccaaggtctaagacagagctgtttctgtttgggaagtcaaggttacattgagtatagtcagtttataagccggtgtagcttctggtagagaagagggtctcactttgctgcagggcttaattaaatgttattaatgatgtaatgagactgggtcaaagaagaagaatgtgtaagcaaaagccaaagacactgtggaaaaagtgaaactcaataatcccaagtggcaaattttaagatcagctggagagggattctatatactcattagcctggttaaaaaaaaaaaaaaaaaaaagattaaccttatttgtctgctcaagttaaatatattaccaagaatggcaaattagggtatttgaggttcgtctttttccctggtcactgctcatttatcaccaatccagccaatgccacttactgaagatctgtcatagtcattccctcctttccagccacaatgccaaggctgagatcatgccactatcctatctccccttgtctcctcacacatttccttgtccccagtccatgcttactccaatcattccaacgtagtgatctggaacccaaacccagctttctggcctcaactcttgaaatccacccaatgttgcccatgcaccagccacacagaatttcccaattttactgagacactttttttttttttttgagtgctgcatactgtttcctcttgagatgtcctttggcctctgtttggtagatgcctcttcatccttccagatattgctcaaatattagttacttctttaggatactttccttgaaatagttgaagaattctttaaacttttacttcatttgtgatagcacttatataaggttgtatcattatttgttttatttgtctttactcatctctagactctaaatctttcctagtacacatcataatgcctactaaaaagccagtgtctcttgactgaatgaatacatgaacatgtgaatgaatggtgaacaatgtcaattttataccactctaatactttgagcaatgccaattatattgttattgccatactaaatttaaagtctgtgatctttacatataagaagaggaaggtaatgggaagggtgaaaatcactggtctaacttgtttaagtatggatgtctaagattgaacttcactgtaagctttggaaacaatgcttacaagcctgacaataatggtcttgatggatgaagctgtttctacattgtgtggtaagggcattagtcaatgaaagaattaattcatcaaactacagagtacctgtgtgatactagtgtgaatacaaaaaagtagattaacctgattttccaagagcttatatgtatctgggaagcaatatttaccaaaatgatgaatacttgtgatatgggtaggaggcagggaaatactgggtagaagaggacagttccccagccaaggccccactctcaaacctggaaactgccgccctaaatgagaacagttatccccgttttccttcccaaatgctacctttttggcctgccctgcctcctatcctgtgcccctataaaccccagacctcagctggcaaagaggcaagtggctgaacgtagagaggagaagaagcaactgggtgtcagatacttcagatagacgtggcttagcttcagatggcacaacttcggagaggagctcagcagtctctggctgggcttccaggaaagattactttcttcctgctccatcccccttccacctccccttctgctgagagccacttccactgcttaataaaatcctctgttttcatcacctttgagaccgtttgtgtgacctgattcttcctggacactggacaagaattcaggatgccctggatgtgggaacccaaaaaggctgtcacactgactcttcactgagctgtttaacacttaagctgtccatggacagcaaagctaaaagagcattagttgtaacacacccctagattgctgtggggccagagcccaaaagtgctcaccctggccccgacacccactcgcctgtgtgctccatcccatgtggggttgaatccagagggtttgagcaagtggtgtttgtccctgctgtagcgaagtggcgagacgggccaagagccagtgcactccagttcctggccatgaaaggatcaagggaactattctgtctcatttgtatagtgataagtatgcagtaggtattgttctaagccataatttatgttaacactttttatcttcattgaaaccatagaagacaggcactagtattatccccattttacagaacacagaggcacagtgagtgacttgtctacaagtcatgggtaccaatgactagacattctggcttcaaagtctatcctcttaatattgtacacacaatgacagaattacagtctacagaattgcagaacagtatgagagagtttgtcttagaaaaaagcatatttattttctttctttttttttaaaacaaggatatccacattttattgttttccttttatctgattctgaaaaaaaaatttttaccagaactatgtattttttcctgtggatataatcatcaggctaatccctacgatgactaaaagttgtggtggttgcatggtcaccaacttctctcttttttcttttcttttctttttttttttaattttattattattatactttaagttttagggtacatgcttgtttgtttgtctgatggagacttgctctgttgcccaggctggagtgcagttcactgcagcctctgcctcctgggttcaagcaattctcctgcctcagcctcctgagtagctgggatcacaggcacccaccaccatgcctggctaatttttttgtatttttagtagagatagggtttcaccatgttggccaggctggtctcccactcctgacctcaagtgatccacctaccttggtttcccaaagtgctaggattacagacataagccactgcacctggctgaaaagcatattttctgagttagaacttcctggatttaatttctgactccatcacttgcaacatattggtgctgtgcatgttattagaatgatttgaggtcatctaaatattaaggataagctaaggtatgttgaaaacatcatgcagagttacacatagtagggttcaaatattcatttctaacttttctttcattaaagagttcctcttcctcttgaataaaattaagtaaaataagtatgctataaaaaataaaaggcaatgtatcataacacggtagacattagaagaagacagttgtcactagtagggcaagaaacgtaggtagaataatgaagctgaggtagaataatgaagttctgggttaaagtaccaaaggctgtcaaatatccatggcatcaccatggctctgggcttactgaaaaggaagtatctaaaattggtatgcaggctcaaggctcagataaccttgtcctgttcaaacctttaacagttgaagtatctcaaatatattaaacattggaggtcgagaatgccaagtcaaaagcaaaagggagccttttacagtggatatgtgtgtttctctgaagtctaaagtcagaggggacagtggttgtaggtaggttgggaacaagaaagatgaggtgggaagatgtcgtttagagtgtggcaacctcaggcagttagcctcaaagcatttaccaaagaggaagaacaaacactatagcagtagcccaaggaaactcttctttctggatcctctttttgagctgctgagctgatattccacctgtgtggagatagcttagtgcaaaacagctgggttttgaatatgtaaacactcaccggaaatctgtaaatcaggggtaaagccatgtggttgtgtatcttttctatggtacctgcaaactacagctgttcatggagacagtgcttgtattatgtggctgtgggtgtctcctggatggaacatagatagatagtgcctattccttcctcaatgtggtgatccaacagcaaaggaaggactgctggatgtgtaggagtgggaggaggagaaagtggtgtgatggaaatgcaaggcagaaagggaatggctggtgccatctgcaagggagatggagccctcctgaattcctggcagagctattgagatgaaattgataaggaaagtgagaactcatcacccacatatactgtattatctctgagagagaaaaaaagacctgtctgtaatgagcttttagcttgcatctgaaggagtctgctaacttgagctaccagaataatatttgccatattctttttaaaaaatattggtttttattttgtgctttaattcagtgttaagtgagttgttgacttttttggtttgtttaaaaaagaagttagacagttggaatcccatgtaggcataaaagtggggttctaaaaactaggtccgtcctgggtcctaacacttcccacatatagatacgtgtttagtgacagtgggcattagaacagctaattaataactaataccgtaaatattatatattaggatctaggattctctggtcatgtaccatgttagagaaacaacttctgaagtgctataggttgagctagaagtgtttatgtgcctaagtgtgctttaggtactccaagcaaatctttagtataagttttatggttgtttattacttaaaataggaaagcttcactaatagagtggttgttataagtaagggttagagagagcatattaagttatacctgggagtttatagttctttaaatcttgtcaaactgtattattcttttaaatatgtcatatgacggtttataattattgtgaatactttaaaaagctggtggtgaatacgttacaggtggatcacacctgtaatcccagcactttgggaggctgaggcaggtggatcacttgaggtcgagtttgagaccagtctggccaacatggtgaaaccccatctctactaaaataccaaaattagccaggtgtggtatccttcgcctataatcccagctactggagaggctgaggcaggagaattgcttgtacctgggagccggaggtagcagtgagctgagattgcgccactgtactgcagcctggggacagagtgagactccatctccaaaaaaaaaaaaaaaaaaaaaaaaagccatgctgcttaaaagatgtaattttcagaaaaattgtgctacaactaggatgtgatatttaattatttgagacatgttctataatcacaatcaccactgattagtagtcaaccatgttgaagttatagtacctgtgaggaaatagccttaaacacagaatcacataaatatcagagccatactgggaaatacctttattaattagaaaatgtttgccattctggcttctaaagaaatccaactattcttgagttgcaactgtaacatacccttaagtaaaaatcagttagttcatacttcatggtagcaaggactccaaccttttgatagacttacttttcctaaattccctgcaattaagcctctacttagcttaaccaccttcagtgattgggagctcactctttcgctgttaaagtgtttctatttattagaaagtctgtctttatagtaggaaaaactttgcctctttgcaaattaaccgtagggatgccatttggaacaacatggcacatatttatttcctctttcttccaataaactaaattttaaatattttgagagagccatcgtctcacctttcaatatttatagtcccagattctcagttgtttggcaattccatgactgtaagctttttaatcatcctattttggatactttctagtttgtcagtgttctgattaagacatttcaggacatgattcatccactcattacatacttagtaagctcctattatgtgccaggaactgaggatacaatggtgaacaagagagacaatccctccatgctctaagggataggcaataaacaagtatatatatgtattttgttttcaggtaaatgttaagtgctgtgaagaaaaatacaatgaatgtatagaaagtgttggcaatggaagaggtctattttagataaggtcattagggaagatctttccaagtaagtggcattttatctgaaatctgagtgcaatgcagtgcacctgcagtgatctcaaaaaggaggttcaaagaaggaaaacagcaattaccaaggctgtgaggtggggatgatgtgacaatttataataaattaaggtccccagcttttccccttctcatgactcccaaggaaccctaaaaaggataaatctacatggttcagtgttagtgaaaattctttttttaaaaatttttgctggttcaacttcttcctccttgatacacacacacacacacatacacacacacacacactcattctcctaaagataatatcatctctgctagatccattctttgagatttgtgatacagcactgaaagactgagaagaaagagagaattaaagtagcaggactaaaaatgggcatgtttagccagggaggcatcattgaaagttgcaaactcaaagttctacaggaactagggctaacatatatgagtgatgcaggatgggtataaagcaatgaaggatcatggttcccactgtggcataccccatctaaagaggtcagcttctactcagctagagcaaattgttggaatgcataatgcaaacccactgttgccacatgtcccaatttttcaagaatagtaacagatctggtttttacattagatttttcaattttaaaaacactgccacagggactcccactcccaaaaaattggatagacatattggtccctgttccatccttaagtacaattaaaacccaatgacattatatataagaagactctgaaacatgagagggaaaagggaaaccagttaggaaccttgggactcgtgggaatacatggtagtaagtttcttgagttttcttttgcctcctgtattccatatctggagctaaagaagctgaaaagctggaaacatcaatctacacaggcaaaaaagcccaagaaaagcctgttttctctagccccaaaactggaaaggggaagcctacaggacagaaaaccctattccagctgaatagcccagaaatatttgacaattatataattaacaggggtaggtaaagggagataaatttcatttcactgcaactggtaaaatgatgacacgagtggattgtgataagttatgtatatataaggtaataaccagataaaccattaagaaagctacacaaaaagatatatactttgtatgtaaaaacattatggacaaatcaaaacggaattctaaaaattattcaagtaatcaataggacagcaggaaaaagaaaacagaaataaagaacagagaaaataaaagaaatagtagacttaagccccaacataacaataattacattaaatgtaaatggcttaataattccaattaaagagattgggagaaaggattaaaaacatgacccaactctgtgttatctatgagaaatacactttcgatataattatgtagacaaaatgaaaatgataggaaaatatatattatgccaacattaattgaaagaaaataggagtgatgatattaatatcacatagactttagagcaaagactgttgccagagacaaacagggacattttaaatgataaaatggtcagtgtaccaagaacactgcaatcctaaatgtacatgtacaaaatacagagttgcaaaatgtgtgaagcacaaatagactaaaaagagaaatagacaaattcgcagttatggttggaggcttcacagtcttctcaaaattggtaataggtaattggtaataaattgatataggaaatcagcaaggataaatgtatgagtctgctagggatgccgtaacataatgtcacacacagagtggcttaaacaatgtaaatttatttctcacaagataatgtggaagctgaaagtccaagagagaggtgtcagaagtttggtttattctgctgaggcctctctctttggcttgctttctcaatatgtcctcacctggcctttccttggtgtgcctgcacatccccagtgtctctttataaggtcaccagtcttactggtcaccctgatcacctcatttaaccttttaaaagattttgtctccaaataaagtcacattgggagttagagcttcaacatatgaattgggatggggaaacataatttagtccataacaatataaaataactcaaaaccactaccaactaataggaactaattgacatatatagaatacccaacagcagcagaatacatatttttttgcaggtgtccatagaacatataccaagatagaccacatcctgggccataaaacaaacctcaataaattcaaaagaattgaaatacaaattgtgttcactgaccaaaatggaaccaatctagaaattaataacagattgatagcaggaaactctaaatacttagacactatacaagagacttctaaataacccataagttagaggaagtttcaagaaatcaaataataggccgggaacggtggctcacgcctataatcccagcactttgggaggccgaggtggatggatcacctgaggtcaggagttcgagaccagcctggccaacatggtgaaacctcgtttccactaaaaatacaaaaattagccaggcatggtggtgcacagctatagttccagctactcaggaggctgaggtgagagaatcgcttgaacccgggacgtggatgttgcagagagccaagatcgtgccattgcactccagcctgggcaacagaacaggattctgtctcaaaaaaaaaaaaaaaaaaaatcaaatcattaaaccaaatgaaaatgtaacatattaaaatttgtgaaactcagccaaagcaatgctgagaaagacagttatgtagctaaatacatacattagaaaagaggaaaagtctcaaatcaataatcaaactcacatcttaaaagctaaatacatacattagaaaagaggaaaagtctcaaatcaataatcaaactcacatcttaaaaatctagagatcaaagagcaaagtaagtccaaagaaagcagaagaaaggaaagaataaagagaagagcagcaatcaatgaaactgaaaacagaaaaacaacctagaacatcaatgaaacaaataaatgattccatgaaaagaacaacaaaattgacacaactttagctagactaataaagaagaaaagacagaaattgccaatatcaaaaatgaaataaaggatatcgctatagacattgtagacaatgaaaggcaataaaagaatactgcaaagcaaccctacacacaaaagtttgataacttagaagaaacagatcacattctgaaaaaaaaaaatctaccgcaacttggtaatataaaatagataatatgagtagccatacaactattaaggaaattgaattcataatttaaaaactcccacaaaagaaacttctaggcccagatgattgtactgagaattctaccaaacagcagagttgacactaattgcatataagctcttctagaaaatagaaaaggagaaatctcttccctatttattttatgaagttagtattactctgatacccaaaaccagacaaagatagtacaaaaaccccactacataccaatgtccttcatgaatatgacacacaatctttaaaaaaatattagcaagtacaattcagcaatatgtaaaaagaattatgtaccaggaacaagtaaagtagaagggtgcagggaatgcaaatctggctcagcattcaaaaattgatatatcccacaatattaacaggctaaaaagaaaaatcatgtgattatatcaattgatgcagaaaaagcacttgacaaaattcaacacttctttatgataaaaactctcagaaaaatagtaatagagggaaacattctcaataaggagcattcactgaacacctacagctaacattataattcatgtgaatggctaagtgcttttgcactaagatcataaagaaacccagaataactgctctctcagctcttattcaaatagtgctagaagttctagccagtgaaataaggcaagaaaaggaataaaaggcatataagttggaaaggaagaaataaactgcccctattttcagcagacagagaaatcccaagaaatctaccataaacactcgcagagctaacaggtaagttcagcagtgtcacaggattcaatttaaatatacaaagaacaattgtatttctatgtattagtagtgaaccacatggacatcaaaattaaaatatgatgccatttataatggctcagaaaataaaatacttcagtataaatctaacaaaatgtgcacaacttgtatgctgaaaactgcaatgctaaaagaaataaaatctaaaagaaatagaggaaataaaaacaatctaaataaatggagaagctaacatatcatgacttggaagactcaaaatagtagagatttcaattctccctgaattgatatccaggttgtaatgagttgagtttggcccctcaaaagatgtgtttacagcttgcagcgagccgagattgcgccactgcagtccgcagtccggcctgggcgacagagcgagactccgtctcaaaaaaaaaaaaaaaaaaaaagatgtgtttacatcttaatccctggaatctgtgaatgctaccttacttggaaaaagagtctttgcagatgtaattattttaagaatcttgacatgaggagatcatcctggattatctgggtgggcataaatccaatgacaagttttcttacaggatacacacacacaggagtacacagacacaaaggagaaggcaatgtgaagacagagcagagggaaatgcagccacaagccaagaaatgttaccagtgccagaagctggaggaattaagaaaagattcttccctaaaacctccagagggagtgcaaacttgcttgatcctctgatttcagactcctggtctttagaactgtgagagagtaatttctgttttcttaagccatcaagattgtgttaatttcttacagtagtcacagacactaatacacaggttgaacacaatttctttcaaatcttatcaagtttttttttttttttttagatatagacaagattattgcaaaggaaatgctaccagaatagctaacctaatttttaaaacgaagaatgccatgggagaaatgagactactcaattttaaaacttattatatagatacagtaatcaagactgtgtgttactggtaaagggatagacacaccgatgaacagaagatccagatatggccacacgaatatgcccaactgattattgaaaacagtgcaaaagtaattcaatggagaaaaggtagctttttcaacagatgatgctggagcaattgcatatccactggcaaaaaaatgaacctcaacctaagtatcactacttattaaaaaattagctcaaagtggatcacagacataaatgtaaaatgtaaaaactttttgaaaaacataggagttttcttcaagttctagggctaaccaaagagtttcttaggcttgtccccaaaagcataattcctaagggggaaattaataaacttcataaaaattaaaaacttttgctttaagagaatccccaataagaggatgaaaagacaagttatggagtgggagaaaatatttgcaatatccagcaaaggattattatctagaatatataaagcacccttaaaagtcaacagtaaaaaagctgtagtgaaactggatcactcatagattgctggtgatatgtgaaatggtaaaccactctggaagagagtttgacaatttttaaaaactaaacatgcaataactgcatgacccagcaattgcagtcctggtcatttatcccagggaaatgacagtattacaaaatcgtgtacacaaaatcctatacaagaatgtctataggagattatattataatagccccaaactggagataacccagatatccatcaatgagtgaatggttaaacaaaccatggtacatctatactttggaatacttgccagtaatcaaaagggttaaattattgattcattccataaactgggtgaatccccagataattatactgagtgaaaaaagccaattccccaaagggtacatattatatgatttcattctttattctttctttaaatgacaaaaatataaaagagtgaacaggttagtggtttccactgtctaggcctggggagagggaagaatgtgtgcggctgtgaaaggacaacttgaagggttcttgtgatggaaatttcctgtatcttgatggtatcaacatcaatattctgcttgtgatattgtactataggtttcacaagatgttactactgggggagactggataaaggatcctttggaactctctgtattatttcttacaacattcatgtaaatgtacaattaactcaatataaaaaaagtaataaaaaactgtcagccaatcagaacatgtgttcaggccagatattgcctgctggctatactttgcatactttgatatgcataataaagtacagtgaaggcagagataaaggtgaagaaaaaagttcagtatgatgaggtggaagagaggatttgtgggctgatggatagagatactctataatagctgtgggacatgatgaaagtagatagaacagagagaggatttttgttagtgatgcattctgtgtatgtgttagggggacctttcttgtttccaagaacttcagggaaagatattaaccaatgtgttttcttaagcagtgctattgcaaagcgactgagccacatagatctagcattgcaagtgttacaagtcaatgttaggaaacccttgtggttacctggaagagactgaagtagtgtaaataagagatttaagtgagatatggctaaatgtccatatactaacaatagtgcgtgttgcttgccttgcagatcccgctatccattttctcttggcacgtgctcatggctactggcacctattcctagtaaggggaagcttggctctgaacaggcccctattccctctccttgtttccaatttgtacttaggattctaaagtaacagtactcaggatatgtatggagacattatctcctggggcttgtgaggctggatagagggatttgataaggtgctgcaaggtctgtacgatctctctgatctgagatcacactgcaggagtgtgtgtgtggggaggaggggggcaatctccctctgcttattatggtcagtttgggtgttctcatgccatttaagccaccaactgcttattctgggccaagagcaaatgagctcaggtgcatggaattgaaaggtaatgagaatgattaatcaaattccttccagtaaagaatgccacttgccagactctgtcctggataaccctcctacaagtgaatcaggggctgggctcttcccttaggtgtctggtatctgagggtagacatctgtgcttggagtgaactcggaatgactggaggccacttttggcatggtgtctttgctttatcaggcttccctgccaaggtctgctcacaatctcctctggccatgctcatttcgttatggaaaatagggtgaacatgagtaatgggaaatgcagttagctgttggggcgagatgggcccagtgatttcctcctgtaccatggaaagctctacatggtgactacaatggtttcaaaccagtgcagagagatacctggggagtgaatcattctgttgttggcatatttatttatctcattatatctatttatctacctttaatctaattttaggtaaatagaaatgagttgatcttggaagactgggattttaacttttaaaatttcttgataagatgtttacaataggcatatcatctactgtacaactcttaaacaataatataaaactgcataagatacatgaacttaagcgtctttagtttttttgagttctattcctgacttggcaactaatgaattagccactcattggggtgtaactttccttaccagtagaatggggctcataatgtctaccttgagagcagataggatggagagtgatgcctgatgcatagaaggtactcagtaagtgttaatccttgcctttgcccaatttcccacctaggagaatttttgtaccttgaccttataaaattccctgatgaggaatctatcccagtagcagtacctttttcccaactgaaggtattactttggtctacatggagtctacatggtaaaagccaattggtcctgtggcacagagaaaagaggagttgattatctgtaaggagtaatgggttctcatatacagtctatgtaccaggaagtgcttcataaaataaacattggtttattggaaggagacagaattactgggaacccagaggagcaggtgttgaaaacaggtaggaaccaatgggactttggaggactaggcagaaggaggaacctggccagatctctgccactctgaatatatttgagaatcattttctctagatttagaattaggcaagaagtatccaattggttgagcctgtcacgtgtctatgccttggctgcttgagcttgggaaaggaagattcttcccaattatgcttctatagcatactcatactccaagataaggagaggctggaatgttggataaccatccccaacccccaatgacagtcatccactaagctctgcattaattagctgtgtgaccatggataaatcatttcatatttttgaccctcagtttattcatgtgtagcatgagaggtctcaaacacaccagcaattttcaacttttattttttaaacaattgcttactttcataaaatgaagttttatttagatacccaagatgtaaaacatgaaaaatgtagacccactataactgggggagttcttgagggtggaaagagagaaccctgctcagccttcctattctgccccctccccagattcccttgcctttgctactggctttcccagccttggaagctactggggtacgttaaggatcctccaggattccatggagcacaattaggaaacaactggattctgcaatcgctcaggtctctttcaaatataccattcggtgattccataactctaagatttagaatgctgctcgttttatccgtatgtattttttgcaccccactctagactttaagacgttggatcttgattcagcatgtagctaattaagaaatttgattaaactttattttctttcaccttaaaaaaaatgaaaccagggaaatcaaacactgcagaagcctcaacattttctctgtcattctttattagttaatggttgtcccatatgcaaactggccagaaaaatctgctaaagaattgagaggaaatttgattgaagtaaaacaaggactcactcccttctaagaaacaacatactttatatatgtcatgtggtttcacacacacaaataaaaaaaatgaaaggaaataaatcaaaatgctaatgagggatacttttggataatagggctatgggcaattttgaatttttttttaaacttcttcctattttctgaactttaagcaacacacacacacacacacacacacacacacacacacacacacacgcatataaaacttcctaatcataaaaaattatgaaaagtgaacacatttgcaagccaaagtaattaagttaatttaaaaagttattaagtcagcacaaaaaattgaaattaattgtgttaaaaatagtgttctattgactttaaacccaatgagccagcacagttataaatctaagcacccacaattcctgaacttatagagaataacctcttaccccttcttatgatgaatgtgccttatttctccagggacagaaggccagtgattgggaaatattctatgtatgaaatggcagttctactggtcacccatacaggaaaggattcactattttggatgacgtttggcttagtgcagatgtttaaatcagtaatagattcaacttacacatctaagaatcctcttctttcttagtaccacaccctggaccttctcacaaggtttagaaggtaagacactctttattcctccatttactgcagtcttgtcctagtgacacctacaaggaagcacttggtaaatgctacgagatccaaatgtcaagactgaacctttaggactacctgtgacaattgttagaccacagcttaccctttgactcctgtgaaaatcaaggagggtgaggagcaactgaagaaaagtcctctgatttttattccttttttccttctataaggagctctaaggtattagattttttttttttaactggcaaaacaaaagagcaaaaaaagtcccattttcagtatctgactgtctccttaaagagagacgggaggataatagagggatagatagatgcgggcagacagaaacagttacagtagccagacagatctatattcagtttattatatttgattttcagagttaattgagtgttttgccttaaaattatctttttcttcctctttctctctttgctgtaatttaaaaggagatagataaaggcaaagaaaaatcaatttaaaagtttgcttttcaaagttgttccatggtcttaggggtcattaattcaaagctagcaccaggtagtcagaggcagatggctttattgtacccctgtgatgaaggttctttgtgactgtaggtgaagggaagaacaggaaggtggaagagtgtcgcttatagcatcttaccaagggacccagaagtcttatatattgtctcttatgggtcttagtttaacatcagatcttcatgttctgcctagcatgatgatgccttacatttgtttaagaaaacacattatctgcaaggtagatataattattcttactttatggatgaacaaaccaaaggctagaatatgtaagtgacctatgtcacaaagctagcaagtggcagaggaagaacttgaatcctggacttcagattctaagggtggtgccatgttcactgcactccttagctatgttgatcaggttatagtttatattgtttctcttttttcttttttttttgagatggagtctcactctattgcccaggctggagtgcagcggtgccatcttggctcactgcaacctctgcctcccatttcaagtgattgtcctatctcagcctcccaagtagctgggactacaggcatgcaccaccatgcatggctaatttttttgtatgtttagtagagacggggtttcaccatgttggtcaggctagtctcgatctcctgactcaaatgatccaccctcctcggcctcccaaaatgctgggattacaggtgtgagccaccgcacccggcctatacttaatattgtttttgaggttatctgcaatgctcacccccagctcacaagaccaatgtagtactttatgtataacaaatgtcaataaaatgacattttatacttcaagtcatttctaatttaatattgaaggaaataatgatttacttaatttggagaatgtctttcatcctcataaaaaaagtaccaaagtatttgatttttttgggttagcatcatgatttcttttttgagttatgctgggaaccaggttatagggcagaagatggtcttgaatatcaaagaaaagaaacacttatctagaagacgctatgtgaccttggggtgaccttaaataagtgacttaacctcttgaaatcttgtttttctcctttccataaagagcttgataatacctgccctacatcctgaaggggctgtttctagagtcacaaatcataattgtaaagcattgctacatgtgaagtgtgattccttgcaggactagggctcctggctgagacgtggcctaattggcccctctcttgggaatgaagacaatcagtcaatgaatagtgagttcctgggaaattctacaacaggcttctttcttgccatcttccatccgtattcctttccctccctactcccagaacatctctgatccaataaggacttcttaaagagagatatgggaagtgcaggcgagtgactgccttctttcctatggtgataatgcttataatgtagtcttatgtttttgtggctgatataaagtatttggcctggcaagtaaaaacacataggcatgtcatggatgtgccagagctgcattcttggaccacatggtggctctgtggctcgggaagaacaggagttttctctgccttttctacccctgtgccacatcctccctcctcaacaaagtgtaatttactcttaaagcagaactcactctcatacttttcaaataaaaatatcacggatctttaatgagtgcctaatttgtgtcagccccagaccagatactcccatatgtgacctcattgaataattgcgcaggtgggatggatattactattgctatttcacaggtcaaaaacctgtcacttcagttacataatgtgcctgaaatcacctagagagtaagtgattgagccaaaactgaaattcgcgcttctgactccaagtgcgaggctcctttgactacatttaggcttattgagtgtatgcgcagctgcaggaaaatggagcctacagcactgtagtgagccattgtcttagtcatgagtgagaaaccagtttgtaaccaacattgaactactgataaggaaattttgagggaaagaagagaaagttctgttaagaaattagtaaataaaatccattaaaaacgttttaataagcacaagattttttttttcttactaaagaaagtaattcatgttcatatggaacaggggttggtacacagaggtctgtgcaaataaagttttattggaacacagtcatgttcatttgtttccatattttttctggctacttttgctctacgatggtagagttgagtgatggcaataaagactgtggcctgcaaagccttaaatatttactatctaaccctttatagagttagctgaccctgaaatagaacacttggaaaacagaagtacaaaggaagtaaaaaaggattaatctagaaataaaccctactgcattttgctgtgtttacttcttaatttttccttcccaatcattaagtttttggagaatttaactttaatggttgaataatagtctttattattaattattattaatataccatacttcaattcatcattttttatatatattcaacttatttctatttttttctgttataaataatgctgtgatgtatatatgagtacataaatctttgttttgctctttgacgtcaacttctagtagtgagattactggatttagtgatataaaaatgtttaagtttctttttttttttttttgtttgagacggagttgctctgttgcccaggctggagtgcagtgacaccatctcggctcactgcaaactttgcctcctgggttcaagcaattctcttgcctcagcctcccgagtagctgggattacaggcacccaccaccatgcctggctaatttctgtatttttagtacagtcagggtttcactgtgttggccaggctggtcttgaactcctcacctcaggtgatccgtcctcctcagcctcccaaagttctgggattacagacgtgagtcaccatgccaggcctaaggttcttgatatatactgaaacattgccttccagggaagttacagcaattcacccttaacttacctgcagagcgtgaaagccaatgcctgtctcaataagccttcattactgctgaggggtgtgattttatctttgaaatttttatcatttataatgtgaacttattctccttttaaatttattgttatataaaatgtttatgtcatagacctattattttctatcaagtatttaagttttcctcttattattttgatgagcttttaattgattaatagtattgttgcttggtattataaatacatactcatggcaaacacttttctttcaattttgcctcaattttgtttatgatgttctttgaggggcagaaatacttgatttttttctctagttaaaactattgagactctttccttttatgatttcttcagttgcttttttaatattaaaaacttttccaagtcagagattagataaatattcatttgcgttgtgtgatttttaaatttaactttttaatctttatgaaattgatttttgcataaagtactaaacaaaattacttatatttgctttccaaagtataaacttttccagcataagtaattcatcttatccctcactgattttcaaggattcctgtattacacaagcttttgtatatatgaggttctctactatgttcagttaatctttcactgatgcttgtgtcagtattacactgttttagttattgtagctttacagtaaagattaacaccgggtacggcaagtcctcctttattattatttatttttatgcatactattttaaaactgtaagtgcttattgggctataccagtaagtatctagagcagtggtttttaagctcctaatttggcccactacctatttttgtaaataaagttttattggaacacagcgatatttatttctgtgttatctattgtgtcatttgcagtacagtggtgcagttgagtagttgtgttaaagactgtatagaccacaaagcctaatctgctttgctgcctcctgatctagaagatttagactaggaattcaagtagacagaaaaccggtgttacaaggtttagaccttacttcttggcacaccccactcattccaagtgggattttagctgttcgctccaactttttgcatctcgcctttaccttattagtaaggagaaagtcaagatagagcaaagactctctaatctgccattggccttcccattatttatattgccgtattgacaacaagtgtttcttccgagtctaacttctctctacgatcctaagcatttttgtagggggtaccaatatataatgttaaatacttccatgtacatctattgcttgaaagaaaatcatttcattgctggttaaatgagtattttagataatctttttaaaaatgttattatttttaagttccacgatacatgtgcaggatgtgcaggtttgttacataggtaaacatgtgccatggtggtttgctgcacctatcaacccatcactaggtattaagcccagcatgcattagctcttttccctaatgctctccccacctccatcccccgacaggccccagtgagtgttgttaccctccctgtgtccatgtgttctcattcttcagctcccacttaaaagtgaaaacatgtggtgtttggttttctgtttttgcactagtttgccaaggataatgacttccagctttatccatgtccctgcaaaggacatgatctcattcctttttatggctgcatagtattctatggtgcatatgtacccctgttctgattatcttgtcactgttcctctgcatttacacaggagtacagaagttgaccacacatctggattagctgagggctcaagataagaaagtctgaggtgctttgatgggaggagtaggaggtatgagctcatgaaaggcaacaatgtttactaagaaggttaattcttcaagtgtgaaggtgtatctaaaagttccttcatgaccttttttgtggcaggtgtggctatgtgctcatgggctactaaagcgaggcttcaacagactttttaaaaattggataaccatatctctctaaggatagaccatttcccacagagaccactcactcaagcctgtttggttgtttatttttatgacagttttggaactctggcatatctcagtgggacatgctagccttctctttgtgtggtctggaatgaccttttatgcactcagcaaggtgctataaaggattgctgtaactagtcagggctccatgagaggctggcaggaacacctaaaaagttgctaatatgtgcacacatgaacacatacacccaatgaagagaaagaaaacagaaaagcaaaggaattattttaaaagtcatatatattttctcatataatctcagaatgatatagagaaaaatgtattgggtgttggcttctataattctcccataaagaactattttcacaacagccaaaaattaagaaaaatgcttctagtattatttttcaccttctcagaatggaaggatgaggtgtggttcttccagcctcaagatatttcatcccttcaaaccacaaagattgattcaataaggttgtgacaagtcctgtgctaaaggaaaaaaaaatctaggatatgaagtaaccaagagaaaggaaaacgtgactataaacaaggaaaaaaggagaaaccaatgagaatgggaaacagaataaaaatattgcaaagagctaccgatgagaaatgcggtttgataataatctttcaagagaagtttggtcttagaagaaaactggctacatcatgctgacaaatacgtcaagatatgcaacagagatggcctaaccatccatggctccactgtgggaaggtcagacattgttgaatatctgtgctcaatgaaatatgtgttttcctaactctgacactcactgttattgcaatgcatacagactcctcaaagatcgtaagccctaaaagttgataagtgttcagagaacaagctctcactcagtacaggaattctatcctgtgatatttcttgagagaatgaaattgttgaattcttagatcttgaaagcagtttaaatcctcgagtagtggctaagactgggggctacagggccagagggcctagatttgaatttatgctgccctgggtcctggctgattctttggttaaatcaaccctcgaagcctaaataagactgtaaaatgaggatgataatagcatccttttgaaatgtagtgtggatttagtgagatgatataaatcatctaacttagtgctctatacatgtaaaatggtcaataaatgttggctattattgtattttatattatcattattatctcttgtagtctactcattttacaaatgaggatcaatctgcagtgggttgtagcaagaagacccttaaaactagagaaatcaaataaaagtgtttaatgccaggtatctcttagttggttggataaattttgggtactagcttccttttgcaggcccaaagtactcatcacataggataatagatttactgcaagaataactctgatttctaaagtattgtaaagtgggtgaaaggaggggagattaaattagctttatctttcagaatccgaaagctgatgatgagttaggagaaaggaagttctgattctctgagctctagatttttcactaatctaccagaaaagagaaaaccattcttctgtgattatatattgtaaacgggggcaagggccattttatatacaaagaattccaaggaagaggtctagcatgtgaaaatacatgtgattttttttttttactttttttaaaattaaactttttattttgaggtaatcgtatattcataagcagctgtaagaaataatatagcaagatcccaagtacactttatacagtttcctctatagtaacatctggagaaactattgtgtaatgtaacaaccaggttattgacgctgatatcatcaagatacagaccatttccatcaccacaaggatccctcctgttaccctcttatagccatactaacttcccgtaggcctatttatgatatccctattctgttccattgacctgtgtctttttgccagtactctgaagtatttattactgtagctgtacagtaagttttgaaatcatgtagattgattcctcctacttcatttttctttttcaatattgcttcaggtattctagtttcttttaatttccatacacatttttaaataatcctgactatctctcccaaaacaatcttgcttggattttgacggaaattgtgttaaatctgtatatcaatttgagagaattaaatcttcactatgttggggtttcaatccatgaacatagtatatttcttaatttattaagaccttctttgatttttaataaacattccatagttttcagcatacaaattctgtttatatttttatatctaagtgctttaagtttttgagcaatcataagtagtatttttaattttggtggctacttgtccattgttcatatagaggaatacaacagacttttgtacgtttatcttgtgtcctgtgaccttgctgaactcacatattggttctatgtgtgtgtgtgtatgtgtagattacttgggattttctacatagaaattatgttatctgcaaataatgacagttatatttgtttcttccagagccgtatgtatttttttaaatttccttattttactggctagaacttccagcactgtgttgaataaaaacagtgtgagcagacattcttactttgtttatgatcttaagggcaaagcattcagtcaagcaccatggttagctattggttttctgtagctgctctttattaagatgaagaagttcatctctatttttattcttctgagagtgggtgttaaattttgtcagatgctatttatgtgtcaattgatataaccatgtgtttttttcttctttagctgaagaatgtgctagattacattgataggtttttgaatattgaaacaacttgcatccttggagtataccccagttggtcatggtatataattctttgtatatattgttaaattctgtttgccaatattttgttaaggttttttgtgtctatatttataaaggatattgatgtgtagttttcttttttgtaccgtttttgtctcattttggtatcacgataataacttcataaaatgaattgcagtatctcccttttctctattttctggaagttattttatagaattagttaattaatttaaatgtttggtagaatattccagggtaaccatctggacctagagattttattttgggaagtattttaattatagatttaatttccttaatagttatgtagctattcaaatgatctcttccatattcaatgatttggggtagacagtgtttttttgaggaattggtccatttcacttaaattatcaaatttatgtaagtattatcaaatttatgtatgtattcctttattatccttttgatatgttcgggggctgtagtgatatcccttcttttatttctgatattgacaatttgtgtcttctgtctaactttgtcagtcttgcaagatgcttgttgattttgagcttttcaaggaatcatctctttgttttattaattttctatacttatttcatttttactttcattagttgttgcttttgtctttatcttccatttactttggatttattatttttttttaggttttcgagatgtggccttagattataaatttgacttcccccccttttctaatatatgcagttagtgctataaattttcctctcagcactgctttagttatgtcctataaattttgatatgttttatttttcctttagcttaaagcactatttggttttcttgagacttcctttttgacttatatattatttagaaatgtcttatttaatttacaactgtttacttgtttttgttgttgttgttgtttcatttggtctaatgttggttggcacatgcactgcatatgatttcaattattttgattttgttgaggtttgttttgtggtccaggatgtggactatcttggaaaaaaatgtgtattcttttactgttgggtggagtgtttgataaatgccaattattaatagatactgttagttgatggtgttactgggttctatctctttgtgattttctatctagttgtcctatcgattattgagagaagggtgtgaagtctaaaactctaattggatttatctcatttttccgttttcagtttttgcttcacatactttgcagatttgttgtttggtacagttacatttaggtggattgactcttttatcattatatgttaatcctccctgtttttgtgattttttttgtcctgaagtctaatgtatttgatattaatagagccattcctgatttcttttgattatctttgtgtgatttatctttttctatcatcttattttcatcctgtctgtatcactctattagaattgaattctttgtagatagcatatagttgggtcatgtttttaatctattttgctattttctgtcttttacatatttagactctttatatttaatatcatcatttatatgtaagggtgtaagtctactatttcattgttttctatttgttctctgtgtttctcttttctttttctgccttcctgtttgttacttgaattttttttaatttagtattttgatttatctatggtattttgaatgtatttctttgtatagctttttaagtgattgctctaggtattacacacacatgccacacacactcacacaatcatagtctactagtctcattttaactgtccatgtgaagtgtggaaacctttatgtaatcctccctttatgactctttaccctcccctatttataattttaaatattttgcctacatgtagttagaaccatgtcacacagtgttataatttttatttcaatcatcagacagaatttagaaggctcaaaggagaagaaaagtctatttgtccacatttttgcttactgtgttgttcttcctgatgttttgatttctcttttaaaaagtcattttctttgtttagggaaattttgttagccattatttgaaggtaggtggtctggcaataacttctttcagttttctttcatctgaaaatatgttgagttttcctaattcctgaaggacattttcacagataagaattctagattgacagtcattttctttctgcatttaaaacatgttgtgccacttcctctggcctctatggcttttgatgagaaatatgctatcattcaaattatttttccattataggcaagatgtcatttttctctgactgttttcaagatttttttttggtcttcagttttggaagttctgatatgttattgtagtcagctcagattgccatcacacaatatcatagactgaggtggcttgaacaatagaaatttattttctcactgtctgtaggctacaagtctgagatcagggtgccgggtggtcaaattctggttggggctctctttctggcttacagatgagagagttctctctcttcctcttcctataaggctactaatcctatcaaattaagaccctacccttatgacctcatttaatcctaattgcctcctaaaagccctatctccaagtacagttacgttgggagttagggcttcaacatatgaattttaggggtgcacaattcagtccatagcatgtgccatcatgtggatttaaacattttatttaacctgcttgcactttactaatcttcttgagtcatttagtttgatgtctcttaccacagttggggagttttaagttattacttctttaagtacttttcagccatgcctcctttgtcctcttcctcttggacttcattacagaaatgttacaccttttgctatagtccacagaccctgtggctccattcaccttcttctcttttcttgctgctgtttagattgggtaatgtctatcttccaattaattgatttttctccccctctgtgtcctccattctgctgttgtgcccattcactgcgatttttattttggttattgtagtttatcagttattctgtttttttttcccattcttaaaatgtcatttttgttcttatttatattttctttttagttgcagagacttttatttcattgctgagactatactccttgaagcactttttttgtttgtttgtttgtttgtgacagagtctagctctgtcacccaggctggagtgcagtggtgcgattttggctcactgcaacctctacctcccgggttcaagtgattctcctgcctcagcctcccaagtagctggaattacaggcacatgccaccatgccaggctaatttttgtatttttagtagagacagggtttcaccaggttgcccaggctggtcttgaactcctgacctcaagtgatctgcctgccttggcccccgcaaagtgctgggattacaggcatgagccactgcccctggcctgaagtgcttttaaaatgactgttttagggccaggggcagtggcttatgcctgtaatcgcagcactttgggaggctgaggtgggcagatcacctgaggtcaggagttcgagacaagcctggctaacctggtgaaaccctgtctctactaaaaatacaaaattagctgggcatggtggtgcgtccctgtaatcctagctactcgggaggctgaggcaggagaattgcttgaatccgggaggcagaggttgcagtgagccgagattgcaccattgcactccagcctgggtgacaagagcaaaactctgtttcaaaaaaaaaaaaaaaaaaaaaagtatgtaattctaacatttccatcattttactattggcatctattgattgtctctttttattcattttgagatcatctcagttcttgctatgatgtgtttccattgaaacctggacactttggttattattttgagactctgggtcttatttaaactttctgttttacttggctttgtctgacacttctctgtcggggaaaggtggttgggggaaccacctccttactatttcattcaggtaaaagtctaggttctctacttggccaatattgacacatgagggtggggcttgttactgttgggcagagtttggaggtctggcttcctatgaggcctccattgatacctccctatctaagagtgaaagaaatgccttgttactattccccatgtggcctccattgatactgtgatgataatggtggaattgcctcattatgttgggtgctggcaaaagtcctggctctctactaggacttcattgacataaccccgaggggatggggagtggtgatttgtttctgctgaatagaaataaaaatccaggctccccatgtggtctcaattgacaccatggaggtggagggttttgttgttacatggcagagatgaaagtcctggctcctggcttggccttatctgataccactcaggctggcaagttgagaccccattatagcctaacaagtgtgagggtctatgttcctcagttgttcttcactggactgggtagatatgggaccacactctttctgtgatgtttggctggagtatggaaattgctttgtgaaagttttttgtcttcctggttctttgactagagatagcaggccttctatggggctttttgtcacattaccaatttattcaatacttagtctgagatatgcgatacaaaacaaaaacacagaaaacttattgctgtgtcattctttagatctcaaggtcctgaattagtatacattctcctatcatttcttatggttgttttatatatagtataaaaacaaccatatacataataaaaatacacataataaaatatttaaaaaatcttatgtttgttttatatatagtatctagagtttttagttgtacttaatagaaggaatagaaacaagcatgtatactctattctccctgaaacagaagtctgtgcacttgtttcaaaaacaccaaagcatttgataagtgtatgagaaatgatggtcaattacagtataggctcattttggaaatacgaaggttcccagggagctgtccagggtgctggactctccttaaagctctcagactcagtgcatgagaattttccatttctctgtcttctaatttcttcttctgtttaacctttttaaataccagcctctaactactctgctctacccttccatactcaatgtctaactgctgcctggtgaatttgtggttagttggcccttaataactagtgatgcattggctatttttgacagtaatttttatttgctatccattctagctattcgctagtctggctgaatccttgggaaattcacaacactgtcatagtcttcaattgcttgtgtcactgccacctctagccattaagttgctctgttttgtagaatggtagaaaaagtcctccggaaaaatgcaaggcagcagagaggcccctccctcaagatcctaatagtgtcagagggaaactagaattagctatgtaactaggggaaattttctcacatcatttatctatactacatttactattctttgtttttacaatatctattgtaacagaaaataaataattgaccagtctgtgttttgttttctttttctttcagtatttgcagagaaataactgtaaaacattttacttcattctattagaaatattgaaaggggatgatgcagccatggcagaaaaaggcattattcccctttaagagaaatttctctcagacatagaaaaaatacagcagtctcctattatgagttgaccttggagccaagaagtagtagttattccctccatccattccattactaatacagcaggcaaaagtcagaaagattagtttcaaaatttctataaactcgaagtaaagtttcagctgtcttcctttatctgacagtgtttttactggtggtacttttaagacttaaaccaaccataggcaactattttctcttcttgagctttatgggcatcttttatagaaactttacctagctgtcagtctattaactcccaagtatttagtttgattcatcggattgcggatatttctaaaaggtaccgcaaaaatacatgggcctgagaatcctcaagggggttggattccagtgagctagtgaaggatcttcaaggtgtttattgagcacttattccctggactgtgcatgatgctgtataggcattattaagttaaacctgacaattctctaagttatggacttagtatgtaattgatggtctctgtcttcaaagtggaaatacactctccactgtgtttatgaaaatcactaaatgactgcctggctgggtgtatgcagtcggtttctctctgattaccagtgatagattatcatgattaatcctcaccatttcccattctcctctgcaccctcccccaatttttatgatgaaaaccatcttcatctgtttgtgctgctataataacatacctgagactggggaatttataaacaagggaaatttatttctcacagttctggaggctgagaagtccaatatcaaagtgctggcaggttcagcatctggtgaggaccctgttccctgcttccaagatggtgccttcttgctaatcctctggaggtgacaaatgctctgtcctcacacggtaaaaggtggaaaagcaaaaaggtctaagttagttccctccagtcattttataaagcactagtggggtcccaaaatgccactttttattttttttgggatggcgtctttctctgttgcccaggctggagtgcaatagcgtgatcttggctcactgcagccaccgcctcctgggttcaagtgattctcctgcctcagcctcctgagtagctggaattacaggcacccgccaccatgcctgactaatttttgtatttttagtagagacatggttttgccatattggccaggctgatcttgaactcctgacctcaggtgatctgccctcctgagcctcccaaagtgctgggattacaggcgtgagccaccacgtctggcccaaaggccactttttaataccatcacaatgaggattagatttcaacagtggaaggtggaaaagcaaaaaggcctaagttagttctctccagaccttttataaggcactagttgggtcccaaaaggccactttttaataccaccacaatgagtattaaattttaacataaattttggaagggacataaacattcaattcataaatcaaaggcagatattatgctcctttgcttgaacaaatagccagtctctggcaatggaccattttctaacttgtataaagctggctggcccacataaggattcaatctataactcatacttaacttcttgatctaaccagctaaactattcattatagttaaaaaggcaatacacaatagaggaacatactcactagtttctaagttttaataatttttaatgccttgactagatcaaactagtaagatacagagcctgcattcgattccaggtttgctgaattccaatgttgtacagctttaaaaagggaattattgcatgctttaaaatggtgtttctgtctcactgcatgtggtgagtgatgaatcactgaatggatgattaactgttctgaatggtgcggtttattacacattgtacattgtgtgctatgcaccactaacctgcataggatctatgtgtgttcttctgaatattgaaaaaatgaggaaaatggtactttctatctgcccttgaggatgttatgtgtgttaataaactagcatctttgaagaaaagatccacatgcaacgaccttttcacttgatagcaagaagtctgaattagtgaaaagtcagaataagtgattacttggaattttaaaaaatcaccttcaagaacattcagtagtgaaaacaaagatttactaagtggattgatgggtcttttattgaatatataataattcttaggaaattcctatttatatgaattataagtgagtaggtgctgcccaagtgcttaaaagccgtttgttcttttaagaatctttaccattccttctaagactttggagcgtttggtgatgtccttaacaagccattgtatatagcagaggagtaaagtggaatcacacataaatggtcacatatttcaaatatgaagatgtaaacagtttagggtctactctgagcacctacttagtgtagtagagctgagcagttgaagtcatttgttctgaaatcacataggtctaatcctgaaatcccctcttaaccatgtgactttggacaggttacctagtatctctaacatcacctgtgctcatttctaaaatggagagaatactgattagacatatcttatacgatttgggggctactaaataagataatgcatgaaaagtactatgaatcatatttacaacataataaagatcagctgcttctattattaatattaacactattaaggagtaattttacaaatgatgctctctccctgtgagaggttatgggtaacaactgagtctatatttgttggcatcataagaagacaactccatatatagtattctgcccccggatttctgcttcttgtttgaggtgggagcaaagaaatgacaggttcaatccaaaatatctttgagttgttcagctaaccgtgggattgggtgaaggatttaggaaggctatgttttggatctgaaataaggggatttcaagactcctgtatttactacagaatattccaaacttttgcagctaccttgaaactatgaatcagccaataggaagaaggggccccaggtaactgctgtagaaacactgccggctttcgccctgacttcttttctgctcactgcagtagcaacttagcttcaaaatgtcctctttagtcatgcattctgatcaaagtagttatttaaagattgtggctaatagtagagtagatacccctggtatttcccagagcagagctcgcattctgggaatcttaggtccatgtgacttcctgagtcagtgattcacactgagaaaagagataggtttggcatgacacaatctgcagattcaaataaatcccctgggagaggatgaggctgctgagagtcctctttgctggctgaagctcccagtgtatgcacaaaacaccctgtcccgggccccagatgtgtgcaggtttctaattgccggtgctgcactaagatttgaagggtgagagagttgcaaaatcacgaacaccgagggcggtgttaggaaggcagcttcctgcacactgttgtaggtgttagtgagattatcaattgctccgggagagacacaggactggagggcttgaggaatgtggtggtccctctcttcgttgtttctgccccctgaggttgtgctttctcagggatatgcactctgcacttccattcctgcagtgaaattaactcgagcttggcaggtaagtctttcggctcacctttaaaaagaaaagatatgtgagctgcggtgggggtgggctgttccccatttgccttacattggatgtattttattggtgcaaagtggtatttggaagcttaaatgtggggcagaggtttgaagtagccaaatgaactctgtggccctgagagaagagaaaggataaccaaaagaaagggaaggggactcaggcatttttctcctaataaatctctaatttttcttggaaattttgcctccaggccgatgcctggccccagaacagggtctttggcatgagttatagctgtgatgttccctattttcctttttttttttttttttaagttgtcgctgcatgggagcaggcagacagaaacagggttgcatgttgtcaatacaggctgcagaagtcaataagcagccagacagggaatgaaattggaggaggcagctatagatttcttaggttatttcttgtgagtttttcagaacttgtgtgattcaggcttgtcagatactattttgagctgggctgagacaaacacattcccctagtgcaccagatattgcctgcagcctcccaatttctggaggcacctgggtcggctttcttgggggcaagggaatgtccaaggaaaggtcaggaatgagggaattggaaactatgatgggaaaaacaactgttttactgctctagaatctaacagaaatcataatgtcaccctggagataattattatgctgttagtgatcggcttgagaccagggactgtgcctcattcaattcactgcttggatcagagtgaatactcaataaatgtacaatgattaaatgttagtatcaaaatacatacttttgggataagctcggattgatattctgggttctgcttagaatgataagatggagtaataagggagagtaatgttgattggtagataattatgaagaaatgagttctgttaaatagtagattaatatctgcaagtggaattattagacaaggacacacaaacacagggtctctctgcctgcctatcgtctgtctactttcatctctgtcttgtgtttcacttgattccagaagaatttcaggcagcttatgggacaagtttaatgaaaattaacatcattagggataaaaatgacaaaatatataggcttcatccagcaattgatcttctgtggttctacagtgacatggactacagataactgaaatgtaagggttactgtaacttcatttaagcatttattttaacctcttcttccactaatctcatgcttgatgctacaaacctagagtaaagtagatgaatgttctggccctgctgtgggtcccagtgaggtaaaactagcaaagggcagataacagtcatgcaggggattgagtcatacatggagggttgaatgttttgccctttggaggtgataaagcagataattgggtggctcttctccattccataggctgggctgctctgtcatagcttcacagtgctttgcttactttttctttcccctatttgaaactgaatcaggaagatcatatttcccttccgatcctgcttaataaaatattctattattttctcagctgcaaaagtacactattatcactgatcattccctcctcatctcagagtgtttgtcactggccacagtttatatacaagctatacaggctgcctggaacttgaattggctttagagtggatgctggggaaggggcgggggggttccgggtatctgatgaattcctgcaactgcagggctgggagcctggcggggagccaaggggattgtggacagatgctatgcttgctgggtcgacctggctcagctaatattcccagacttggagctgggggacacattcatttcattcaacccatacaaaaatatggacttaatatcaactatgtgtacggcatggaattcttggcatactcagggtgtcaaacccaggagtccctgttccccaagtagctgactctgctacccacatagcaggtgctgttacattgtctagtttatttctcttggatgggaaaataattttatcctattcacaaatgaggaaaccgagactcacatattatgcaccatgcctaacattgcaggtagtgaatggatgaatcatgagggaaactgtttacttcaactgtactgcacatctgtaagaaaagacattcaggaaagacttttacaagacagtgcatgctaagggctaggaagtttggtgagagatggctcccatggagaagtagaaattaagatgggctttgaagcatgagcagatgacaaaaaagcccaatccaaactggcttaaacagcaagggggtggttattggctcatgtgattgagaagatcaatgtgaccaaggtctggatatttctgtcttgtgtctcctaccgagttggctttatcctcaattcagctacctaaagtcctctggaccctacccccccggaagctgaaggatgactgcgggagtttcagtcccctacatagttcctggggccactttctctcattagccacaactgtggctgggggtagacaggagacagtttattctgtaccctctactaaacagcataggtaagactaatagagaataaattttgcaaaaggaaaatctgggtagaagaaggggaacgaatggttggtagcccactaatgtcccatagcagaggatttagagaggcaaggggagcagaaatcctcacagcacaagcactggtagcagtggagggtgggtaggcctgagttagaagttaagatgccagtcttctgatgttcctgggaatagatgttttggccagctatgtcttattaccagtgcccactgatcccaaaactaccttgctgcatgctgatagcgtcctcctagacctcagaggttggaggtgggggtgagagggtcttagtttactaaggtagaaatcagtgaactggtagggtcagatcatgtcagtggaaatgatcccaagattccctgactggtctgaggctgcatataccctgcactctaatagcccattgatgtcagctcttggctacctgctccagtgaaactcgggtcctaaaagtcaacaggtgctcagtgataaagcagggtacaaggagacaaagagagggtcttagggactgggatccttttgaatggtcctaagaagatatgacatttgttgtttcactaactcctaccaactcatgcctaggtttgctcaaagggcttttgtttctggaggcatatcctgaggtcctgagtgggaagcttagagcttggcccattaaaacagagagctcatttttctttcttttccagaaaagcaaagaagcatcatgggtaatgaaaaaaaaatactgcactaggaggaaccaggagacatgagtttggcctgggatctacatgtactgattcctgtttgactttgtataagcttctttaatttctgctactaagccccctatcaaggtgtttttgttgttgttgttttttctcttatttcctcagatagaattattttatagtcaagctttgttattctagcaaagaaacctggggttatgctttggaaggccatttttttcctgtgtttgaaccaaattgaatttagcaggtgcaaagggctgcagaagagacttggcaattgatagaattatagccaggattcagagggccctcaggagtcctaggcattgactctttgagccctgtgctgaaatcacctctcaagctttcctctatccaggctcttctcttgtgtgtgtaacaccatgccatgcccagccacacttgggaataatctcagattccgtatctttacctctctttttaattttgctgctcagcctctctgtgctgccttcacacatcccattagtcaacgaagtcgtattgattttatatccaaattcctcttaaacccacaccatcttgttcatccccatgttccagtgctgctcctccctcactggactcttataattgctgctttactgtgcatgggatatgagaggtcctccataaatagcatttgaacaaatgcagaatgagataataacacaagtgaaatgacgtgaaacaggcctgagttctcaatcttctacttatatgggatagacatgggttggtatttctagaaataattataggaaagaactaggttcttttgtagtcaactcaccacgtgtctgaagttaccttatttccatctcatgaagatgtttaacaagttcatgtgaaacaaactgtttctactgggaagaccatgtccaagtcttcccacattctgatggaggtgccacaccctcccctgcttctctagggtctcattttaccatcctcattttgccagcctctgggaaacctgatctaagcctatgcaatgctaaaagtgcctgcttaacagcttggaagggaggagaggcaatttatttgctcaactgaattacctgtttacacttctgatctccaaagcatatgtcagaacaagaagagaatagaagaaattgttaacattgcatggaactagggagtccacatataagagaaatttatcacatgaaaatgcttgctttctttggtggtgaatctctttcaccatcagaattgcctccctcctgtcatttaccttgcaacaaattttcctttacaatatctttactcagggtgcctttcctctgaaaacagaaacacctagttgacatctcaccactttgctgctttggttgcagcctagtgatggaatgacaagcccactccataggtgcctctgaatagcttatttcagggagctgcaagacaactatttgctcagaaaattctcacgagggtgatggttttcaaagcaggaaggagagggaattcctggtacacttcccctctgcattgctggagaaatgaagaaacacttgaaggcaaagtcataagtcaggttgaagatggtttctggtggagtggtttggagatttcatctcaagttgagagctgtcctggaatagcttctacctgacttgtttatttctcagctattaatagaaactaacagagtgaggatggtccaggaatctctcccataatgtcctacttcaggacttgaaattctgttagaaattcaattttaatatcatgggataaaacataaatgcatgaatctctttgcagaacccctgccaagggacagccttcaataaatacttacgaagctggacactaggctggttgctacaaatacaaagaaaagcaagtcatatcatttcctaccaaggagctcacaacctggatgatgatgccaattctaagactaacaagaacaggtactagcgtagatggtggtttctatatgctaggtaccattctatgtgctttatgtgctgaagtcattgcattatcacaacaagcctataagactcttaaccctgttttacaggtgaggaaactgggacactgtcttgttaagtgtcttgcctgaagtcacaggattaacatgtacaaggcactatgagagcagagagaaaagaggcgtggtcagggagtaagggagatacatgtacagaccactgatgtggactcatcatctccataactgcccctttgcccttcctttgcattcaaaattattatctctctctcgttcaatttagctatttctatgaaggggtgaaaatccctaacctcttgatatgaatttagcattcaaaggcacctgagatgaggaaggcagaaagtgttcagtataatttgggtctgcttcctgatttttctcaggtttggtcaagaggctgaaaagcaaatagaatgcaatggcaggcacacacacataaggagcttattgaaaagatagatctcaatttctagtatttccaccaggcattatgaccctgacacctttttcagttatggtactctatcagggttactttgattataagtgacaggaaaacccaacccaaactgccttaagccaaaggaaattttagagggtcccataaggagaaagtctaggggttgctctgggtctaggaataccttgatacaagatctcatgtaatattgccgggttttctgttctcttctttgaacttagttctcctcctcttgcctcatgatcacaaaattgatgcagcagctccaacccttactttacttagcttctgtctagggggagatataacagttacttttctgaattatcagaaagagtcctgggcttttctatcgttggccctattaagttacctgcctgtttctagatcagtaactgtgcccatggaaataaactacactgattagcttaggccaatgggtataagaataaatgaaagtggagaaccagtaagtctctgaggaaattcagtttacgctggagaatggtagtgacatcttcaatggaagcttcttgagtgacctatgttatagctctgttagatggcgtggtccctccagggctaacagcatctataatacctatgtttccttattctcctccttacctatcagtatgtctgctctatgctcaggagtattccacagtggctcagtggcatgaataataggaaataatgtctaaatggactataagacataagctggctttttcaatggcccttaagtttcttaactcctgagccagggttcttcttcagaccagagggacctggaacatctttggtcctacagatggtgttggttgggtatcagcatatggggagatacgtgggtgggaggagctgatgtcagaaggcctgagttggaacattggattacaatcaaaggaaaaatcttgagccttcaattgatgaaaaaacctccttagttgaaaaatgcaaaactctggcagactccttctgaggatgatgaagaaaagacaaaactctctgaaataattaaaactccgcaggagggatattattatatatggggttactagaaggggagtcaggattagggttgggattaggggagttattagacagggagtcagggcctcctgccatgggaacttcttgtcagtgatttcttcccttggccctgagataggcagcttggtggagaaggcttatacttcttagctgggtgaccttggataattcacttaatctcgctgggtctagatttcataatctgtaaatgaggataataggaagaccaagttcatgaagaaattatgaaaattaaatgaaaatgttaggtagttatgttcaaactcatgcaagcttggccaatagccaaccatttggtcaacattagtttcagttattttctccctgtctgtaaactctagagtttacaaactcaacaatttggaggtttttcttcccacgcagcacatgacttcacaacactaagcatgtcgatagtgaattaacttgtcattattgtatgggttttattattatgtttgcttttgaattagtattttgagcagttgcatcaaatcacagaacagtggaggggttctgattaagctgagcctttccctgctgcagcacaggccctgggtgagggccatttgtattaggatccctgccttgcccctgactagccagatcactttggtctctgacctcagtgtcctgattagtccacatggggataataataccttcccacaaggttattgtgagaatttgagacaattcctagaaagcctggttcttttatgagctgtgtattcattcattgtcagtgcccactctgtgggattttgcaatttaaaacatcacttccatgcatggctgtctctggaagggtataggcccagaggacctcatctggtgatggggaagccccctaaattgctcatacgtatacatgtaaaatcaaaatccaccagtgcagttctccctgcacctccccctatccaagcatggggccagggtggctgccagattgttttttccaagggttgaccctgttttcatgctcctgtgatttacttacagaagggattatcacattggatgagaggctgaatttcatagacctcaaatgtccttttccaactctgagattttatgtgtctatgttttcatttccaaatagaaaataacccttatcattgctaatggtattcccttaaggaagttacttaatctttctatttctcaatttcttatttgtagaatagaatggattatattccctacatcctaggatgggtgtgagatttaaacaaagaatgcatgtaagatgttcagcacagtgtagtaagacgttaatggtgctcactgatagacatttcttatttgggacataatagagtgacatttcctgactcacttgccattggaaggggctatgtgactaagtctggccagtgagctgtgagcccaataaggtctgtgacttctggatcagggcactgaagtgtgcatgtgtgacttctggcacagcaaccataacattcaacatggtggctgctcagtcagcctgggtcccgagcatcccagccaacataatggcaggtactgtgagagggaaataacttgtggtgtactaaggcacttgaaatttggaggtgtttttttactgttctgtaacttcatctacattgattgatacgcacattgttttatccaagataataataactaatagtacttgggcatttgctatgtgccaggtgagtattggttcacattttgcaataccctagaacatacatattattattaatctcatatttagatggggaaactaaggttagaaatgttaagtaacttacccaaggtcacccagccagtaaggggaagggtggggatttaaacccaggtcacgtgacttcagagcttgagctcttaaccgctgctcacccgactccatagaccaaacctgtggtttcatggtatgatcaactaacattaattctgctttccctttctcttgaactgcatcccctgtagtttcatttggaagtgatttcctttgttggccattactcttcagagtggtggtgaggttgggaagccagcagagtggcctgctgtgggtattgaatgctgatgttgtcataggaagtctctcatttgctttgctttgcttgactactttttggtttttaacctgttatttaagccaaagtatttgatatgggaacaggaagcctcttaagggtaaggaaggcattttgtcttcttacctttgcttgaaggcatcaagatgattgtcttgggtcagagtcagagcctgagatggggattcttctttaagtgatttgttgagggagttcttttggggaaaagctacaaggaagtgagggaggaagagcagggccagggaagctaagcaaagatgtggtatagctgaggtctagctcagcctgatccacagaggagctgagcatgacttgtgacacagagtttgctctgcattgaggcaacagggctaagtttgtttgtttgtttttttggacagagttttactcttgttgcccaggctggagtgcaatggcataatcttggctcaccacaacctccacctactgggttcaagcgattctcctgcctcagctgctggagtagctgggattacaggcatgtgccaccacgcccggctaattttctattttcagtagagacgaggtttctccatgttggtcaggctggtcttgaactcccgacctcaggtggtccggccgaggcctcccaaattgctgggattacaggcatgagccaccgcacctggcctgggctaagcttttatactcctgcatcaggtggttattggccttgggtgtaacctcccagatgtctccaggtgaagtggctcccattagctaaagacaattctgcagagaaggatgaggtgcagcgtaattagcagccaacacctgcagcagttgggggatgagtgcacttgccaggtaaaggagacctggaaggggcaccaaaaacatccactatagtgtttgaggtcagtggcccatctgatacggcttagctctgtgtccccacccaaatttcaccttgaattgtaataatccccatgtgtccatgagagggaccctgtgggaggtaactgaatcatgggggcaggtttttgccatgctgtttttgtgacagtgagtaagtcttatgagatctagtcgttttataaaagagagttcccctgcacatgccctcttgcctgtcagcatgtaagacatgcctttgctcttcctttgccttctgccatgatagtgaggcctccccagccatgtggaactgtgaatccattaaacctttttcctttataaattacccagtcttgggtacgtctttattagcagcatgagaacaggctaatacaccatcctttttggatttgtgatttttttttttctgggggtgatattgtcaagttgagaggaggtagcgaagtgtgtaaggtgtaagtgtagtggtggcatgtggccttgtcagggcctcagcacatgccttttattgacactgaagtgttgtgtgtaggactgtgtaagggcagggtggttgttgtgcacactgtcctgatctttggacctagaactgatacattgtgtctagtcaccaggggagttgtccctttctatctttttagacgggcaagttggctgccaaaaatgtttaggcaattctggtggtgttttcctttctcatgaaataggcggcttcaacctcatagaataagaatcagccactctgcctaacaatattaatactaacaccaatgccctttattaagtgccaggggatttacttgtattaccagatctattcctctccatgaccctgcaagatgggaatcataggatccatttgatggtccagaataataaatattaggaagagtcagcattttgtccaagggcacaccattaaaacagtttgcgtcaaagtagcaaagaaaataaatcacagcatcaaagaacaggagattaagagaaactgaggaaaaaccacacgatctcggaggggtagagaatactatatttataatgaagaagtctgactctttggattaatataaaaatcttgccatgtagcatgtgggagaggagagcaagggaggctcacatgctggagacaggatttggttccaatgctatctgactctaaggctgatacatctttctgtgccatggtgttttaataagcatgtaatttagaaatgtccacccacttacttcggaaccatagatttcattaaaggagagtaaaaacccaggctttggatacagacagacttgagaaacagctctaagatttgggcaaggctggtcttgaactcctgacctctctattcatcctctctatgcctcagtttcctatttgttaaatggggatgatatttagcttgcatgactgtcatatggatgagatgacagcatgtatacaaaatgcctatcatgtaaaaagcacttagtctttaccagttattttaatatattcatgaagaagtttcagttttgtcgaggagaaaagaggctgtgtcagttctttattctctcataacaaactgtcacaacatttggcagcttaaacaataacaatttgttatttcccatgagttgaggggttgactgggtaagccgtccagttagttatatttcatgtaatgttagcttagtcatttatgtggttgcattcagctgtgaacttagctgggcctgggatgtacaggaaggctccttcacaagaccttcacaactcctctccttgctcaattgtctaacccagattcttacatggtgactagatttcaagttctccaaagtggaagcatccctgctgctatggactgaatgtttgtgtccccttgaaattgctatgtcgaagcccttatccccagggtgatggtgtttggaggtaggacatctgggggtcattagagtttgatgaagtcatgacattggagcacttatgatgaaattaatgcttatgaaacgaggaagagatgagatctctgcatgcatgcaccaaggaaggccatgggaggacaaatccagaaacacagctctcaccaagaacccaactatgccggcacactgatctcagacttccaacctgtagaaacatgagatataaatgttcatggtctaatctccatctgctgtactctgttatagcagcctgaactaagacacttgtcttcttaaggtttagcctggaattggtgcaccgtcaattctataagtaaagcaagtcacatggacaatgcggattcaaggggagggaaattaaactcagagtattgttggcagaatggcatgcatgtacttgaaggggaggagtgattggcagccatatttgaagactatctctcttggatacattcatcctagatcattcataaacaaggtgattttatgagaagtttaattcttactgttctgcatttgcagtgcagacatttaccatgatgacttattccctgtagagtgggttaatgttttcagacatggcttcagaggacctggggcttcagttgagccctgaataaaggataggaaattgctatggaaggaaaagaaaagggtctgttgtatgctttgtttttttcactcacatgaaccaggacaaactcagtgtgccttgggtaaggagggtggcgacactgattttaactgtcaaattgatctagagttgtcagatgggataatttaaccctcaaatgaaggtgatttatcctatgtattgtaatcaaatagtcatctaagtcactccccatgagctctggtaaatcacttttagtacatattgaaagtgaccgtattgtattttattgcagaattgcgtcttatagtaataactaatgcatgccattggcttttgctctagcaccgaattacactcacttggaggcacatggatccaggtgggcactgttgcttccatttgcttgtccacagtcagaactgagaggcaggtaggaaaactgtactgctgcagtctttgtagattagctcaattcagagacacctgtggtcttgtgaaatgccaaactttactccagtggcatttgggtcaatgtgaactaggatgggcctagcaattctattaggtgaatgacaagtgctttgtaatgaaacagaaggactttatttaaacagatataaggactggacagaaatcaggcttaaattataccttatctgggctcctgctgtaaccttgtaactggtcttaccacttgtggtctcaagactattttgtcctgcagcccccagagcaatctccctgaaatgcaaggtcaactatgctggcccccggcttaaagccatcatggcttcccaatgcctgtgggatgttgtccacactcttagcttagcttacaaggctctccatagtctggctcctgcccacctgtccagcttcatcttgcgccactgcccattttgaactttccatgctacctacataccgtgattcacttctccacactgttgttcatgtccttctgtctgcctgagatgtgctctcccagcttcctgactctgacctcctttgcctggccaactccttctggtgctggaagatgcaccacaaacatgcccccatgggagcatgcgcagatgctctcaggctgtgctcataatttcctgagtctctcccctcatcatttcacttctcacatagcattattatgacttatttaggcctgtagctctactactagatggactgtgagctccttgaaggcaggaacccatcttaataatatgggtatcccaagaaaccagcacaataactggttggcccagaggagatgctcaataaatgtttgtggtattagtaaatttatgaaaatacctctttgggttgtcacagaagcacatgagcagtggagacaagattctcatcttgaatctgagtctcctttgatctgaggagcttcctgttttgaggttacacatttattttagagacagagtctcactcttgtcccccaggctggagtgcaatggcacgatctggtctcactgcaacctgcacctcctgggttcaagcgattctcctctcttagcctcctgagtagctggaattacaggtgcatgccaccacgcccagctaatttttgtatttttagtagagacagtgttttgccacattggccaggctggtctcaaactcctgacctcagatgatccacccatctcagcctcccaaagtgctgggattacaggcatgagcccccaagcctggcctgaggttgcatatttaggttggaattagtgtgcatgttctccatgaaggtgaaatttgtatggctctgggacctaaaagcctaggcaagggcatagagatatattagcctggggtggactggggaatgttttactagttagcattacgtgagaaattaagcaagtcttacacacatggatttgagacccagaatctgctccatttctggggcttttgtgtgttagaaataagtacagctgattatttcatttatgttggtggatttggggctgccaagcttctctgaagggcccacattttcctttggtactctatttctcattttgcccttagaaataaggaatcttggagtaaattccagaggtggtaggagaagggagaatgcattcccacattggtagctaaggttcataagctcctagaaaagaagggaaagatctctgagcctagaacatgggactcccctttcttactgtaatttgcagacagattggggcaagaaactccatgcagcttggaaacatgtcagagtgtgccttacaaggaaacaaggcaaatacaggaggaaaaaggtaggctgctgtttggtctttagaaacaagcattttcttacatccttttattcccggtatatgtcctatgaaagtcattctggtagcaatggtaatagtactattaataataatgatgtacatatattggatgtgttcaacatgccaggcaccatgccaagctttttacctggcttacttcatttcaatttataactttatgaggcagatacattttcatttctatgttacagatgaggcacagagaggcatagaaacttgcccaagcttggaggagctgggatttcaacttaatctaacacagcactgtatgttctcaagttgtcactatattacctcccaaacaacatttacactaacaagtgcagccaatgtttattgagtgctaactctgtgctgggcacattgccaacctttacatgaagagcctcagttacccctcagcaccatctttggggtgggttattattatccttatttcaaagatcaaacaactgagacttagagattcagtaacatgtccaaggtcacacagctagttcatggtgggacctgagttcattcttaggctgcttgtctcctaagcctctagtccaactttttaatttttttattttattttattttttgatagggtctcactctgtcacccaggctggagtacagtggtgtgatcttggctcactacaactctgcctctcaggcccaagcgattctcctgcctcagcctcctgagtagctgggattacaggtgcttgcctctaccacctggctaatttttgtatttttagtagagatggggtttcaccatgttggccaggcttctcggcctccctgagttctgggattacaggcatgagccaccatgcctggccatagtccaacttttaaattttggtttaggaagtgttttttatcccatccatccagatctccctctcatagtcagttttcacctcttccctggggatacggctcaaggagaactttcatcatcttcaaatgcaaagaccacgtggcaattagagtgtgggggattccaagccccttctggtgattgtggacttgaaaaacagtagtggtaatgaataattaaaggttaaacaaagggaatagttctagagactgggtgaaggggagcctgttttattccactgagtttgaagccagaacaccatgtcttggcactgacatgccttggagacttcgtattgatgatcatggctaactgactctttctcagctctcagtatcattcatagtcaggactttacatgtgtgtgtgtaatgtatatatatctgtgtgcacgtgtgtgcgcgcgcgcgcgcacgcacacacacacacacacacacacacgtaaagtcctgactaccagtgataataatacatagttttttgggggaagaagggatgcctcttgtatgcacagcactcaacttctgcttttgggcagggaagatggaaaaaaaaggtaaaatggggttatttgtcccaagttgacttgacagtctaagcagggggataaggcagatgaatatgtgaacaatgttttggtagattagcttggttagaggattttcaaactttttgaaattataaaacctacaaatatatattttttaaatcacaaaacaaaaccttaatgaatcagtaaaattctcataatctttatacaggaaaggtagtagagaaaagtttatatcagtttgcaactacagatttatgcccttacatatgagtggtagatatgtgaaatatgattattagtaataaagtgaagaggatgttatagagagggatgcaataaaatttatctttttcatcatgttcctcatctgggttaccatgaaactaatgtgaacagtttccagctccaggcaaaacatttacactcctcacctttcagtgctatcatttgttgcatttgggaacaaatgtgcagcttcagggtgagaatggaagaatatataggcaaaagaagagctatgaaatatattaataacgaatattctcacctgaaaactatgaatttcaagatcacacttaaggtccacttcaatttaaaaaatgtcctgaggatctgaataatgacaattggaaaattaaaagagcattgatagcttaagtgccaatgaactcaaggccaagatctcagttttcatgcaaactggtggctctgacttcgttccactgctatagccttggctgaggatcttacaagtgggtttttgaaatggattcgggtggaggctcagggagtgcacctgttacctccatggggcaaaggctcaatgtagggaacttatgagagttggagagcatgatgtgtgctgtgtagacagcacagcatggggacccagcactgccctcatcgacatttctcttagaaaatgtgattacaaggcaggcagatcacaaggtcaagggatcaagaccatcctggccaacatggtgaaaccctgtctctactaaaaatacaaaaattagctgggtgtggtggcatgtgcctgtagtcccagctactcagtaggctgaggcaggagaatctcttgaacccgggaggcggagcttgcagtgagccgagattgtgccattgcactctagcctggtgacagactgagactccatctcaaaaaaaaaaaaaagaaaaaaaagaaaagaaaacgtgattacattgtaggagctggaggattgttactaaatcattcaaaacagcaaaagttaaaaataaaatagcgaccagttaaaaatattccactggtctaacaaggaggatataaataaattatgatgccttatagatataatattaggaatatttttcagccattaaaaactacgttttaggagagtatttaataatggggatattatagataaatacagatagatttaggtataaaatggagactatttctttctttaaagtactttcttgatttttttaagtcagtatatccatctctctttccctagcaaatattctccagagaaacagacaaacatttttcattggccatctctggatataaggtaattttagttttctttctttctttcattttattttttaaaaaagagatggagtctcactatattgctcaggctggcatcaaacttgtgagctcatgcgatctgccctctcagcctaccaatgtgctaggattacaggcacgagccaccacgcctggcctgattttaattttcctatttacatctttctgattaactttttcccttataatcacatattgtctttgcaaccataaaaaaaaagcaacaagcgccagctatttctctagtggcatgttaatcttatgcagtattggaatgggagcaggcagagggcttggtcctagatgctccgtttattagttggctcatggaggataagcctgagcttctgagagtctggggtaaacaagtggccatgccttcctcacaggtccctggaggatcggagaagtgatgtgtgctgtgcaaaggtgaaggtttctagccaaggccactgctggacttgcacttctgcctttctcctgggggtcactttttcactcttcagggcttggctcaaatggtacttccccaggtaaccttccctggcccccacatacgatcaggtttcctctttgaatgcccttgtaacacttcagaactcttatcattgttgcaattttgcattcattcttgaggttattggatgaatgtgtggctcctcctctgaatggtctgtttcgtcacttttgaacatccctccattactggcagatagtagtctctcacaaatgtttggtaaacgaatgaactcttcaatgcaaaggtttagaatcagctggtggggagacagatctagtattttgaggtggttggagggatcatggtgttaaccaagagaaagctcttagcagagtcactgtataatttttttctttgggaaagagtgtgtgcttcaacataccagagagctaaggctttgcactgtaatatgggttaatcaatcaagaaatcaatcaacacctacttatccagtgcagaccatgtgcccagcacaatgctagaggcactaagacttttgggaagtggctttgcctctttctttcagttcacaaaatgaagtggttaagacttgcagaaatcagaagtggaagaatgcaaactgatcagtgattgcaatgactggaaaagggctatgaaacgccagtgcatttgagaccaagcattatggtgatggagtctcacatcctgaaacccagggctaatcctccccaagagagacgtggataggaaaattcccctgataattattgcaaaagtgtcatcttaaaaacaaacaaatatcacaagatgcctccccaaacttgaaagcatgaaacaaaaaagcaaactattcctaatcaggctaattgtagagttagtggctctaaattgtgttggttttgccagttctgccttttggaggtggggacaggggagatttggtttaacttaattagcatttccaactggaaatgtgacaatataactaccctaaactgttgctcagtaaaaatgcagaaggagaattcctcctcagtcacatttatacagaaaccaaggacaggaagagaaagaagacataggctattaggggaaggaatatgtgggctacagatacattcagacgccaaaacttgctgctcattttcaacctctcacctaattttttttctcctcctggaatctatgactataaattcacttctaaggggaaaaaatcagcccatgctcacagcctgctaggagcgcttatacctcccctcctccaaccttccactgcccggtacattattttggaaatttgagcagagttgtctttggaatgacggcgcctcatcaatacagaatttgtgataatctggtccttgggtgggcttgagtttatccacataatggaggtggagtggggagacagaagtatgttaattaagactaaaggcccacaaactcttttcaagtaaagtagccttagctacagctgattcttttctcttagtaaaaacattgataagtttaccaagaccccttgcatgttccctgtctccacatgtgctagaaagtattacgttggtgcaaaagtaattgtaccaataatgcatctgcatttattaagtgtcctttaatgcccacttcactgtagcagtccagttagggactattagcaagggtttatagtattattatgaaagaatctggatactagcagtgagaggaagactttccgcttaaggaaatattgttcccgtaggggcacaaatatatgaacaagcgtctgcaaaaactccaggctagggtcagagcatcttaagtgaattccaggaaagtggtttatagtctagatgaaagagagaaatgcatttagcgggggttcttgaccaaactcaaggctccctctttggatcagagtatggggcctaccttggcgggtgcaggggttcctaggcaggtgggaggtctctatttgtgttgaggttgcagctctcttctccttctacattttatctcctacgtttttgctaccatctggttgttttcttaccacattgttcttgcctctggcctgcagtgggcacccttaagaaaagtccatttagatgtcttctttccttgctagtcttcatgtttgtcagttctgaatttgcatccaatgcctgtcctcagtccctgggccttccccttgatgtcttcaatgtgaaagctattcagccatggggactgtgctcctcccttcaccctcctgtcctccaaggaaaatcaggaagtatctggacagactgttggaacaaagcaaaatatttaagttcctgtcatcgtcccactgtggcttttgatcatttctttcagtagccagtttagtttaattatttatagaaagacattcatagtgctagaggaaatgtcctataaagcatttatcaaagaatgagtctttgtaatctgagacatccccagagcaaaagcaaagtatctgggctgatgattcaggtattacctttggagggaagcaggatgagatttctagagttgctggagtttgaatctctgggttgactcagtagataagcctaaaatctgtaggaggtacaatgcctgtgcacggtcccagtccttccaacaacaaaatgagggggtcattcccatatcatcattatacatggagaaactgaggcacagagaaataaagtacattgcccaaagtttctaaaatacatagtgaagtggaatctagatttagagagaggcagtctggtgtaattgctgtgttcttaatactctggactcctgttgtggacatgctggtcccttggttgttcagtgtctgaggacagtggcttgtctgattttctcagcttcctcgagatggatctacaaattggactgaactacagcctcagaagtttataaggagtttcatcttgataatttggtgggactggaagatgtctttgaccaatagaccagtatccaatgtactcaagatggatcagcctgcttctgccacttcctcgatctttaacttacccaagctatttaatttttgaaagtctctgttttctcacttgtagtttcacagtggtctctcattctgtgttgtgaggataaaagagaagagggagcatgtggaaggcacttggtacatagttaagtgtttcagaaatgtttctagattttagctgaggtcctgtggcatcttagagtattgtccaggaatcttggtggcagtatttcccaaattttagcatgtacaggaatgatctgtgggggaagtgtcaaatctgcatattcccaagccccacccaagtgattcagattggaccaggtggtgctacagtggatgcagccatccagatggcaccactgagaaagctggctcacaggccagcaggggcccctcccaccccttgactaaaccctctgcattccttcagactcttcttaccctgaatggagagtgctagaaacgttcttagtagctttctaaaggctttataaggccaacgagtaataatttggtgatttcagaagcagccctcagaataatatattttctaccccttcccccacccactcttggctcctggccctacctccttcacccctcttcgatttgtaccacagttcgtggcattttctgaacctcagggctcctgtctggctagttatttatttagctgaggaactgcagcacctaattaataggaaattagctgtgagtgtaacatttggcccgtagtcaaggcccaagaagttataaatacgcaccacgtgagtggcctgggcacctgattcttggaagatccagaagtggcacttcctgtgcagttccaggaagtgaagtatgtgctgcataggttgtgggtagccaggagcaggcatcacctgccctgaggccagcaggaccatcctggggagcacaggggcctgtctgcttctccccatttcccagagagctcattgactcttctcaacttagctgtcttttcaaaggccaggtgggagaggacacatcaaggaaatgagagcagaggctggaggggacttaggagagggtatagggtcccttacagggtggcccaagcaccgtgatcctccaaagacactaggtctgctgttgtttcagacacttgcattggcttcttccaggggcacgtgaggtacagcttcatctaacaccttgacagtagggactctgcattgaaggggatctcactgccattcacaggttgcagaggaaggggaaaaatcttttccttctactcttctaggttcctggctggggcccctataacaaaagatggattaagaagagaatagcacacaaaattatttactatgttttatgtaacaggggagccttcataaggtaaccaagatttgaagaacagttaaccctgggtgttttttatggcagtcttgatgaagagtgaaaaggcatggagaaacttgatagggcaaacagtgtgaggtaagcatagtgaactccaggaaatgtagctgggcctgtctggattcctccctgggtccctagtcttggcagataagtatgctcccttcctctgggcacctctcatgtgacctgcttcaggggaaggtcagaaaattcttcctgggttttctcaaatttttttagattaaaatattcaacatgccaaagtgctgtattttggggtagtgtgttctgaaccccatcacagaccatgggaactgagcctagaggaggttagagatcctgcccaaaccagagagaggcagagttcagatttggaataaacatgttcagccctcaagtttgatgctgtttgcagaatctcatagtttcctgattacttcaaaaggaaaatcaggctgggaggagaaaaatgtttttaaaagccccaaggaggaaaagactgagggggaaggaggagcaaaagggtcaaggggaaggtaagggcaagtctaggagttccttaggaggcagcggtgcccccacggaaggaggaggcggtgtctgtgggtcagaggcaaagctattttctctagatttgcttgatttcagttatctcactttcttttttctcaacttcccctgcagggaaataggaactgggcaacctgtctattcccttgtgcgagttaaaaatctgctgataaaagtacctattccaattctaagtgtgtttgttatgagccaaaccctggagggtgggaggagggaggtgcctggttccatggcagagcagggccaggaggtaaagctggttggaggacatcagggaacagaaagcacagagtaagtgaaatattttgccagctttatttaaaagatcgatcgaagcctctttaacacaggcttctacctgagaactggtataatgaatctggcatttatgtgactctggaaggagccttccgaaggaggagaaaaatgtaaaagaaattgcatctttgggtgggtcccagaaggggttgatatgaagaaagaaaataactcattgctgatgtcacagagcagaagatggacatggaggctgcatatcacttagactaagtgggacagagtctcccttggaaagaaaaaatgcctctagtctcactcagggaagcaagttatcaatcagagcccaggctaagaacacagatatcactgatgccctgaaagaaagataatacatcttccttttcccacctctacccattagccagaggcatttcctgaccttccactgaagaagaaaggggtccctcctgatttcttgtcctttgggggatgttaccaattctttactatcccaggcagtgcttaggcaccaaatgactttggagtcagaaagagctgagttcaaacatcacattcctgcctgtgagtttggacatgtttgattatctcttgatgacctcagttttctgatttgtttaaaaatataagataatatctactttacagggtttttaaaaggactaaatgaggtaaaagtcaaaaccacaaacatagcacctgccatgtagttgagacttaagaataataagtattgctgttattgttatgcaaataaaagaatcaagaataatacttggtagccactcaataatcagtttctgttcccttgttaaaggtcacatcagtaatagtgatgctagacattttgtctccctccacaactctcccctaattcaaccctaagccaaaacttaggccaacatcaaccctattcccaacaatatgcccagctgtattccccaatcctaaccccaacctagactaaactataaccccaactctatctcaatttccaactctatcccaactatattattcagggttcttcggagaaacagaaccaataggatgtgtatgtataatatgcctctctcctattgagagagagtgaaagagggagaggggagagagacagtgagagaggacagaagagagatttttattaaaagaaattggctcacgtgattatggaggctgaaaagtcccaagctctacagggtgagttggcaagctggagacccaggaaagctgatgttgtagttctagtctaaagactggcaggtctgagattgaggaagagccagtgtttcagttcaaaggccattagacaggacagattctgtcttactgcgggaggtcagcctttgtgttctattctgctcttcacccaattgcatgaagcctatgcacagtcaatctgttttattcaacctacaaatttaactgttaatctcacccaaaaaaacgccctaacagaaacaactagaataatgtttgttcaagtatctgggtacctgatagcccaatcaactttgcacctaaaattaatcattttaatcatcacaccaatcttatccttaaccctattcccagtgatattacaaccctaaccctaagtctaaccccaacctcagaccaataattactattattattattattttttgagacagagtcttgctctgtcacccaggctagagtacagtggcataatcttggctcactgcaaccctccacctcttgggttcaagcaattctcgtgcctctgcctcctgagtagctggaattaaaagtgtgtgcaaacatatatatatatattttttgtatatttagtagagatggggttttgctatgttggtcaggctggtcttgaactcctgacctcaagcaatccacccgcctcggcctcccaaagtgctgggattacaggcatgagccaccacgcccagtcagtaattactattaaatatgcaacatgtgctagatattgttagttcctcagctttcttctttttagtgtggatacaaatcctactctagttgccaaaacttattaatcaatgtgatgaatccgcatcataaagtcaacttaataatatatctccagagtatggacttgaaagggagctgtgcttggaatagattttactcagatagtcacacaagatgatcagcacctgctttggcatgaggagccactcaggcacacagagggagttctatttgttgtgccagctcctgctccattctcctgaccaagccctgctttaatagggtctgtgtggagttaagatggccagtgatggaggcctgggcacaacaccccagagatgtcttaactcagagaagatagatttgtagaccattaggagctgaaaatatgtgttagtattattactcatatagatcacttagttttctgtcagatttttgtctcagacttatcccctatgatgaaaaggaaacttcttgatttctacaaagattcctactgaatcaatgagcattagaattgaaagggatgggctgagcatggtgggtcatgcctgtaatcccagcactttgggaggccaaggcaggaagattgcttgaggccagatgtttgagagcagcgtaggcaacatagcaagaccccacctctaaaacaaatgtttaaaaaaattagctgggtatggtgttgcacgtctacagtcccagccactcgggaggctaaggtgggaagaccacatgagcccaggaggtcaaggctgcagtgagcagtgatcacaccactgcactctagcctgggtgacagagcaacaccctgtctcaatttttgaaaaatgaaaaagaataattattttatcccattgttctcaactttaaaatcactgatgcttgagtcttgtcttggagcaatccatccatctgtggggtgaaccctgggaattagtatttttagaggcactcttctagcgttactatggctaaatgtttccaccagtctggctaaaacttctcatttcatggatggaaaaagtgagactcaaagaggctaagtgactttcataaaagcagacttgcagggacaaagccagcacctaaggttttataaatactagtccagtgctcttgttcagacaccacattccttctcatcttgtttcctcagatttatagccaaaaacaatgggaccatcagggacccaccttaggaccctcatagcgagtggtcctccagctcagcccatgtgcatccagctgaaaggctttcatacctctgccctgcataggtcttgttcagagaagtgggtgcactgtggcagaaacaattctctactaacccatttggaacaataaagaaataaatcctaatccaccaaccttgaccagacagctgaaggttgtgctcacttggtactgaccttgtaaagatggattgcaattttggggagtcgattttattttgtttttatgtttatttttccttctgggtacctagagttcatattcatcctagagagttctgggaattgcaggtccaatgctattagcatctgcttcattcctctgcctttctgcccaactcccttgttttctaattcttaaaaaatttttctattttttaagacaatttatactgaatgaattgttattttaaaataggtgagtgaaatccaccttaagtactgatttgatgtatttagaaaatatggaggcctctgaagcagaccagcaaggcagcctgtgtatttcccctaggtgtggttccctctttattaccagagggtacataggagattctgcattcatttagtcattcattcaaataatgtttatggatttaattttctttaggtccagggaacttgataggcactaagggaaactaaggtgaattactgtcatcgcttgacctcaagaagcttaaatctaatgggaagggaagaagagtatcctcgaacacccgtactgtatgcaatgtgatgttccctaagggtatggcaataggagtataggaatgagtgggattatttctagctgaggatcagggaaggttctgttgatgatttgacattttagctcagttttggaaaattgatgtgattttgacagaaataagtataaatcttttgtgtaggcaaaggaacagctggagcaaagaaagacaaaggggagggaaagtatgtgcttgtgtgttggggagtatatctttggtcttcatatgataggtaggagggagcatctgaaaaaaaaattatgtgtagacctcacggatgcttatgggttgaaactggctttagtgactggtctacttcctcagttttacagattataaagtaataataataatagcaatatttgaacttaactctcattgcatgctttctataggcagttactgaactacagccattacatgaattttctcattattttcttacaacattccttggaggtaagtattattattatccccactttgcagatgaggaatctaaggctcataggtcagtaagccagtaaaaggcagagttgggatttgaacccaaggctacactctttccgtggccaggattttaaccggggtattcagtactggtgccattatgggggaggaaaagatgatggattcattttggacatgttgagttagaggggcccatgagacctccaggagaagaggtgagtctgaagcttgaagatggaataatttgaaataaaatgaatttgtttctgaaagttgtatcctaacgttggcatattcagaacaccagtcacattgacttgccctgcagaatttccagatgggaattctagcagctcacatgccaaggctgctccttagtgtgtgtatggcttgccagacccatcttccaaagctgcactcaggttttttttttttttgacatgtctcagctcctttctccaccatgtgtgcctgcagtactgtctccttttatctaaaggtgttttgcaacttgaccccttgctgcctgccaaggtttacctctgagaagtatcaagctgttcagcattggctagaacaagctcttctgaccctgtcgacccaacagtgaaaaagtgtcagtgtagggaagcggaagatgttaagcatgtgcatgaggaaggaaatagtttctttccagcaggtgagaagcccagagagttttggtggcctgggcaagctcctatgcctcaggtgaaaaagagaagttcagtaaagctgccttgcctggttttaagttatattgtcttctaattccttcttccctcaccttcctcttgtcctaataccttcaactccaagtctcttgtcatttcctgacagactggcaggtatacctgacagactggtataattgttggaatcaggaatgtctgaccaatggggaaactgtggcagtaaggagtggagaaaacttagtgaagggcttgcagtccatgactaagaacacagacttcacgtgatcctgtaagaagacccgtcagggaagagatctaagggttggagtctgtattattcttctattgctgctgtcacaaattacctcaaacttagtggcttaaaacaagatacgtttattagctcacggttctgtaggtcagaagcaaaagcaggctttgatgagtccccctccttagggtcttacaaggctgcaatcaaggtgttgcctgggtgggctcttatctgcagattctgggaagaacccctatccaagctcaggcctattgttggccaaattctatgcctcacagttatgggattgaagtccccattttttttcttgttgtcagccaagagctactcttagctcctaagggtctcttggattccttgtcacgttgcctacatctttgagtgtagcaatggttcatcaaatcctacttatgcttcaaatctctgatttctgctacttgctggtgaaaatgctctgccttttaaaggctcatgtgattctattgggcccacctagataatcttccttttgccatgtacgttagcttgctaggactgccgtaacaagctgggtggctactgtgtttgaatgtgtcccccaaagtttatatgttgggtacttagtccccaatgcaacaatgtgagagttgggacctttaagaggtgattaggtcacgtgggctgtaccctatgaatggatttgtgtcattatcaagggagaacattagttatcattgaagtaggttcctgatgaaaggatgagtttagctcccttcccttttcttgcgtgcatgctctcttctatcttccactatgggatgatgcagcaagaaggccctcccaagatgtgggctccttgaccttggacttcttagcttccagaaacggtaagaaataaatctctgctctttataaattacccagtctccagtattctattatagcagtacaaaatggactaaaacagtggctcggacaacaaaattttgttgcctcccagttctgaaggctagaagtctgaagtgaagttactgatgctccttgacttacaacgaggtgatgtcctgacaaacccatggtaagttgaaaatattgtaagttgaaaatacatttaatacaccaaacctaccaaacatcatagcttagcccagcctacgttaaacatgctcagaacccttatgttaccttacaattgggcaaaatcataaggcaaatcctgttttacagtaaaatgttgaatatctcatgtaatttatcgaaatgttgtactgaaagtgaaaaacagaatggttgtatgggtgctcaaagtaaggtgactactgaatgcgtaacactttcacaccatcgtaaagctgaaaaattgtcagtcaaatcttcccaagtcagggaccgtctgtattggcaagattgattccttctgagggttgtgagggagggatctgttccaggcctctctttggcttgtagatagatgactgtcttcatatttgtatggtgttttccttgtccaaatttccttttttatcaggacatctagtcatattggatttaggccaaccctaatgaccccatcataactaattacatctgttaccatgtttccaagtaaggacacagcatcctgagatactggggtttaggacttcagcatatgaatttagggggatgcaattaaactcatagcaccatatatcatacataatcataacagtcacatcttatttgctcatactcaaaagggagggatttggacaaaggtgagggtcattggaggtcattcttagaattctgcttgtcaccctgcctctgagtcaggatacctgctcagagggatgtgaggacagctatgatgaataaaaagaatactgctgaccatggtgagaacagctacagaggagtgggtgaaggccatgatcaatgggttgcaagtgaacaagaagtgaagaaaatgcagagactgctccactcaagaagcagctgtggccaagaggaggccaggtggtgagaagagagggaaacagaggtgaataacagttccactaaaatccaagagacctgagcttgctagttgtctagagacaactgacagagaggggcttgcaggcggctaaagccattcaacaatttctggttgtccacatgccccttctatgggaacttgacttggtaccaggtagaggattttgtagaactccacatgttattaaatggcctttgcaaagagacttgtgtgcaatctggctgaattatagttcctttggagattcatgtttgcttacttgtggctctgtaactctcagccttaatatcacagaaatgcatttctatctggtcttcacttccctgattctttaaaaattttatgtgattgttcttggaaggaaagctttggtggaatccagacatagtattggccactattgattgagggtctgctgtatgacaggccctgtgagaagggtgcatgtatattagtccttatttcctttttaccaggtagattgttaccttcatttcacaaatggggaaactgagtctcagaaagcttcagggctgtggctgaggttatagcattgctaagcagtattgctctgcctcctgggttagtcaccgcactcacattaaagacctttttcttctgaaagttggcaattttcttttgtcttgataaatgttattttcctaggatgtacttagagcaataaatgttctgtgaaaacaaaagtgtagtgttcactttctattcccctcccagtcccaaacttctgggcttcccagttcacctatttgagaaattacttagtgaaacattttcatctcccacccagaataattcattgccaggcaaagaacaatgcagagacattacagccagtgagactttttccaaaggtcacacatcgacgtccagggatttgtgatggacacagtgcccaaggcacaacatcacatttgcttctctttctggatgcgtttcatcatgaaagggtttgcaagcctccatctgctgacttgcagtgggctgttccccaaaatgcatgccttgttctcatttccaaggagaattgcaaatcttagaaggtattttaagggaatatgacaggagcaggaacccagagcaattggaattcagagtggtggagtgaagaatcagcaggcatggctgccagagtttgtaggcttgagaagcaatgaattctgccaggagtgagagtgcttggtgaaaaccctggaaagaaaatcacaggttaactgggttttagaggcagtgtaggaatctgtcaggtgggcagcaggtagaaggtgggagagaagaacatctcaggtataggagagatacacaggtttaaatgtcagtgctgtggtgccaagtggctcaagtataattgagtatattagtaatgatgccaaccgcccccgtaataataaacacatacatttttatgtcacctactgtatgtcagggtacattaattatattctaagcacattaattatattaactcgtatattcctcagtgcaaccacacaaggtgaatactgttattatccttgctttacagatcaggaaactgaggcacaaggaggaaaataatcatgccaaagaactatcaatgagcagattggggattttattccagcagtttactctacagcagctctgtccagtggaaatttcagtgatgatggaaatgttttgaatccttgcttttagcaaggaagccaccacccacatgtgctattgagcacttgaaatgtggctcgtgagacacatgaattttacattttaattttgatttattatatttaaatgtagacaggcacatgcggctagtgaggacagtattggacaacacagttagttagagtctgcttatctataaccccctgctgcctttcaaattggggagtgtcaagttgattctgtcatgatagttctagcattaaaaaccaccacaggaatcatggccatcatttatttagctcttatgtgcagggcaacatgctcagtgcttcctgtgggttatttcatgtaatatccatgacaaccttatgggtgatggctaagagcatgaactctggcaggtttgaactaccagtgttcaaaacccagctctgctatttgttagttctgcagccttcagcaagttgcttatcctttctatgcctcagtttcctcatttggaaaatggagtaaataatagcatccccttcatgtggttgttatgatgatcaagaggctgtcctttggaagacagcacagtgcctgacatgggacaaattcagtatctgaaggtattgttattattacccttatactttagatgaagaaaccaaggcatggaaaggtaaagtatcatgctgaaaggtacagctaactgagggagagttggaattcaacccacaggtagcctgatttcaaagttcaggttcttaacaattatatggtggtttatttttttcttttcttttctttttctttttttttttttatttttgagacagagtctcactctgttgcccaggctggagtgcagtggcatgatctcagctcactgcaacctctgcctcctgggttcaagtgattcccttgtctcagtctcctgagtagctgggattacaggcatgcgccatgatgcccggctaagttttgtagttttagtagagacagggtttcctcatgttggccaggctggtcttgaactcctgacctcaagtgatccacctgccttggcctctcaaagtgctgagattacaggtgtgatgagcccagcccatcctgtggtttccgatcacagtttctaaaattgtggtttgtggagaactggtactaaaatgcttcagagtgcttgttgaaaatatgattgcctagactcactaaaaactgttcaattagacttttggggtcagagacctgggaatctgcattttaataaatttcccaggtgatttttcatgaacaccttaactaataataaatcaattaaaaaatttaacggtaagagaagtagaaggagagaccaggttttcagatgtagaagataccctggagagtagggttattctgcaaacagacttaattttagaaagatctttctggtggctggtgttgaagatggacttgataaagaacgtcctgggggtagatgtggggtgtggtgatggggctcattagtacagtgacagagtggacagggagggagggacagattctttggatgttttatagtaaaattgacaggatatggtagattactagaaactgaggagaaggaaaattaattgagaatcaaaaataatcctcaggtttctatgacacctgagtgggtaatgatattattaaccaagatggacaaggaattttggagattcagataaacttgaggacttctttggacatccaggtggagagaatcattaagcagctggaaatttggttttgagttcaaaagaggaatatatagcaaaaataaagtttggtgtcctgtcaacactaggggtggtatgtgacctgtgcagtgggtgagattgtcttggagaaactaagtggcaaggctcagcaactcaaatattgccaagggtgaggggttgaaacaagtgtgtgtagtggcctggtataagagaacaggtgttaagctgcttttattgcagctaatctaataactgcccaatcacacagcttttgaaaacactctatcagccacttagctgtacgacactgccccaagctcttagcctctacacacctggcacctcggggtctaagcctactgggtctgaccctattgagagcactcgggtgctgcccatgccagaagagaaggtcaccaaagcctagcccctgagggacaataacactcgagggctaagaacaggagctagtgaaagaggcataggaaaagtagatagaaaagaagtaggagaacaaggacacagctgtgttggagaggctgaaagaaagaaggatttcaatgagagggttgtcagcaagccacatgccaccaagagctcaagctgaagcctggggagaagttttggcatagacttgacaagctggacgtgcttggtgtcttttgccaccagtagagtaatgggggatggagccagggagggaatgagagtcgcaagtggaggcaaagaacatagattactttcttcagtggggaaaggaatgtgaaggtcacttgcttgagggggagacatggttggcacggggttgtttgtaggataagtggggcttgatcatgtttgtagggagagggaacacagagccagtggggtagaaggatctgaagatagttaaaaaaaatgacttttggatcaaaaccccagaggagggaagaatagtttgtatcttgaaaaaaaccagggtacctctttctttgggctaggaggaaaaggtagagaaaagcttagatctaggggcaagaatttgtaattggaattcttgcaagtgtaaatctaggttgtctgtttaaaacaagggcattggtgaagaacaaggataaacgtggtaatgtctacagcacattgagcatctgcacctgtgtgccaggcattgtttagcgctctttgggaattgtcttttttattcctgaaaggcaaatgtaattggcatacccattttacagcccacaaagagaagttaattgcctgtggtcacgcagctagtaagtggttgagctgagatcagatcccaggaagtctgagttcagagcttgctgtagctgctatacagtgtaataaagcagcaataatgatgacttgcattctcatagtactttttttcttaaaactttatccctattttacaggtgtggaaaccaaggcagaatttttacaggtgtggaaaccaaggcgaaatttgctcaactcatcacgcatcttggtagggtcagagctaggactggagctggggtctcttactttctagtcctgttctgcttcccaggaagcgaacacccacaagtagctcctgagtaaattatgttgcatttctgacatctcattccctctcttcctccttctattccagtctgcctactcctaccctgatctggaccccaggccccaaatgccaggaaggtggcctggcacctgctccttccttttggctggaatctttgtcctcccacatgagggcattgcccgcattccccaccaccactgccttgccttagtatgaggggcctcatgcaggcaagcagtggagtagaaggccgcatttgttttgcttttattgttaaataatataaatctcttggctgcaccaccggccagtacgtgagttgtgtgtcttcctgcatagttgctaatgagacagttaatcatttgtttattttgtatgaagagaggtggcagccatatctctcaaaccagacattgggctccaggaccctcagggaagctgcccacccctggcacatgagtcacccacagtcccagcacaatcctgccctgcaggccccatcaccttcttccctgaggaatggccaagatgcaggcatcagctgatgatgatgatgattactgttattgcagctattatttttataaatactcccttccttgagatgcaaaaaaaaaaaaatgtaatttgcaaagatgctttgttgggagataagtaggcttcctcttgggcacggagtttatctcactcgtgcataggttcctagaggtcgtgcaactcacgagataaagctccaggatcctccccagggaaggccagagtcagtgttcagctgttttcctagatccagggttaaagaggtgaaatcaactatgttcgtcctgtaggctccctggggccgaggctgcttttattagagcaaatcaggcctgtccagaagctgtgctatgggggaggagagagccaggaggaggtgaggaggggttggggtggggtgtgctgcagggattgctgtctgcacctgggctgcccaaactgaatgattgtcttaaagggctcccatctcatcgatttgcatgctgtcagcatcctcctgctattttcttggtgtttgtacaaatcctattgcccgaagcttaaatttcaattaactgggtccaactgtctgtgtcctgaggcacagggaatgggctggggttgctttgttttctgctgcggcactccatccttggcagtctgtctgtctgtcttgaacctcctgtcctgaaggctgcacctctctgtgaattgcttgcattccacagtcaggggcagaattacccagggcagggcttatgttttaggagtagttgatggctagatcaagaaacaggagcatgcagtggagtggaatcatccccttaccatggttgatttctagctttctgcttccccctgtgacatggtgagatgcttttatttttacttcctcatccagatatattcttgatctcatccttctttctcctccctattttcttcttctaaatatgtctttttaacctctgcatctttgttcttgcaatttccttcatcagaattttcttcccttccttttcctaccaatccttatcaaaatccatccttcacagctcaattcaagcgtcactccctccaggaagccctcccactgtccttcccagaagacttgaccttgctttctgtgcttccgattccttggatctcacagttctcccttcttagagtcagagctagcatctcattctgtacatcccacagtacagtatcacaccattcatattattttttttttttggttttgagtttgttctggttgagttttgttgtggattgaatggtggttcccccaaaagatatgttacatcttaattgctggaacttgtcaatgttaccttattggaaaaaatggtcatagcagatgtaatgaagttaaggatcttgagaagatggagagatcatcctggattagccagacggccctacatttaatgagaagcgtttatgtaagaaatacatagctgggtgcagtggctcacacctgtaatcccagcactttgggaggcccaggcaggtgggtcatctgaggtcaggagttcaagcagcctggccagcatggtgaaaccctgtctctactaaaaatacaaaaaattagccaggcgtggtggcggggacctgtagtcccagctactcgggaggctgaggcaggagaatggtgtgaactcaggaggtggagcttgcagtgagctgagatcttgccactgcactccatcctgcgtgacagagcgagactctgtctcaaaaagaaaaaaaaaaaaaaaaggttaggtgattgtggtggtgcatgactgtagtcccaactttgggaggctgggacaggagaatcgcttaaacctgggaggcagacgtcacggtaagcagagatcatgccaccgtactccagcctgggcaacagagggagaccctgtcaccccccagaaaaaaaggaaaaaaaaaaaaagaaatacacagggaagatttgacagaaagaggaggagacagtgatatgaagatggagacagagatgagaacgatgtggccacaggccaaggaattctggcagccaccagaagctggaagaagccaggaaggattatccccaagagccttcagagggagcatggccctgccaacacctagatttcagactgttggcctccagaactgtaagacaataagtttctgctgttctaagccatccagtctgtggcaatttgttacagtagccctaggaaagaaagggttctccttctctgaaagggaagacagggagaggcaggaagaaaacaaaataccagcatgaggaacctgtacccttccttccagattttattatcagcttgggtccttctgttttatttcatacaatccaagtcctgttactcccacaccaggccttgggttgtctaggcagctgggtgaaaggccacatttgttttgcttttattgttaaacaacataaggacagggccttgtcatgtgagaacatcaatactgaataaataatatatttataataccaataagagcaattgacatttgtatagcctttacaacttacagattactctgacttacctcattgcgttttgtatttatggtaaacctgagaggtggttgttgagatcctcattttacatttgaggaaatggacagaggtgggaaggggcttgtgtatgaccatacagcagatgtggttgggccaacgctaaaccatcttttggttccaaatctatttcctttaactgtgcacataatattctttgattatgagacccagtaggtcaaatctgtttttaaaattcttttcaaaatgggaatatcctttgcctgagctagggatacctggtttccttcttttcctcaaggtgtgctcaaactcagcagggtttggtagtagtggagaggctgagagaaagccctgcttattcaggggtctttgttttacaagttgtctctgtatgttgatcctctgttattgtttgggtaggcactggggaacctctgtgcttgcatgtgggcatgtacacacatgcactgtgcgctctgccagctgttatccccctctggtgctcactggcataaatctgccacctgatcatctaaaatcccagtgaaaggaaaattgccaggccaggagggtccaggggagaatcaatatatctagtatagtttatatttgtaccttctctccttaagagttacagtgagtgactctactcctcaaatggagcacctctctccaggagagtaagaagatcacataaatagaaagtgagctttggactctaacagacataggttcatattcaactctgctacttaatatccatattggtttgagttatttaaccttgacaatccacactgtaaaatgggtaaataataaataccctcctctcagaagtgttacaaagtttatatgaaataatgtgcttaaaaagctgggtacatagtaggagcttagtcattgtttattttctccctcatacccatacatgattcattctactgttaaaattatgcttctattgtaaccacactgtcatcagggaacagttagtagcattaggttggtgcaaaagtaattgtgtttttttgtcattacttttaaaggcaaaaacagcaatgactttttcaccaacctaatagttttgtcacattgtcctctagtaatgatgccctttttgcaaaggggaagccaagggcttgaagagaggaactgaaatattaagatttcacatcaaatcagagttagggcttaaatagaagtaaaggcactcattttcccactttagtgggaagggaaataaaccaacatttattgacctcctaatataagccatgtccttccctcaaatattttattctcacaagaacatgatgacatgaatagtgatattatccccattttacagatgaggaaacaggcttagaggatttcagttgctgtaggttacttagcagagaggctgccctccttcccagggttcctggccccagggtgcccagctcctgtgtttttctgctccatcatgcggctttcctcggagtcctggggaaaatacagctcaaggagggtccatgtgtaaggatgaatcaagaggagcatctcattatcacccctagttgtcaaagaacagaatctacagccccttgttgcttgtttcctcccagtcattcagctctcaggagtggagttaagatggaacctgactggtaatgtaatgcaggacccaaggtgtttcccataggtcatgttgtttatggatctgatgtccattatcatttgaaggagtgtttggccaggcgcagtggctcatgcctgtaatcccagcactttgggaggctgaggcgggtggatgatctgaggtcaggagtttgagaccagcttggccaacatagtgaaactgcgtctctactaaaaatacaaaatgagccgggcctcatggtggatacctgtaatcccagctactcgggaggctgaggcagaagaaccacgtgaacccgggaggcagaggttgcagtgagccgagatcgcaccactgcactccagcctgggcaataagggcaaaactctgtctcaaaaaaaaaaaaaaaaaaaaaaaaaaaaaggagtgtttgagtaagggagtaaggccacccaagatatttaatacaaggcaggttgtaagtttaagtgagtatagttggagtaaaaatagaagaaattatatctgttcttaaattaaactccagggctgtgttttgcgaaccaattaactaaaacttggagtcatcctgttaggctttgctgagcagtggagggacttgtggggaaatgtggttgcaaaggagacaggagggaagctgaggaggctgaggagccacagatgagctagggagatgcttgcagcatagcacgtcttcctgtttggttattggaaaacctgggtcctagttcttgatctactagctctgcagcataggagtcattatctctccggaactcaggttgtaaaataaaaaggtccaaccagatgatatctagggttccattcagatataagcgtgtgctgttttttgaatgttagtgcagccagagggcctgaaaagtgacggggaggcagagagccttatcagatagaacaagcagcatttcagcagggtgcagaaggagctttggtggctgtctctgtatgtgcactgggtggagaaatgagtgtgggcattgtggttgcattaggcccctccccatgttctctgttctacagtgccttgagcacagctttattatcttaaagcatttaccaagttctagtgtctttgggcagcaagtccctcaacagactgtgagctccatgatgggaaagaccaactattgttcactgtgatagttgaaaaaatgaatgcatccaaatgcttttggattccagtttctctagagatgtcttttatgtgtcatttttgtagtttggtctcttctcaatggaataatagatactaaatatcatattaggatgggcaggtgaaagtgagtcagtgcttgcagagatagatgaacattggaagctgttcttgaggttctgttcagaaagcctgctcgctcttagtccctttcctgcttgtgggagagtgggggtaaagcttcccggcaaagtgtgagtggcaggcaagcctagctattcattggctcacagcttcggcatagaccccatgcccattgctggcctatggcaaggcacagcaagcttgacagtgcgtgcacctgaccttgcccataaccattaatcagccatcatgtccacagtcttccccacttctataaactactgggacagtcactggaggaactgtcattttttaactcagcgcaagttttgttcgctttagatttttgggctactcccacaatttagcctattccctctcttttttccccaaattttatttttatcttggtaccaggtcaatgagttgagtggggcctggggaaggatgataaaaaagaccaaagatacacatgcaagatgggggcgtgcttatgaaactgtccactggacacccactatgtgcttaacattatgctctaggcttttttttttttccattataacatcatcatttcccggatgctttcctcatggcctctctatgtaaggtatacttcatacttgctattatagttaaagttgatgacataacatttaagtgtctaggccaggacctggcacaaagtaagaacttagtagacattaattgatgttgttgctactgtgttcacatttgatagtttaagggtcttcatgatattctgcaatgtaaaaggagaaaacaaacttggttagttggagatagtccatcatttgtagagcaggataaatattgctgatcattaaatcatctcagactttaacaggtgaagaatgagtagctgccctggttaaagatcgcatttgcctcaacctaagttggggctcagaaggggaggggaaggtgtctgttccagtctctgatttgtttctaagtgatttttattgccatcacttctaggtgtctaagtgatttttattgccatcaacttctagttctcaggatgcatgacatggtccctcattccagaatccagcctctgagctttactcgccatttaaagaatggtgttgggcctgagtgtttctgtccatggtgctaaacacagaactctgggactcaaaagcagatggtactacatggtcactctcatctccatagcctgcgagatgagactgctgtgaaaagaaggctggtttgggagttaggaggtctagtacagtttcaatcacttgctgtgttgcctcaggcaaaccacctaacctgtctgttgcagtgttcccattggtaaaatcgagttgctgcattctgtcattcatatttcagagtgctgctgatttctgtgtgagtaaatgagataacagatgctaaagtgggatatgaatgcatagtatgattatgctgcaattgcctctcattcttttaatcatacattttgactgtatcgttttaatttacggaggcaccctaaggcctaataacatataatgcagcatgcaggaaatcaaacaaacagataaatgcactggaggaagaaagaaataacttttttaatatgttgtttgcaagtggctgtatggctgtagaacctggggtgtgtttctaagaggaaagataatgaccagtgaggggccagcccttgtctggaaggagagaaaaactcataaaatctcatcaccactccaagccccaaaggggagacccactttactgtcacagtcctgaaatctcaacattagcttgatttccttttttagcttggtattccttgtccttcacagaatagttgcaatctccctttttgagttaatcatgcttgctatggcctgagatttgaaaatggagtctgtgggtttaagttcttcttttcctagttatagaaacttcataaagcaagtgaggctcttatagcctacctttcttcatctgtgaaatgggctcagtagtcataatatctccatatgggatgattgaaaagatacagttgtaaaaatgggccttataaaaatgtaccagtagttgtcattgttattccctgacatgctctgttcaaagtattgcatgagcaggttttgccttttccccatcctgtgcctttgtgtgttctattctttttactgggtgtatcttcttcatctcttcttttaaaaatctcactcctttaaagcacaggtcaaatactaccttctttgacctccccaaccataataattttttcctttctagaactcctagatagtctatcatctttactgttcaacttatgatctccttgcacggtggcatctagtttagtcattttttttactttcctaaatagattataagaccctgaaagacggctacttatctagcacagtgtgtagcacagagcaattgcccaatacctgttttaattggaatgcaggatgaatattacacagcactcatggccttaggcttttgtaaaaatacaagcgttgctggaggaggtgactcaataggtcatgggtacttgcatatgcattaagaacattgggtttgggtagccaaatgaaggtggaaaatctggaaagaacaagttgaataaagaagcaggagctgctaaaacacgtttttttcactgtagcagtttttcctaggctagtcctggtcttggaggtgctgtgaaaccagtgtattgacttggaaagatcccttagatctctgaactgggacaagggttgcaattcacggacaccggatgttgtgcaatattcaggtctgccagaaggtggcgcattatcactaatttcatggtctggcagctttgctcctggggatccccaaagttggtgtgggcattctgatgggtagctctcctccgcattttgtgtggttcagagcttctcccctcttatcccctcccctgcctgcattccactcagcttctttatgatgtataaagatgaaactgaccccagtcttcagcctgaagagtgccttccattgggcttccacatttgggaaggttcccgctgagatgggacagaagtgtctcagcagtctctcagttcctgcgtaagttcagaaccaactcaaatcatgctctctgcagtggaatctccccaccctgggcgcggagagagtgagcactcggtgcctttttggataaaccaggtaaagaagaaaacaaattactttttagtacactcctttattcctcattccctccgcagcctcctatgacttctgatttcttgtctgaacttcaggaacagcacctctctctgtgtcttcctcatctcactcctatatggtgtttcattctctttatggtgttatcacatttatttatttatttttgagatggtgtctcactctgtcacctaggtaggaatatcgtggcgcgatcttggctcaccgtaacctccgcctttcaggctcaagtaattctcatgtctcagcctcctgagtacctgggaccacagtcacaagccaccaggcctagctaattttttgtatttttagtagagatggggtttcaccatgttggccaggctggtcttgaactcctggccccaagtgatccacctgccttggcctcccaaagtgctgggattacaggcatgagccaccgcacccagcctgttatcacatttattatcttacattttcacacaatatctctaaaatgtgccacagatatttttctctattttttattagagcgttcacgtttatatcacgcaccatttaatttgaccctcacagcagctatgagaagttttggggcatgagcattaatatctccattgtacagatgaagacacacacaggaagagtaagtgattttctcagaaagtataagatgttcaagaacctgttcatcttgttgctaatgtactttactcttcttctcactatggatgatgcaaataaggctcaaaaggaagatatgacttatccaacgtcctaaagtcaatgatggtataaatggggctggaattaatatctctcgattctcaattcagtgttctttgtatcccactaaggaatccttctccattctctaacagaccattggctatctgtctacccaactcatttcctatgtcttcaaactcttaagcacacgtcaatcagcatttgacagagggtcccaaaggtgaatgcctgaggcatatggaaagctcatcaggaattattattttaaatttaaaatggataaaacaagcactggcaagaaatccatcaatctgctagcaatgactgtgcaaatgactgggtataggtattagaggtgtaccgcaatatctctaatactgttacccagtcatttgtactgttattgttagcagattgagaaaagtgttttcatttttctgtttctatgttttcaaaattttcttcagtgagatttttaacttttataatggaaaataaacattacaaagtggaaaaaaatgttttgtgccacaggtttgggatgtgtttgtgcagctgtgtgcatgggagtggctgttgccacattgtgttaaatgggatggaggctgggtagggcaggaactgtgctccagtcttctccaaggacaggtcattgtgtcattcactggttcccattcctcccctaaagccctggctgatgattttcgcacgctttacttaataacttcctccctacctggagcccggtggaatccacaaagccataagcacacaccagcctggtaggttggggcaggtgggaaggagctctgggaggctggggcatcagaacttcaccctctctggtcagagctgtgggctcctgagcttctccctctgcctgctgtggacttatgtaacacattcacaggacttcattttccagtagattgaaagcaaagccgctgttgattttctccaaaatgatctatttggaagtgcaattgcctggaattacatggtggcgcgagaggttagaccttgctgtaaataactttcctctcagccacacaggggctcagctggaagcagtgtctgggctttagatgacggtgtttggggtgtgtgtgtgtgtgtgtgagtgtgaatacatgtgtgcatggtcttggggcctttgctcaccttgctaccacttcttctacctttggagctttgcatcagaataaggaatgagggcagagatggggaaggatggggttgtgcttgtggtttcttttatcagctggtttatagggcctgtctctggccacctcttccccttattgctgcagggtccttgagtcatgtgaggttgagtaactcaagcacagagtgtggagtggcacaaagaacaagcttaagaattggacgtttctgagttatagcaccacatgtgcccaattacaacatacgggaccttagacaattgcttacatctatgacctcctgtgtctttatacattaaagcaaacaaacctaaaccaaacaactggtataaggtgtgggagttgagagtacctacatttcagtattgttgcaagagttaaaggaagtaatgctggagaaatcacactgcacagtgtctgacacttggtatgtgttctgtaaatttagttccattctgtgccctgccttgcctttcatgacagattgaaattaaaagcaaaagcaatgggcttggaaccaggatggcctaatccaaagttgtgaaacatgcaaagtctggggtgtttcacttctttctatactcccttcccgtatagatagccatagcatacatacatgattcccccaaagaaagactgtaataaacgaactctcactgcagcagatgggacttaatgctgtctgctcctggtgggcatttgtattttaagagtcctgcgtaggcacgtagaggacaatgtttaacccaaagatggcagcattttatgcaggatggcatttagatggcagagctatttttagattagaaagtcttacatttactctggccattcttcagaccagccttatttgcaggcgttagaatgggattatgtgctagatcaagtggacatttttctcaaaactcacctagtgttgtccttttcacatttccccatgaaatttagaaaataatagaatcttatcaaatatggactacatcctcaggagaagacttccagacagttctggagaaggcatctagccgcccacctacctaacattttttggaatcctacactgtaatataataaatatagctgacatttatgaaatattttgctaaatttttatgtgcataatctgagttaattcttactacttccggtggtactgatattatgatgccattattatagcatattggccaagagcaaagatgctggagccaggttacttggctcaagtctcagctcaccagtcactagtagtgtgccctaaggcaagctgattctctgtggcttgatcttcttatatttaaaggaggaatataatagtactacttcataaggctgtttggggcattaagtgattcaatgtacataaagtgcttagaagaatgtctggctattattatcaccattaaacatctgagaaaattgtggatgaggggaagggaagtgattttcccagtgacacccagatggtgacagatccaggtcaagatttcatgccttaggactcccagcctagtgcttttttcttggtatgaggaatatgtggaggatctttaatttttcccacattattatctctcaaggcagctgtcagtcataagtaacagcatttcagaatggctgaaaatctagatgagaacaattgaaaaggtgagagcttgtttaattaaactagttcctgaaagcatgtaaaaagaagttttttcataaagtggtgccaatttgggtgcccaccccagcttggcagttgcagcttaagcactagttagtgggcttattaatcaatggcatcagagccaacatccaggctacagctagccttctagagaggtggtgctgccaggtgcaatcccaagatgagagtcaacttgtatgataagcataggtcaagctctgagttttcattagaaaaaaaataagtggctacttcataaaatatgttaattaaccattgatggagttgggatagaatgcgaaagttacattttctttagaaagtataaaaaccctttagagtttttatttcctaaagtgacccagaacaagccttcaatagaccaagtccaataatgcctcatgtgtttcagagggagagggtgggccagatgaggagggtggtcaccaggagttctcctttgtcctcctcccatttctcttgacctctcttgtcataatggctacagttccactgttagggatgtattattttgggcattgatagtgtttaaagagaaatttaatttccaacatctccaagagacaacaaaattatatagcatcttatatggaactctcttcctccctgttcagatgcagcagccaactaggaccatgcggccaactaagaactggaaaataaggcaaggtgccttgggaggagaaagggtggatgatatatgccgattgaccattttgctaaagcccaggtctactttatgccattttgctctgcaaagtgctgctggaagaagttctgtttggaattaagttagaacagggagctctgatccaacataagagagcatcccactcaaccaagataattaagagtttgtcctttcttcattcctttttccagcataagaaagagcatcctacttgttttggattgaattttatcctctcaaaagatgttgaaattctaactcccagaacttgtaaatgtgaccttatttgggtctttgtagatgatcgagttaacgtgaggtcattagggtgggccctaatccaatgagtatgttctcataaaaaggggacatttggacacagaaacagacacatatacacagggagaatgccatgtgaacatgaaggcagagatccaagtgatacatctacaagccaaagattgccagcaaatgaccagaaactaaaaaagaggcatgaaacagactctcccttagagtcctcggaaataaccagctctgaaaacacttgatcacagtcttttagtctccagaactgcgagacaatgaatttctgttgtttatatcacctgctttgtcgtactttgttgccctaaaaaactaatacaccactgaaccaagataattaagagcttatgtcctctcctttccttctttcagtaaatattagatgagagtctactgtgtgccaggcacaataccagatcctgagaacaatatcttagataagatctttgcttttaaggagttcatagactatcagggatacggataagtaagcaggccattactggctgtatgataggtatttcatgtcttttttcccctctagaccactagctctcaaccttcaccatactctagcttctcctgataacttaaaaaaaaaaacctatgtccaagccccattcccaggcattttgatttaggtaccctgtggtgggaacaaggctttggtattttatgaatcttcctaagaaatcccaaaaggctgttattgatgaaaaccactgttttcaaatatacccatcatcagggccccagtccacactaataaagttggaatggtaatgatattttttagaaagcttcccaggtgattctaatgtgtagccaggtttgagaactgctgtctctcctgagaggtagggatttggtctgtctcatttaatgctgtggcctctctacagtgtctgtcacagaatagacagtcaataaataattgttgagtcaggatctatgatgagaaaaacataaggtgctatggtgcatagaagatgagtgctcagggcagtcattagagaactgagacctgaaagatgagttgacttatccaggcaaggagggaagagaagagtgtgtctggcagagggaacaggatatgtatagagccaaggagctggctgtaacttggcatagctggagcaaaatctatgggtggtgaggggtaagactggaaagcggagcaaggactgggtcatgaagagccttgcaagccacgaggagtttggattctgccataggcttgtttgtgttgtccaggggcatagccatgaactctcaaggctgatttttgtttccttggccttgatgctcacccaggtcgagagtagtatcttgcactttttctctttgaagacaaaagcccaaggagggtgtggcattttgatgcccagggctgtaggcccatctcataagaggagcattgccgtctttctggagagaccatcaagtgtcgcaactgcactgcaccccctacatgggaccttccatcaccaggacttgggagttagattccccagccctccttctatacttccacatcttgggtggaccctgggggagcttccacatccctctttacacatccttcccattcctttcagtccagttttacctggacacacatgctaaggatggagagggaggagaagactcagtgtgatattccccagatggtccccttagggagagctcctgggcagggcaggttgatctgtgcaggaggaacctaaccctccatcccaggggcttgcgcatatatccgctgggtgcttgcttgtctgagccgtgctgttggcagcagtgcccgatttagtactctgcagacttcattaacagcctgcctgttccactccgagttcttaatgaagatgttaaataaaatgtgatgttagtattgccatttgtacagcacttcatatttaccaagcacctttagaacgtttttattcttttccaagtgatagccccaagaagtcgattagtactgctgccccattctacagagaggcaggcccttgggagttcattgatctgttgaaagccaggtagccagccaccaccccaccttctatcaccagtgggcattactcaccctcttttgcccagaactcaatttgttgagctgctgtagctcctcagggcccaaggacatctcacattcctccctccaaattccagactttgctctctaaatattattcctcttcatcattcttacaatgttgtgttttcagtttgggaaagccttagtcttctcttggtcaatttgaatgaatttgcaagtgaaatatcctgatggacatcaaatgtctccctgaccatctaaacacacagcacgcctcagggcccctgttgtccatcctgcctctttccaaagcctgtcaatggcactgtgtttgtgtctggcacgatctgtcttctgtaaacagtcgcaggacaaacagcactgttgtcttcctaaatatgacagtcgacacccccctacgacagtttttacttgtgaaaccataaatcagaggctccaagtggcagcatctctaaagaactgaaagaggaagtaaaccttgtaaagaaaagtacaaaaagcggctcaggtttgcttctctgagccttgttggagcagttgaataaggcttattaataggtttacttagctctctgtgccttagttttctcatatgttaaatggagctattaatggaaacacaggtatgtaaagggttttctgctttaatgacataagcattttgggagggacttcttgcaacactatttttgacttcacacttttaaaaacctatcactaactttctttttctagcgtactatgctgtcttcatgttgccttctttgcgtgtacttcatttctttttctttcttcatccggctttctcttaccttcttatcatctgtcattgcattcatttattccttcttccactgtcctaaatctcatcaccttcttattctgttccttatcctagcccatgggagggtcccctctgctattactgactggcttatcccacaggattctgccttttctccccctacaggctctgcaggatttctttccctttctctctctctttctctctttctttctttctttctttctttctttctttctttctttctttctttctttctttttctctttctttctttctttctttccttctttcgttcgttcattcctccttccttccttccttcctctctccctcccttcctcccttcccttcccttccttgcttccttccttcttccttctcctccttctcctcttcttctttctcttcctcctcctcatctcccttccctcccccatcccctctcccccgccacctcctctttctcctcccactctgtggtccaggctggagtgcggtggttcaatctcacctcactgcaacctctgtctcctgggttcaagtgatcctcccacattggcctcccaagtagctggaattacaagtgcacaccaccacactcagctaattgttgtatttttagtagagactgggttttgccatgttggccaggctggtctcgaactcctggtgatttgcccaccttggccacccaaagtgctgggattataggcatgagccaccacgcccagccaggattacttcttgatggaggatttgtgatgtggtgtgggagtacagagcgaggatgatggtggaaagatgcaaggccccctcacttcgttattaggtgatagaggagagggtgacagtgagatagtaaatagctgaggggattctgagttctttgactcagggagctaccttctggtccaggatcaggtagtactgagggttacaaaacaggtcaaaatggcctggcaacacattgtagttcttcaatggaaagaacattgcactgagaattaggattgttaagtcagaaactgtgaagggtctgagactgcagcctacttgcaagctaacaagttaatctgccacaggtagatattatatatatgtatatggtgtatacagatatatatgtgtgtatagatatatctgtatatgtgcatacacacgtacccacactgctgtcagggtacataatgagagaagatacaaactctagatcaaacacaaagatcattgattacttatggcaaatacagcaatcaaggtgatctcttgcattagttctctgaatcctgatgcccatgggtgatgtggtaagggccagatggtagttgcacatatagtggagcctgttaagcaggagacaccccccgctccagtttagaaaattctctgaccttatctagggctgctggtgacctgctcatactcttccctgcagagagagaagaccttaactttactctagaatatgagcaaatcttcagagaaaggagggagacctaactatcctggaatgtctctggggaaggagacagtctctatctttgttatactggtcaggaaacaaatctgccttctgacctagagagagacactctatttcatttccaagaatttttactatgcaaccaacccagaaaaaattgtcagtagagccctttgctcagaggactcaaactgtgcagaaatgtgagatattcacagagaattgtcttccaacagggactcttaggtgtgaagtgaggggcttagacaacattagagacttgaaaaatgtggaatgtgtgtaccaccactctccaaatctatgcccaaggcagccatcactaattaattggggttttttggtgcaaaaccctaggcagtctgtactatactgattattacctgagtcccctctagctgtgtgaaatcatattcttcacgtttcctcctgtgttccatcttttctacttttgtgaatctgtgtatctatttatatctttatctgtctctaagttggggaaaaggagaacatctcttctgaggcaattttgtggtttaagattttcgtacaaagcaagttcttaatcctaccaaataacattctcaatttagtctttaatccatgagaactgtagctattaacttagagaggcttcccttgcaaacagggattaatagaagaataggtgcctgttgttatatctccttctcaccattggctatgaaagtattctccaaattcctctagagtgatacattggagccatctaactaaggagaagactttaaaagaaatatggcgcaggtgaacatttgcttggagaggggaatcctacatcagaatagatacagtctgagactccttccaactctgagattcgaccaatgatgccacctgggcacttggaagatgtccctttacctttgagtcaatttggactctactcccagcccaagtaatcttttccttcttgtgttctatacttcaaattctgcgtttattcagtgggtagatgtggacttacatagctaacatactggggtttctactgaagacctggttatattttattgccagccactgaaatgaaaggaatcaagagaataatgggaaaagtatatgaactgtgagtagggcatcaaaagatagaggatgctgattagctaagtgaccttggatgcattacctagcctcctcgtgcctcaggtacctttcttgaaaatgaagaagttaaggcctgcctggctgtctatctcatggagatattggcagagcaaatgaggtcatgttcagtgtatgaggtgcccagaaaagagatgttggttgaatgcaaagctggcttttgctgctctgaatctcatcagcctctcgtcctgctccaacccatggaaggtcttccctctgctgtttctgactgggtcatcccacaggattctgccctttctccccagcccctgtaggactatgtcttataagggcctgatgggggacttgtggtgcagtgtgggacatacaaagtgatggtggaaaaacccagtgtcccctcaattttttattgggtgatggagtgggatgatggtgagattgtgaatagctgagaagatcttgtttttttgactcaggaagtgtaagcatacaaaaaaacaaactcactttctcgtactatatattcacaacacagtacttctgtgacccctggccgtcaaaatgtgtgaggatttcttcccaccaagcaattctccaatagacaccagctgggtggcctctaattaaatcagattctgacactgtctacctggagatagtgtccagtcctacaggttaagggctcagtcccacaagacggtcctccacttcagatgtcagttacaagtagtaggttgccaactgtgcttctgaccaactggctataaatcggggattcccacaatcccctccccagatttgattgatttgctagagaaactcacagaacttaggggaacgctttatttacatctacccatttattataaaggatattacaaagaatacttatcaacagccagatgaaagagatgcagagtgggaggtaggtggggaggggtttggcgcttccatgccctctccagcacaccaccctccaggaacctcgacatgtccagctgtctggaagatctctgaaccctgtcttttggggtttttgtggaggcttcattacataggcataattgattacatcattgccattggggatcaactcaatctttagcccctctctgtttcctgcaggttgggggctggatagagctgaaagttccaaacctctaatcatgccttagtttttctggcccccatctaggagctatggtggagtccccagccactagtcatttcattggcatataaaagacactatggcgattccaaggattttaggagctgtatgccagaaatggcattttgggagggggtataggaaaatgttggggtggagagtgaggagttggcaaagaccaacaaagaccaaatatgtttttcacactgtcacagggggctactttctcgtcaggagcaggtggcactaagagatacagaacagataaaaatgaggctggctatgtacacagatgaagtataatgaaaaaggttcatggattaggtctgagattctatccctgttgggtcaataattagttggtatgtgactaatgtattgggaagatgcccggtggtctatgatattgggattttttttttctttttgattctttgggcctctgaagataattcagcagtttaccagaggagtacccattctgcctgctccttccctctctaacttcctttctccctccctccacaaatatttatttgtaccttgtttgtaactgaagataagcacctctgaaatcaggcctgttggcatatgtctaaatactctttaactgagagacatatattcaaagaaacgtttttatatgtccataaactgacacatagattgtcaaatccctaataacaaggttcaaattagaatcctgacactaatgttttcaaatgttctaatacaggtcaccgtttttcctggtacaactcttgtgagtcttatgtgtgtgcatgtgttcgcatgcaactgtgtgagatgctttgttaattaacattgtgaagctaagtgctcagtgaaaaaagtactagagaattgcatattgtccttacagaattgtttgtaaatacaatcaagtaaaagctgtattgaaagaggtaggccttgttcagagccatgttactaatctcaagtctaggggtttgctctgagtgtcttggtgtcttggtggccacatggatgttcctttactctgcttattttcaacacaagaaaggttcttgcaaagatgccttggatgaaaaattctgctgccatggctggtatgcaactcattttgcatggatgttctctcggttctaacctagtttgtgttcaggtaattctggtaatgggacatttgcctctcccctgggggaccatttttagtgtctgtccatccaaccagttagtcagagaaaagagccctgatgtaagtagagaaagaggtatttgtagaactgtgggaaaaagaaaaacataacacactgacctgttttaagagtgcagggtgggttcaaggcttttttaaatttggtttcccaagatgttggggtcactataagcttcgagaatggctgaggtccaaatcctaaaaattactttcatctcagaaaatttgattagcaatcagaataattgaagtgtacctttccagacactatttcctaaataaaatgtatgcataagtgaagtcagacctgatttaagatgaatctttcttccattgagcaggcagtgctttggggataaagggaactggttcccaactccagctttgcattgaactgctgtgtgatctttaaatttcctcctaacaaaatgaggagagtaatactttccccatgggcttgaatgagagataaatgaggtgaagccccaagcacaatgcctgttgcagtgtgttcagcacatggtcatttgctttccttttctaggaaggaagcccggcttcctggtcttctgctgagcttaccctgggttcccagaggctcctttggatgccttgatccatggatatcttctaagatggtcatgataatgtcagtcttcaaagtagctgctttccctcctctgtactgcagagaccaggcacatacagaggccgaagggtggctctgtctcctagggtggctgtcaccaggtgccacatcattctgtgtttatgggtttgctctgataagcagatgaggggggtgctcatccattttttaaattcaagacattcaagttcaacgtatgagacaccaggagtaattgtactatgaactgacataaactgcaatgaggaaagaccttctctcttcccctgtcttagattgcacgccaggatgtgataattaaagcatctgtctctctccagctccccttatcagacatcttaatttatttacttgttaaaaactaagaggagaattcatgctttgttggttttcctctttattctactttcattgttacatattaagtgatctcttggcaaaacgaatacataacatagctataattaaatataattctatttggtatggtgtttccctttcaaccattggcagttcttctaatgacaatgaccttgtaatttaaaacatatcctaggggcatctgtttttattctggactactctgacacattggttgaggaatgacaataacaatggcaggaattgggtacaagtgcagttttgttacatgtgtatattacatagtagtgaggtctgggcttttagtgtatccatcacctgaacagtgtacactgtgcccagtaggtaatttttatccctcatcccctcccattctcccaccttttggagtctctaatgtctttattctactcggtacacccacgtgtactcattgttaagctcccacttgtaagtgagacatgctgtatttgactttctgtttctgaaatagttcacttaggataaatggtctccagtgccatctatattgctgtaaaagacatgatttcatttttttatgtctgagtaatatttcatagtgtgtgtatacatatatgtatacatggtgtgtgtgtgtatatatgtatgtatatctcaaattttcctgatccagtcaccagttgatggacacttaggttgattctatgactttaactttgctattgtgaatagtggctgcaataaacatatgagtgccagtgtctttttaatataatgatttcttctcctttgggtagatacccagtagtgggactgttgaatcgaatggtaattctatctttagttctttgagaaatctccatactattttccgtagaggttgtattaatttacattcctacagtgtataagcattccctttcctccataccttgttgttttttttgactttttaataataaaatatgtttttctttctttcttccatgatggtgcacacataatagattatcaatttactcttacatattaattatattaaagatacagatgcatactagatgcaacacagaagaaagatgccttgtttctggccatagatatgacagagagatcaataaaggccacagaattctcttcctgtttattcctgtggttgttgttgggattttttttagatatagcaagtactcagcaaatttttgctgaatacatttacttagaacaaagggacactggcctcctccagccagccacatattattttatatatattattatgcaaaacacagttgttcagtattgcccctttgcaagatgctccttgacctttatctaagggaattaactgctattattattactcattcttttttatgctgcctatttatatattttttaaacttgaaaaggcgagttttatttttatttatttaattaattaattttttttttttttgaggcagagtctggctctgttccccaggctggagtgcaatggtatgatctcagctcgctgcagcctctgcctcctgggttcaagcgattctccagcttcagcctcccgagtagctgggcctacaggcacccgccaccatgtccagctaattttttttgtatttttagtagagactgggtttcaccgtgttggccagactggtctcaaactcttgacctcaggtgatccgcctgtctcggccttccaaagtgctgggattataggcgttagccactgcgcctagctgaaaaggagagtttttgatgaagcacaaatgtgactagacagtaagggaggaggctgttgggatgactgagaaaagaaataaagagtgtcttagaatcatataggtgagagaattcagaagtcattactgtatacccattgaagggattagattctctgaaggcttaaactagacagtctgacttaatctctctcttaaaggaaaagagttgtatttttgttcttcatgcttttaaaattatacaagaaaaaataaaagcaaaatttataaaagcaatttgtatacattgtaaaaatattcaaatatttacaaaacagcatgaagagtaaaattatctcctctgagttccattctctaaggataaaactgtaaaatgcttcaattcttggctcttctgtttactaccaggattctaacatactttcttgttttataaaatttagacagtagattctgactttttgctatgagagtttagggccatatacgtaaatgctatcttccactcatcattcctcctccgaattctcagtcgtattcttacttatccattatcaaggtatattaacattcacattctgttccctaaatgtaattagattttcacatgctttatagttgattctaaagagtttgtttggatagaatgcctactattcattttttcattcatttgtttatttcattcaacccacactgagagactattttgtgccaggtatgagcctatgtgcaaagtatgtgcaagtgttcacagaattgtgtgtaagacaattgaatgagttttgggcaggagaagatactagatgcatatctcaattctatttctaaagatgtattaaaagaaaatttagatgaaaagggttacggagaaggacactatcatacttttagagaaaaagcaccctggaaattgtttagatacctaaatattgtcaagtattaaataaattatggaaaccagatggattggaatcagagccattaaaaattaaaattttgagaactattaaatgatgtgataaaatgtcataatctagcaatttaataaaataagaaactggatatgaaactagatctataatattatcccagttctgtaaaattttaaaaagatgatatgggaaagaaatatcacaagtgatgacagagatttaaggttttttgtttgtttgtttgtttgttttttgtttttgttttgagacagaatcttgctctgtcgccaggctggagtgcagtggcgcgatctcggctcgctgcaacctctgcctcccaggttcaaacagttctcctgcctcactctcccgagtagctgggacaggcatgcaccaccatgcccggctaatttttgtatttttagtagagatggggtttcaccgtgttggccaagatggtctcaatctcttgacctcgtgatctgcccgcctcggcttcccaaagtgctgggattacaggcgtgagccaccgcgcccggcctaaggtatttttttaaatttttatttatttattttttgagatggagtcttgctctgtgacccagactggagtgcagtgacgcgatctcggctcactgcaaactccacctcttgggttcatgccgttctcctgcctcagcctcccgagtagctgggactacagatgtccaccaccacgcccggctaattttttttgtatttttagtagagacggggtttctccgtgttagccaggttggtctagatctcctgacctcgtgatctgcccacctcagcctcccaaagtgctgggaaggtttcttcctttatactcactttcaatgaggaagtgttatcctaactacaaaacaaacagacaaacaacaacaacaacaaacctattgtcttcaaaaaaataaaaagtaacaatagaatcattgccttcaaggacaagattctcaatctggtgaaagagacattttaagaagttctcataatgtaaaatggaataaaatcagtgtctgagtgtctgtacaaagggataaggatggagttttgataggggtctgggcatcagaaaggacataacaggttgcatcatgaagactgagtagtatttctatggacagaggagaacattcctaggcgtgaagggatggaaatgaatgttgagaagtgagctatctgaaattgctggactagagtgtgggctaaaagatgtagaaaagaaagtggtttaatggcttgtggagaaccttggatgctttgctgaagaattagaatttaattgaaaggccatagggagctatggagaaatttttaaagagaggggtggacttgacctgtattttcagatgcaaagtaaagagagcaacctttggcaccagacagacctggagtcaaaatcccagctctgccagttccttaggataggttcttagacaaatgagttaactcttctctatttccttatccattaattgggggcagtgatttcaactttacggtgtgaacatgaggatagaacaacttaatacagagtttcaatatcatgaatgatgaataggtcttttttaaaggtaagaaataatacctggtgatgaaataatctgtacaacaatcccccatgacacaagtttacctgtgtaacaaacctgcacatgtacccctgcacttaaaagttaaaaaaaagaaaatatttggatccacctatgacctataagctctctctttgagttgttctgcctttccagactgaagtaatgtatgtctcacatgtattgattgatgtcttctgtctccctaaaatgtataaaaccatgttgtaccctgaacacctgggtcacatgttctcaggacctctcacgactgtgcctcatgccatggtcactcacatttggctcagaataaatatctttaattaaaaaagaaatatttgcaggatctcaccccctagtctgtgttaaattgtttctattataatgttaaatatttacaactatatttgttataaatttctcaagtttcgtgctctgctacaggtataaaaccaaaacgagtttaaacattataaacaacacaagcacaataaaattaaatgaagcagtattaatttaatagacccatttgtaatcaatatgaaaataaatctttgtggacgatgtgaatatagtactaactgctacagcccaggttattaaagtttggcctttcccatactctgtgtgttatgttgactcagtctttccccacttttctctactccaacttattgtttatgcagtgaacagtggtattatttaaactttgcttagcatgaacacatcttctatgtatcaggtccacctctcttcctcactggcccatcactattaacatctcaccactgtagacatgcatgcaagtgcaagcattgaaactgcatagcaggactcaattatgtagtggttatctagatgattttaaaaatgttatcagtatgaaaatttagatcacacagacatacccacacagacacacatacacacacaccacacaccacagccctcttatggttctacacctcctatttgtaaatacatatatcctagaagtcttattattattgttttgttgttgttgttgttgttttgagatggaggctcgttctgtcgcacaggctggagcgcagtggcacgatcttggctcactgcaacctccgcctcccaggttcaagcaattctcctgcctcagcctcctgagtagctgcgattacaggggcccgccaccatgcctggctaatttttgtatttttagtagaggtgggatttcaccaagttgggtcttattattattgttaatggcagctttattattgttagtgatcttggttaggtagatgtatcagttggctattgctgtgtcataaagcaccccaaaattccgtagtttaaatcaaccagccatttattatttctcatgagtattaggttggctgtacacacctgctgatatggtttgggggcataatggggctgtctctcatctttggtcagttgcacgtgggcttgttggctttgctgatgtggctgagcttcctcacatctttgaagccttgtctgagatggtttggctttgctccatgtgttttcttcacctccagcaagttagcagaggcttgtttttagggtagtctggacacattcttatgctgatcacagagaagcagggaaagaaatggataagtgcaaggtctctttaggcctcatgttagagctggcagactaccacttctgtggcattctattgattgaaacaagtcacaaggccaatccagattcatcagctggagacatagactctatagtctatttctagatgagagaagctacaaactcaaaattcaaagaatatggttatacgtatgtgtgaagaattggaggcacttttgcaatcaatccagtagagcagttaagaacattgaaatctattaggaagtgacatagatcttcttggtgagagggatcctgccttaggaaagaatgaatgtgtgaggtgctctgccagtctttggtgtgggagtgagggagagggaagagtcaaagatggctttgaggaacctgggcttgggtgactgagaagatggtaaagctactgagatgagatggtcagcaggaaaagtaggtttatattagggggcctggggcatgggagaggtcaaagatggagggagaaaataagtttagagtttagcaaagtgggactcttcccacaaggagaaaccttctccacctagttacacaataaaatcgcctaaagagcttttaaaattgataattgagtctcatccaaggccaattaagcttaaatttctgggtagaaggcctggtattttttttaatattcacaggaaatctaatgtatggcaaaataggaatcattatctaaatcagtgttcttcttgtgcccatacgttagaatcacctggaagccttatgaaaaatactgatgcctgggcctcactaccaaagaatctatttagtgagtctgggatagggccttggcatctgtattaaaataaagtctgtctggatatatgtgatgtaatgtaatgcagccagagttgagaaccactgacctagatagttaattttcactgtgaataatcaatgttttcagggttgcaagccatggcaaaggggcactatgacaaagtctctttaagttcttggcaggtccagaattagcatgaaattgctgggtgccaactggggcatggggacaggagcagtcagaaggtgaattctatacacttcgaagacccaacctggatcaacacctggtgtttgaagcacaagggcttgttagtgctaatcctgcatcaagtagagatggtgggaaatcgccctgaaaagctctatagtgtataaaatgtcatgatgctattgaaacccctgttgtcccattcaaaccgagctttctttacagtagcacctgaaaaatacaacttccaccatttcctttgagaaggtaaattcagtctgagatctcagtatttgttttccttgattggaaagctaaaactgcctcttccttgattttgtcccgttagtctgagctttgaccttgttacatgttagataattccttgatatgcttgttgttaatgccttataaatatttgcagaccaattatctgtctataggcagccactgagtcaacaacagaatatctgggtttttttccatgttcataaatcattcttggcagaccttaatcatttgggtttttggctggcctctctgactttcttctagtttatttttatcctccataagcctcatctattttggagaaatatttaattgcataagagagaagttgactcctgttaggtatgacactgacaatcttccctgggttcagggtttcttcagagtggcatgagaatccctttggggatgggagaaggcttgtgaaaaggacatatttatgagtcccaccccagttctctgaggatgggactcaggcatctggaattttcacttctttaaagggtaggtgattcttatataaacagttttagagctattaccaaagttattgcttcaaatattatacttagaggagaagttggggcaatttcttttctcggtgggagaggctttgctccataatcctcgtcagtaatcaagagatacacctttccttaaagagtttccaaaaatgttctgcatgaggaatcaccatttcatgtcagtcttgtatatcagtggggctggttggttaatacatatggattgtattgtgttcatctgacattaagatataagctgaggcaaagtgaagagaggaggaagaatgaatacaatagataaatagtaagatagaaaagagaagagaaatggagatggggaggaaataaagaagagatatttgtgtaaatatggtttcatctatgacaatgtttagtatcacgcttttttacattttgaagcactttacagtataaaaaatccttttatatgcgatcctcacaactgtcctggggtactggaccaggtaagtgttaacatacccatttcacagatggaaaaattgagacttctgacagcaaccttccgaaggtcagatagctagtgtcaaaaccaaccctggaactcaggacttagttctaaagcaggaattttctgccaatcctaatctatactcagcctgggtaacctagacttgttcttgcttgtgtaatgacaaggccttcattctgaatgagtgctctgatgtgatttgatgtagagtggttctttggggagggacatggcactggcacactgaacagagtggacttggtatcctgaggaggtccttggaaattctcataaaaatcaacaagcttattgaaagagctcatgttacatcttataaacaaaataaaactggtacatgattcgtgagtgtcttcattcttctctttcttccctttcttctcttcaacacactcaacacacacacacacacacacacacacacacacacacacacacccccaagaaattcacctctggctctggaatctggagaaagttcaaagtcatgcagcaatgaccgtcagcatgattaggcctactggaatcaacaagataaattcagggcctgatcaccatcagacattttcttggtctaacctattgtggccaaaggaagggaagtctcactcaggtctgctccctctccttcatttacttactgagcaggctttttttgctttagggcatggttggtactgaccctcctgggactataataaaaactaacctgggtaccagggttgaatgttgatgagtttttttaccctcgttatttctcttgatcattacaacagcctggtgatataggtaatggtaatatccaggcataattacgataccattggtctaggcatacttgtataattctgtagatcagctacccccctagaaagtactaaggtaaatttatgcacagagagggtgaaacaatgcaaagggacactctattgctagttggggcttaggcccctcaaatactgaacaggattttggtgaactgggctgcaccacaaagagaagctgggtggacttgaaccaacctaaaagaaaagtcaaacctacctttctgattttggttaggaagggaaaccaaactctgcatccctgctgagaatccccgaaaaagaaagtggctgtaaaagatggaacctaagcctttccaagccagaattctgtgctttgtaggaaaagacaggcatcagaagagaaagcctcaaagagctttgaagagcaagatagcaagatctaggacacagcttactgtttgaggcctaagttcccctcagtgttggaaactcccactattatggccagatgaagtagttttgcctctttcttggtcactgtctttgggatgtggaggtggtgtgggggctggagggaaaatgtgatatcctggggatatgttttactgtgaggaacttaaggatcggggaagttaagtcacttactcaaccaaggtcatttgtttagtgtgtggggaagctcagatttgaactcttgaatcttggcaacaacatttagtaattttcccattttgctacctatcctctctaccaaacaccattttgttcttatgtggaaaattggttctaccctcctgggcttcctctggcaggagcagtgtcattaaaacattgaagagaacccaaagaatatatttttctccacttaatgcttgctcagggaagacatccacatccatgggagttgtctggctcacagtttaggaagtgtcatgcacatggaggtagtctgctagatgaggcttagatcacatgtctatttcatctcactgttcctccttaaaagttcagatgatacaaatggccacactgtcctctaaaagaagcgttggagtttattttgggaaaggggcctattttaagataaaggacaggggctccctattctgccactgtgctggcttgtctccactccacactcagcaaaaatggaatattctctaaacaataggtgactcagcctttgcaaagtctcaggtgaaatggatttagccagcaaagagagaaaatgtctttttttttttttttcatttttccctggtcctgtttgatgataattctcagtgctcagtgctcctttcatccaaagatctgtaattaattaagcctcacaactcccctggcaagtagagagaggtacaaggatgttcatttaaaaccaatcctgtttgatacagtaggactgttaccaaggctctttaaaagaaaaacctttctggccgggcgtggtggctcaagcctgtaatcccagcactttgggaggccgaggtgggtggatcatgaggtcaggagatcaagaccatcctggctaacatggtgaaacctcgtctctactaaaaatacaaaaaattagctgggcgtggtggcgggctcctgtagtcccagctactcgggaggctgaggcaggagaatggcgtgaacctgggaggtggagcttgcagtgagccaagatcacaccactgcactccagcctgggcaacagagcgagactctgtctcaaaaaaaaaaaaaaaaatgaaaaacctttcttttgtgaaacttctttttaatggactaaattaaaaaagaaagggaagaagtaactttatctgggatacctgctgagttatggccacagacagagtcctaagttaggagctctgatgtcattcttggattaaactaggtgtataagctactgctatgtagcaaatcaccatgaaacttagtggctttagacaataataaacatttattgttaatacagttactgtgaatcaggaattcaggagtggcttatctgggtggttctgccttgagatcatagtaaagatgatagcaagggctgcagtcatctgaaggcttgactggggccggaggatccacttctaagatggctcactcaaatggatggtgagttggtgctggctgttggtagaagactaattctgcatgtggacttctgcaaagggctgcttgaatgtcctaattatgaggcagatgctcccctattacaagggacccaaaagagcaaacgtgtaagtgtcagtgtcttttgttacctaccctgggatgtcacactgtcatttcctcaatgtcctgttgactacacaggttagctctcaacattatgggaggggcctacaacaagggcatgaatatcaggaagaagactcactggaggcctgcttggagcctggctactgtatgaagacatattaaacgtatgtccatctgtaatattagtggtcctctgaaaaaccagcttagaggactaattatcattcatctgataagaagagagagtaagagatagggaatggtgtaattaactttctggttatttgtagttttagaaaaaagagccaccattcttcatggttaagtgattaagcctatattggagtgtacataacaaggggtgatgctcccatttttaggagctggatagctgtcccagaccttatagcagatcactggctcctcattgttggtccatggaccaatgttatattaactgctaaaaggcatccctgaggcatttattaaaaatgtggataccagctttctactcttagggattctaagtctgtgcatttggaacccactgtgctggctcaacttatcaagttatgtggggtgagaattatgacttatggcagttatagtcatttgcttagcatctctccatgatctttttcttggtctcagaacaccaactaaaaataagttcctggttgctaagggcatgaatatcaggaaggaattgatagttgccaatgttgtttgcataccatattagttcaagaaagtgcagagagtagaaagttccctaccataagggctactagaaaggcagagaggggatagggttgctgaccaatagcaacagtttggaagattatcattatactgcatcaatatatgcaaggaactggtctaataccaggtacagaagtacttttgcatcctgcatacattttagtccagtggttctcaaatattagtatccagaagaatcacctggagagtgtttaaaagtacagatctttaggtctgcctctgggattctgattcagtgggtctagtgtaccccaggtggttttgatgtaagtgatctgggaccacactttgatatacactgttgtaggtacagcctaacttaattgcaaggtattgacttcatatctatttaatctccagtagcaagagtttaaccgatagagtgggtgacatataaggggtacatgaatgacagttgctaggtgaactgatgacatgcatgaggggtacagggagactggacaggtgtgaaaaagcattttattagcattatctttgtggatattcccctttcagatgataagctcttagaggtaggacctatatgctatttaattttgcaactcccgcagaggttagcatggtaagctgcttgcatcaggcttacaatagatgtgttaacacataggggcaagttcatctgaagtggccaggaattctgcctggttgggaattgattcatggtacccagagcatgttgcatgttgtgctgactgctttatgactttcgaagttgagtgactctaggttattgccaagctctcctctcacctcttccctctttctttcaagtatctcaggtggtattgatagtaaaacagtcttggcattaatgagtgtctgactggagagtgaaatgtaaataagagttgaatagagcacagccaaagcctacaaattaccgctgacaaataacagggcagacaaagagtatttcagccttaccaaacacctctgctacaatcagctaagaacacctgggaatgtcagggtggcagacacagagccaacaacatgatcaagaagaggacatttgatggcaaagagcaaagcagcaagttgcttgtgcattgcttagagaagaagaggaagaagaatgatagaactactggcttcactcaagaataatttattgaacttctactatgtgccagtacttattataggtactagagataataaggtataccaagtagacataaagcttatattttagcaaaagatatagataatggataagcaaatacttagtacatagtacaatgtcacatggtgattagtgtcagtaagaagaataaagcaagggaggggaatacacagtaaaaataaagtaaatataattcccaatgacattgctatatataataatttgacaaatccattaaactaatacttactgagtgcttactatgtgtcacacagtattgggcaatggagatacagtgataagacaagttttgtaatttcacagtgcctaatttttttaggccaggaaaaagactataaacaaagaaagacacataagaaacatatgagatagtgatttgtgctatctagagaattaaggagaactggtagagtgactgggaaggctgctttagtttggttgagggaattcctctccaaggaggtgatattaaattgaaatctgaatgacaaagaggagccagctatgcagaaagcatcacaggccaagtggggagggcacacgggtgaaggccctggacccagcagatctaggaatagaaaggccagtaaagctttataaaccatgaggggctggggtctggttagaataattaagaagagaaataattttttgtttttcatatatatgacctggggaacaaatataaatcctacaaaactatctttctttccatttaaatattgtctagttctttcatcagagacaggtgtaatatttaagtcaattgatttataatatgaatttcttcctgtaattagttctcttttccccagcacccctgagataattcaaaatgcagggcaagtgttattataataaaattttatgttagtataattaacaaaaataccatatagcaatatgccagtcattaagcgtgttgattcatgtagtaactgggaattcttagttaatatttgtctgcagatccatttatcttccataacaccttagatgaaatgtttctttttgggctcgtattcaagatcttggggtgatctttttctgtgtctagtttccatgcaatctgagctctgcagcagccagtggaaatgcccttagttgtcttcagtttctctttatgggtgctgcaatctctttaacccctgtccatacaggaactttgtacactctgctgtattctccatctagggttcacatatcacccaaattctcttctatgtctctgggaagggaagcaattctttttgcaggtcttcactattgtctttttcttttttccattgctttttctgtgctgtctggagaatcactttccataccattgggtcttcttttccccagttaatataccagagcctttctgctcattcattctctacatttcatgcctctctgaagtattaatacctttctctttacactggttacagatgtatatgcaaagatcaagtggatagattgtgtttgctgagaaactttagtgttgaaaatgcaatgcaaatctttaatgtaagtttactgtatatttgagtgtattgtatatttattctccaatataaatttagcaactttcacattatgaatcactaagccttatgtttctccaaagaagggagcatgacttctcaaaatacaatattgttttagaatgaaaatttgtttcatgaccaatgcaaatcagttctgaaattccaaactccctcagccttgaataactttaaaatgcaaatgctacccataaggaacaaatgtcttttcaattattaaaattgaatttcaagatttggtttcttatgataaaaatgtttgaatatatctgaaaaatctttcttaaatcctactattaattaaaaaggataaaagcagaaagttgcaggcaataacaagaacaaagattgagttacaaaaactagaatgtgtttaattttcatagaagttctaaggcattacattagcaccattagggtagggaaacaggcttatgtctctctctgtctcacacacacacacgcacacacatacacaggctaacgggaaaggacagactcatgtacacacacatacacgcacacatagttgagccaatatgctttatgatctgtgaaaattaggctcaacatagtgaccgaattgagagacaggatgttgatcatagttttgctttctaacttgaagaatatagctgagaagccagggtttaatggttttgatattctggaaaataggtatcatgatagtcaaacgtttctgctctgttgggatacaacagaagtatgatgtctgtccttaggaagtttactagtgatttggggggaaaatggctttatattatacaactcaaacagtatgagccagtatacgcttaagcactagatactgcagtgcacagagacaagtagttatgagaatcaagagaaaggaacattattaatactgtgtggggccaacatggaatgcttcatggaggagaagaagtttaacttaatttggaggaaaatacagaatttagcatcattttctctttaatgatagcaagtcatttttattaataatattgattatctctctgttgactcacagattagaggatggaaaagcatgacaaacccacagggtaactatgttttaaaggtttttaaaaaagaagtcagaaaaaaaagagaaagcctttctaagagcctagtcttggggaaaatgtaggagatgcagaagagaattaatggctaatgcttatcattttgtacaaaataaccttgacacaaatggggcaatttaaagaagggtaagtgactcccagcccactcaccaaggttgatggtggaaataatcatggggttgagggcagactggaaaaagaagaccgagggtaggtagctttctcttctacattatgtgtgtttctgatctagaggtaggaagctcatagctgaaggagcattttagaaactcagcctcttccactttccaatcactttaggtacttaacttgatctagctgcaagttagatgtgtctcttttttttccatcctccttcaagctctatgcagagatgtgttagttgtcatatcaccaacgtccaagaagttatagtgaacaaaacacagttagagaactaggataattgtaaatattttttatagcaaaccaatgtgctacaatatgtaagttagggtgtgactatccctgtgcttcataagtgagaaaattattattgctctaagtcagttttccatcttggctacacattagaatcacctggcgaactttaaaaattaccaatgcccaggaccttcccccacctgctctcccaagaggcatagtgagtctgagaagtggcctgggcattggggtttctaaagctccccaggttattctaatgttctgcaaagttgagaaccactcctctaactgctgatataaacaaagtgcagctggagagtttgttaaaccacagactgttgaattccatcggcagagtttctgattcattagatctgggatgggaaccaagaatttgtatttctaacacatccttgggtgatgctgatactgctggttctggggaccacagtttaagaaacgttgatttaaactattgaggtcaagacaattcaggttgtacaaagtcagcatttcgtaaggtttgtccccagaacatacttattaaaatgcagattctgggcacctccctaaactcactgaattagaatgtccaggaatttgcaattttaaatgagctcttccagtttttcttttggacgctagtgaactatggtggaggttaatagttttatttcttatcttgctccaaatattattttatataagttgaatgtgtgaccctatgaaggtttttgtaattattttatgctatattttgtgtgtgtgtggaagaaaacctctatagattggattgcattaggtaccctgaggaatatcagtagtcaaatttggggaaataaggctgggcatggtggttcacgcctgtaatcccagcactttgggagagcagggagggcaaattacctgaggtcaggagtttaagaccagcctggccaacatggtgaatctctactaaaaaatacaaaaattagccaggcatgatggcagatgcctataatcccagctgctcaggaggctgaggcaggaagaattgcttgaacctgggaggcggaggttgcagtgagcagagatcacgccatggcactccagcctggatgatagagtgagaccctcaaagaaacaaacaaacaaaaaacccaaaaaagaaatttggagaaataagcttcgtcatggggcttatattataacaacagactcacctgtttatatagtggctgcaattctcattgcatctgagatgttcaagaggtaactttcaaaaccacacttggcacattcaacataattaggtaattgcacacagcacaggttgtataaaggttagaggagcatctttcaaattttagaggatattaaaattaccaggggtatttgttaaaagttagattcccaagtcagagctccagagagtcccagctctgggtggcatccaggaatctttatttaacaaaagtagattcttatacaatgggtccaggaatctcattttaagaaatagtggattggagaatatgaagtataaaaattgttttcacagttgacctgagttgctaataaacaatttgctatatatttactatttttttcacattttgtaagtcagtgtcctaatagctaggtataagtgtaggctaaaatggcaatgttcaggatacatcctttaagggtgtaatattattacatacatctgtctcctttctcatttacatattgtgcagctttttttgtccctttctatactattcccccttttattaaaaaatggagcagacacatgattaaaatgaggaccaggtcaagtttgcatttagctaagtattcttcccctttatttccctgtcttggccagcttactgtcattcctctttttccctttgttcttttgtctgtcttttcccctaccagtccatgttccatctttcctctacgttgtctctcctttgtgacctctttctgtggccatttcagtgggcatgaagggaaggggtggtcactgtaaaccttgccaatccatatttctctctccacagccaggtggtggtgtagaaagttagtaaagaataaaaacctacacaagtcttctattatattctggtgtgcaagtgtggggttaatagaactgaataaaatgatttttaactaaaactcagagtccacaggtaagagggagagaggtctggacaaaaattgtacaaaattttgttggtgaatgatagtctctgtaggggaacgctgtgcaaaatgagtcttaactgatttagaatatagctggacattcttatcaagttaactgtccactgttttgaatcacaggggctaggataggattatttctttttctttcatgtttcggatttccttctacctgcgaaaatattagctttcactcaagaatcctctcccaggcagaaagaaggaaagaaagtcttgctagaggagaaatcttattaaggctcatggtgattcaggagtgacagccggggctttttcaatggacttatctgctgtcacagagacccactatcctggaagagcccaggcaaagtctgagggttttgaccatcaaaatgaatgactgcaatatgttttgaattgcacagacaggaggagaagtgataggtattctttatggaaaatcacaaagagaaagagctagcaatcttcaagcctttttatcttcataccaaaaacaatatgaatactttctatggagaaaaattgtggcagcaacctgagctgaacataactacaaacagaaaggatatcccctcctacagccctcagagtcatctggcattttgcttatcctgcccctgaactcaagactcttttatattatagagttcttttaggaaatatttatttcttgaacttccccttattttttagggtatctccccatctttttgccccaagagcctgaatcacttgagcaagatataatatccatgtagataagatgataaagggattccttatatcaaggagtcaactaaaagttaatccctgtgaaacacagaaacccaccacaaatggtaaaatcccaagaaaaagttttgagttttgaccaaagagctaatttcatttcccacaagtgcaaaactttggatgtatttatatcagctgactactatatcttttctcaaactccaaagcccacatagctgatatactcttgtcaactgatattgtttccatgttacagatcaggaaacggaggctattcaaagttactgtatatgcgttgtctaagtgctatttgtatacttgtttatcactcctttgatctgccccattgaggtagacaatgattcttgctacttcttggctctcctatatacccagggctatcctgtctcataatagaagcttgataaatattgtcaaactagatcatatgctttgtttgagtcctcaaggggagacaatgaaatagctggggctagaccctcctctctctctcagacatcttgaaatgcagtcaggacgtagcggtgctgagcccattataagacctcaataaatacctgtcaatggcttgactgaaggactgattcaagactatcatattctttagtacttgtctcatgtacttcaacaaggactttagactaaactgatttgattggttatatttttagacttgttacttctgttttgacagaaagaatagacaatacgactacaagcatagtgaccttctggatttgttcctgtggataatcttaagataatttgaaggaagtttcttaactttttaaaggcacaggtgtcagaagtgacaggcttgataattagtcagcattaccccctcactccttttaatgttgtttctcacgctttgcattggttactagtcaatctgggttgcagttctgatttagatgtcaccgtactctgctttaaaggttattttggatctttgcctgtctttgatgtgttctagtacccatcttcctgtctccatccccagcatctgagaacacttctcatttccccactagattgtttttttaaatttttgagcatgctctgttttattttctgattatgaagggcatttctagtagtcctgggaagagtgagctcacaaaaagacagctagagaactagtgatcatgactattatcacatcaagactttggcttaagcaaaacagaacaacaaaaccccaaaaaaccccacaaaactgggaagtgcttagagccccttctacgtgactctgtctgcatctgcagtaggaaagtttacatttactgttaatctgctgttcaactttttgggaatgaattagcaactcttaaatttctctccatttcctatttctagtaattagctcagtgtcacagctaaggttttcttactgacttcagcatggagacttagcagttacggaaaggagaggctagagctttccaccaactgcatgtcactggtgactccaagagagaatccaacaaatcaactactaataatccttactatttaaaccgtgttcactattatccaataacttggctctcagttatatcttcttaagaattctaataaggcatttagtttatacaaaggaggagtctgatctatgcagtggacatgagagacaaccaaagttttgttcctctttccaatggcatagagaaaaaaataaaatttaggcagaattagaattcagaatgcctgggagttcctccagccttgggaaattccaggtgagaggggaggactctggagctttttaaaaagaccctagagttcattttacccaacaattttatttcataaatgagaaaactgaggcctagagaagtatggcttaccaaggttacaaactaaattatggcagttttagctcatggcttatgttagctagactgctggttcgatttttcagtggaagcctccttttgaagaagggcaagccattcatttttcagcataaaccaagggatgctcttacacacacacacacacacacacacacacacacacacacacacacacagagagagagagagagagagagcaaaaaaagaatagccatcataaagatacatttctgttctggattcaagaggcagaattattaatacaggtagactgccaggaatgcagaatgttaatgcagctgcggaataatacactagtgccacagagtttaataatagataatgacaaataatacagttggggaattgtgtaattcaataacagagtaaatgacaaggaaacacacacaccaatgaatggttctagtggggacgcttaggtgttttcaatttaacttacctctccagccctttggcctactacccttttgagaggcaggcaggacatgcagagatgtgcccagctggggtttttagtttgtgcagtgaagttgcaggtttcaggggctgagtcaggaagtatgaattgtgctcctgggcagttatcagctgatccctttaatgcatgtattactttcctccatgtcatgactggatagtttctttttttctgggggagagggggcctagaattgtcccaggttggccattctctcctattacccactctgtaaatcactgcatatgagggagtggtactggaacatggagcttgaagatgggaagagactgggagttggggtttgggtttagggtcataatgggaggtaaaaggtttagccacagctatggtttagtaagcataccagtgatctggtgtgtacttccctgtcctcagctgcattagagaaaggcagccgctgatcactgttagacctgtattctttctctaagagaatgggatatttccctctcattcttttaaaataagataaaaagcaaggggtggggaaattaattaatgtcagtaaatgaagcatgagacacttgtccggatatgataatgactgtgaattagtgcagaataaataaaatggtataaaaaatgaaccttgccagcacactcctttgggatgggctcagtcacccttataatgcattaactcttcccttgcctcatccttggtcctgtctatgttactgtgtcaaagctcccccactgcagagtctcaaggctacagtattatagcctgaggtgcccaaagggagccctggctccaggagagattgagccagctggtgactgcatactttataatgtaaatagaataacttcacatctatttattaataaaaccacactaaaaagaagcaattgtgtgtcccccggttgggagattcaagaaggcagacagaaagccactggaggaagaaaaagggataagttcctcaaaataagttgctccctttcccccagagccaaagtttacctttgtgctgctggtaagttatctacctcccctctctacttttctgtaagggccccaggctgtatgtcttttatatcgtcttcagatgactacaataaacacacactaattgggcacttcctgtgtccaagcactgtagaataaacagagagaaataaagcaatctccattttcaagttttctcctttaagggtgtggagtagtgcttgacatgtagtaaatgctcaacaaattgttgctattacatcagcattgtttcactgaatttaatccctatgaaattttcactgaagacaagtttgagagattcagagagcccttggccactttattttctttacttttgtttctttgctttccttttctccttcattttcttatctcttctatgtttcaaagttcttagattattggcaaagcaaatgcaaagaacatggttataataacctttgaatgttaacacttaagaaattatttgctattaacagaaactcaatgcagtgtagtcaccaaatatgaatcactgaattcagaaatgttattaattcacactacagtatgggcaggtagacaagtgtcggaatactagtttagagttgtttgatgacagcttatatctttttgtattctcatcagtggtgactatatttgcagagtgatttggaaataataacaaaagattgaatttgtaatgtttggtattttcttaaaatactctggaaccacaacaaagagagggctggatgaaaccatgtggacaattattgttgaagctgagcaataggcttatggtggtacttactatttttgtgagtgtttaaatactgctataataaggaaggctaaagtgttgagggatcctttgggaatgtaagcctggatgaatgacctcctggggcctacctttttcctgcccctccaagtccaagttgggaggtagatggtgaatgttttacattcctggtgtgactcaacataaccttttaaggacagtgttaacatgagatgcctcctgttcctttgggaggtctgtaatttttctcagaaggctaacttatagtccaggtatgtgtgcactctgcccattcagtctttgcctttggtttttctttgatctggaggatcataggaggcaagtgtggaaatacttcttcctggagacaatggcagaggagagtccgtgtatagaaattgatttgttaacccttgcgatggcctccctctcccaccctgggatggtggaagagatgccactgagagcctgggcttgtctggtgaaagagtgggcttaaggaaaaagcaacaacaggatcacaaatgagaccctaaatctggttttttccttgtcctcagtagcttattagagataactacatcacataagctctgtccatgactgtgaacttttatggttttgtctattagagggtgatgtcagaggctgttatcactggcattaatgatttatttgggcacaggtagacttataaaagtaggtgggggtattgattatagtcatgggccaatgagattctgtttcatttcctaaccaccaaacagatgtaaaggacttctgtgtgcagacctcaagattacacagcaaaggggcttccaaaggaatttacaatttgaatgagacctataagaatcaagaggtgcccaagagcagacgtaggcctgtatgtccccatatggttgagttttgataatccttcatttccagtcactgctatggtctggctgaccttctgaatgtacccagtattggctggctttagatctatgatatgagctatttttttactcattaaagtgtttaaatttctgtgcttagtttctcagatgacttttttttctgtgtggaatctggttgatatttttggagaataatttaaatcagttctaattccaccctgaagagctccttttgacacacaagtggctttgtgtcattgcaactctggaggaggccagggcaggcttcctgggtgctcagaacactggctgcccttggaattatggctttatctctgggggatagtacttcaagaaaaaatgccaaggaaatgtttgtcttagtgtatttttgtccattttgcctcaaaaaagatttgtcctgcccaggagcagtggctcacacctgtaatcccaacactttgggaagccaaggcaagtggatcacttgaggtcaggagttcaagaccagcctggccaacatggtgaaaccccgtctctactaaaaatacaaaattagccaggtgtggtggcatgcatctctagtcccagctactcaggaggctaaggcataagaatcgcttgaacccaggaggcagaggttgcagtgagctgagatcatgccaccacactccagcctgggccacaagagtgaaactccatctcataaataaataaataaataaataaataaataaataaataaataaataaagatagatttgtcctgaaacttaaagaataaagactcggtagacatggaatatattttttttcaaatttcaaaatgcaaaagagaatacaggtaaatacttgtatttacttcataaatgccctatttttcacagggtgtatcagtgtgctttgggctgccatagtaaaatagcacaggctggaggacttgaacaacagaaattcattttctcacagttctggaggctgtaagtctaagaccaaggtgccagcaggtttggtttctccaaaggccattctctttggcttacagatggccatctttttcctgtgtcctcacgtgacttttcccccatgtgtacatccctggtatttcttcattccaaatttcctcttgttataaggataccagtcacactggattagggctcactctaatgacctcattataacttaatcacctctttaaaaatcacctatctccaaatacagtcacattctgaggtcctgaaggttagggcttcaacctatgaatttgggtaggaggcagggacacaaatcaactcataacacaagatgaggaatattgttaaatgataaaaacaaaacacttgatccctatgatctaaagccctgctctgcaattctagagattgctttagaagtttgcatttaggtatagtcgtaacatcctagaaattaatttagaaagctgcttttacattaaaaatcaaaaaggtgagcaaaaagaatcatggctctgtaaattttcttttattttgatatttcagaggacattattactattactaaaatattgtgggtggggggaaggaaagttgggagtaggatgagaaagaatcaagtgttgagggaaatttttcatgtttgttggaggaaaagaaaagacatgaaaggaagaaagatgaaagaaagagggagatggagaaataaggcaaaagaagagaagaaggagaaagaaaggaggaggaggatgaagaagaagaaaggggagggggaggagaagggaggaggagataaaggaggagaggagaagaaatgaagagggaatgggaggggaaaggtggagtggggagtgaagaggagaagggggtggaggaaagagatgaggaaagggagaggtaaagaagagagagaaattagtgtaggtagcacttaccatggattgaaaaagagagttcacgcttttccctctcttaggaaactcccagctgcttctaagaaaataagagtgactacatcagagagatgcaaacaggaagagaaagtaaatggaggccctggagagggagagcttgggtattgaggtttggtgtggatagctgagaaccatccaacattaatgagcacaaatgtgtgcacaggctgaaaatgtctctccagggacgctgatgacttgagctttgtgtgtgccattggaaatcatgaatgagaaaataactgactcgctctctcagacaatctggtttatggacctgaagctcttatttgctgtcaggttgttcatctccacgcctctgtgagatattattgaaacagaacccagcactgtcctccttgccaaagtggttgacgttggccttaactttccccagttctgagacagggacagactggctaatgtaagtgtgccctgtggatgtgcaatttagagggaggaatgggaaagtatgttgtatgcagctagggacgcacacacagaggatattttcactgattcctctctgtgggcataactactgtcttgaaggcctttgcttttctggttttatgatttccaagcctctttcctgaatcttagaagtcaaaactcaagctaagctgcaacagaaacttcatcttttctcagaataaaatctattttcttccccttcccatggtaaacaaattatgttgacagacaaatgagggattaggtgaggaaatttgtgattttggaagctcagggaagcagatgtcaggattcagctgagagggaagaatttgggcggggtgggaggctacatggagaaatcagaggcaatcaggaggtgctgtccaagatgaggcatggtggtgagatggataaagaagcagtttctaagatgccactcaagagctctctggagatttacagagagctggacttttttttttttttttgagacagagtctcacgctatcacccaggctggagtgcagtggcacgatcttggctcactgcaacctctgcctcctgggttcaagcgattctcctgcctcagcctcctgagtagctgggactgcaggcacatgccaccatgcctggctaatttttgtatttttagtagagatgtggtttcaccaagttggccagaatggtcttgatctcctgatcttgtgatccacccacctcggcctccgaaagtgctgggattacaggtgtgatccaccacacccggcctcccaaagtgctgggattacaggtgtgatccaccacacccggcctgagttttctaaacttctgggtaaggctgtttgactttggacatgacgctaggcttaactgagcctctattttaccttatgcacagtgggcatactccttaccttacttacttcacaggttggctttgaaaacaaaatcatataggaaaaatattctgaatatgctgaagagccagaaaacatagtattatcactttcttggttttgctgtacccatgtatgaatcttttctgcagcatccctgctgcatgcttgtttctatgtccccatgtcctgcctcagttgaatgcatctggtggtggggagcttactaccctttaaggaaagtcattgtttaaaaacatgtatatataatttttaatttttacagaaaaatgtttgcattgagcccaagtctgcctaataataatagcagtaagctaactctcatgtaaggtatactctgcagcagacccactttgggaactttacatatattaacatttattacatttattattcttagccaccctataaggtgggtactgttattattccgattttacatgcaagaaaaccaaggcacagacagagtaggtaacttgtcctaggtcacggggtaataatttttacctgctggctcttgtttttctgtccatagctgacccaaaatatttgatgaccggtattttgtcctctttgagtgctccctttgccggtctaccatctcctttcccttgctttcttctgcatgtgcctccttctgaagttttcccacagcaggccccactctccaagggtgtttcgacctattcagaaaagagttgcattgctgggtccccttggacctgctgctgccggtcggctgggaagagttataaagaagaaaggacattttcaagctaagctctcctggaaactggtaggatggcgtgagctggtccacaggccccagctgccagatgatgggaattgggatcagctgtgacctaattatgagtctcgtaaacctgcattgtgcccttcattttccagctcattgaccactcagagggggagggaaaagggatgagattctggtcaagtccttcctgccactaccatgtggccaaggtcacaggccaatgatgtccagagggagttggggcaggggatgcgctctttgtcttctctgaatgaagcgagcgaggagtgaggcagagaggaaggaagatttgcagacaagcaagcctcccaggagcttgttggattggaatgtattctcaggtctattgtagagacagaaattccagatttagcattctgtcattgtcagaataacaaattaatatgtcttatgcccacacaactacatatacgcaaatatacaggcatgaaacggaatatctggcagatatcatgtattttataactctttggggacaaagactgtgctgagaattcatttttatactgatagagaaccccagctccccacctccaaaccaaacacataatctccacatcacatagatgtgggcgattcaaattgctttctcctgtcaaaaggtagcatctatgaatcactaagtagagtctatgaaattctcagttgagaatgtgtctataaaatttcctcctttcttacctttttaaataaaattactaatttctctctcaaatctgactgtggaagccttaggactagtgggatattgcagaaagaatgtgacgtttgggaccaggaaggtgctgagattcggattccgcctctgctgcttaccatgtgggcaacgctgactctgggcaagttacttagctctcttagcctctgtttcctcatgagtcaaaactgggaataaataataataaccttttagggttgttttatctctatgattaaacaaaataatagatatgacatacattatgggtctatcacatgataaacgcttaagaacagagactccttttactttccagttatccaaggtatagagtatgagaggggcaggtggctgtgcagtggtacatcttagtgcataatctctagatttttggatttttttatattgagaagtggactgccaaaatttttgttaaatgaaaatattttaaaaataattaccgtcaattaacattatttcataaaaaagacattctaacattctaaagaaagccttcaaaggagtgtgtgaaaattaaataagatcgtgcatataaagtacttaatagtttatattagttcctagctttgataagcattttaaaaagcactaggtatagtttttagatatattagttttagtattggtatagtataaatgttaccataccaagaatcaagtccaaaatctctaacatgacatataaatgggtgttcacacacacataagccatttgtaccccacaaccccagtataaagctatttacagatacactctactccagccaggggtcccagatataaacacttgtaggggctgggtggataatatcattaagtaacatagatagcaggtaagaaaaactctgacgtggtgttagtctgtcttttatccttcattgttgttttaaacatggattcaagctctgaataataataagagccaacatttataatggcaaagaagaatatcatcttgctatgtgttcaagctaagcatatgtttatgtgtaagcatagctttgccaagtataaaaactagtttggaaatcctgtatggactcaatcagcttaatttttacatttttaaccctctgattttgtctttatgtttatcttcaccagttctggttctgcatagaaagtctttagaggaatgtaccctttccgataatgcttccagatccaaaggatgcctcgaaagtgaccaggaattgctacagatggttgacttttacccagttgccaacgttcttctggggatgctgtgcgttttgtgtcctcatcccaactcctagccacttcaggtttttatagatgatcttcagacaaaaatagattaagaattagccaggaggggtcaggcattgtggctcatgcctgtaatcccagcactttgggaggatcaggtgggtggatcacctgaaatcaggagttcaagaccagcctggctaacatggtgaaaccctgtctctattaaaaaaaaaaaaaattagccaggcatggtggcacgtgcctataatcccagctacttgggaggctgaggcaggagaatcacttgaacctgggaggcagaagttgtactaagccaagatcgcgcctttgcactccagcctaggcaacaatcgtgaaactccatctcaaataaataaataaataaataaataaataaataaataaataaaaagaattagccaggaggaatgacaaatagatttcatctttggactaccctctttaggggaaagttgtggttcttcatcctgctggtatttaatggattcagcttcatataggggatactagcttggaaggggagatacttagagaaaaaatgactttcagtgctatagcaaaaaggaatttaaaacatttcaaaagcccccaacctcagtacattccaaagcaggataaaataaatacaaacaaaaaatcaacacctacaccaaaccaggctaatataaaacaaaacctacttaaggtccagatttttttgtcccagcatttaaaaacagtgccagcatggactgaagtaaacacgctgcaatgatttctcagcttgggaaactgtcctttcttatatgtgagatgcctacagaggaagcagaaagatagtaatttctttcccttgcttttctgggagatggatctcagtgtttttgtcccttggtcctagccattttaaagagactgctgccagaagaaccacttagcacaattgtgaaaacctagtccccatccatagcagagatgctttcctttaagctgtactttttgagatattattgacatcaatatttgttaaaaccaaccttcgtggagctgttgctatgtaaaatatattacacttaggtcaccaagtcattagtccaatataggtatttggaagttggtttttagtcattctctttaattcaaatggaattagggtcagaagaaatgttcaagtcctaatcacttagaaacccatatttggcgtgttttgttgcttgggtaaagggagtaagacctcatggcttgaaagaatcctaccagaggtgttttgtttttttttttgtctgatttcctttttcaaacttgataagggagtaggcaaaaaatgtctgagtcaccagaactggggtttcacaaatgaatggtctcgctgtaacctaaagtaagggttgaagtgggggaagatgaaacaataggtggctgtagcactggaagaatatttgcagccccacaaactaatgtctgaattacttaggatacatccctctgtctagagccagcccaaaaaaatatgtgattcctgccctgattcagatagagatatctccaggctacttactatatgtatttattatgaagtacatgaataaatcgccacccaaatacagtaaatgcattggtattaaaaattaacacagactttttgttgtctgtcatcccatcattttctctttaatgaaataacggtctggaataccacctaatggcctgagatgcctcagagtgaggtgtgtttttaccaattctttaacttaatcagactggcctcttgatatggggccaggttcttctgagtaactcactctgaagaaaagcaggatggattgattcatggaatatggaagtgtttgcctagtgggcttcttttcaaaagctcaagaactttttctaaggtccctggtgtaccctggggaaaaaatattcttgactttttttttttttttgtcaaactgtttgtatatgtggggtgtgtgtgtgcgtgcgtgtgtgtgtgtgtgtgtgtgtgtgaagttgcatgttggtacatacttgagatgtcactatagcttttcttgccatttttcattccatttctactgggatgagcaaaattgacagcttctagacatctggaaagaggcttttgatcttaggaagtgaagtacataatcatggccaattttacctatgaggaagataactaagtggtttctcaaatgccagaataaaaaaatgacttcttgtttttcaaaacaaggcatagagatcccaatagcaacacagaatgtttctgtgtatcagagcagaaaaaggggaattgaggtagcattggttgaacacacactatgtgccaggctttacactaatttgcttgaataatttaagtgagtaacagaacaatgtttccactaagttgcagcaaaaactacacatcttagactttccttagtgacatctcgaatcttcagggaaggtggggggtgaataattgaaataactcttgatttcttatattagggaccaggaatatgcccttgataggaaatctgtcatttggaggtcattttggccctttctggaagaaaaggagacattgagtgctttgaggttccaacatcaccacataccagttagtgaaggtgacagtcttctggatctctgaccagcaccagggctgttggcccttgttgctgcccccatcagtctgaacagactcttttcccaaagaaatttgctaaaatgacaaatcagttatcactgtctattaggacatccactgcatccatctatcctaatatcttcctcacgtatgcctcagcggcatgttttacttctatttactggtaccacagtcttagcaaaagtagcacattgattataggagttgtgaagccttgagccctgacaaatggggaccacattgaagaaaatggagggacaagatactaatacaatttccattaatgacctggatagagtccccaggcattgcttatgtatttaatttttattctgattatttttaacattgtaggcagaatgccagaacgccaaccatcttagcttcttcaacattatacagtgaaagccagaggggaaacctaactcatcagatcatagttgacattgggggaaaaaaataaaggtcagcctacaaaatttcttcagactttgattaatacagttgtagatttgaaaaaaatgttttatttgagttttcttcctacatattttgagtttggatgtaaaatattttcttttgaatttggaagaccacttctctaagaatggagagttaattagatgattttcttttctttctcattggaaatgtaaaccgtgttcatttattcaacaaatattaattgagtgtctgctatgtgccagacactgttttaggaacctggaatgctttcaggaacaaaaagagaggaaaaaatatccttccttttgtaaagtttacattttagtaaaaggagaaagaggcaatgcaataaacattacaagtaaattccttttatagtatgttagaagattatgagattataggagaataccaagctgagcagggtaagaggatagaggtgctgagtaggaggataggtgaatccaaagatgaaggggttggttatgtcgttatttggggaatataaggccagtacgtctggaatgcagggaagagggagaagttaactactgggagccagagcatagtaggtctttttggcccctgaaggactccaacttgtactttgagttaaaatgggagccactgcagagtcttgagcagtcttaactcatgtgactagcatgagttaacttgagtcttaagatgcttgtgttggcctctgtaatgtaccaagaacagtttcttgccctatgattccagttttcgataagttatgccatcacttgctgcaaaacagacctcacccaccatgacactgggccagtggctatttattcctgatgaggcattgtaggatctagatcaaactactgtttcttccaagcttcctgattgcacattttcatggaaaaatgcaagggtatgtggtgcctaggaaaaggacagtagaaacggtaatacattttactcttgagcataagttttgattaactttgtcattatttcaagccaatatagccacaaacataattggtggttatgaaattatgcaatcacactgtctgaggcctcattaccctttaacttataaatctgccttgccatctttccatgatcctcttaaagaatgtacctacccaccacctacataataaaaaaagccacaagccccagccttgggggaattgtattgatttataaagagagaggctatcacttgctgttctcattaacctggaaatagacaccacattttatctgctgctctgtttcctgctgtagatctgtgtagtaaatccattaatctgtctgtccattcatccatccatccatccatccatccatccatccatccatccatctatccatctgtccacccatctgtctttccatccaaatttccatttttaaagggactattttgtgtcaagtgtcatactgggaggcaatatatttcatggttagatatataggctgtatgtagcctcagactgtctggaattaaattctgcccattactttagctatatgaccttaagtaagttttgttatttgagcctcagcatcttcctctgtaggatgagaatggtaatcaaatgtatcgaagagttgttataaggatcacaaagttaattaattcaagtccttttcattttgtcccggaggaatagttttagtagtttgagtttgcattcaatcatctcccctttcgctttttcatcagtttattcctttgcagttcatccagcagcctatcaaggacctagtatgtgttaagtattatggagacggggatatttttctgagaaatggaggctgtaggtgtgtctctagcacctaacacagtgcttggcacatggacaatgccctgtatatatttcatggaatgggtgcaactccctgcccttgaaaagtgttcagtgtgtctgtagaagtccagtgccagatgggagtgtcactggtgcagtgagccagggacagggagcagagaaagaacaattgagaatatcagagggagatgatcctccggctgcttctgctggcctggacatttgaagggatttcttactgggactggctcttttgttctgtggtttgtatttctgcctttgtgcgaatgacttgtctgacatttctgggactccatcctgatatgcaggccagacaggtgggatcccagtagggaactaggtatgcctttctgtgtattccaggaagagtttaaccttgggcagacagggctagtctttttgactttatggtatgtttaatatcaacacctggttgggggtagggataataaatgtttggcttacaggacttgcagctttgcaagatacagtggtggtgcatacacttatatttgttatgactcatcttagtgcaaaggcaatggagtacctctagaaaaattgcacatttaaggggataatttcagtggtgactttagtgggttttagaagcacgtgagaagtaaatatgggggactctggagctagaatgcctgggttcatagctcttatcttttctttttctttttttttgagatgggggtctcactatatcacccaggctcaccttgaactcctgggttcaagtgattcttttgcctcagcctcccaagtagttgggactgcaggcatgaaccactgtggctggtcagctcatagctccatcttttattggtcatgttaccttgggcaatgttgttagcttctctgtaccttagttttattgctgtaaaatggttctaataattacaggctacctcattggaagttgagaggattaaatgagatgatatatttaaagtgcttaaattcttggctcataataagcattcagtaaatgtgagctattatttctctttctcctcctcatttttaattttttaaatactacctctattactattgtgaataatgtcattataaaggtgcaactagatcatgtttatgaaggtaggtaattgcctagcacaggcctggcacagataagcactgagcaaatgttagttttctttcacatgggtcattaaagtccgtctgtaaagtctcagggactttctcatcattttccctaaacctaatgcaagatattcacatttctttttgtgcaaagaacaatcttaattcagctgataatcggggcctcccttaccttcccactgctcactataacagagaacaagtactagctcataactttttatgactttgtattgaattaaaattataatgctttattagttatcttttgctgtttaacacatttccacaagcttggcagcttaaagcatcacacatttattatctcatagtttttaagagtcaggaatctgggcacagcttagctggatcctctggtttatggtttcttacaggttgcaatcaaggttttagccagggctgagttctcatctgaaagcttgactggagaagaacctgcctccaagttcacctggttgtaagcacaacttcattcctggagtgttgtgggattgaaggtgtcagttcctagctggctgttcactagaggctgccctcagtttcttgccgtgtgggctttcccatcatggcagcttcaccaaagtcatgagagagagagggagagagagagacagagcctgctaactagatggaagttgcaatcttatataaagtaatcacagaattgataccccatcaactttgctgtattctgtttgttacacacaagtcacaagttcaacgcaaactctaaaggaagggattatgtaaggatgtgataccaggaggtggggaccattgaggctatcgtagtctgccatagcatgcctgacctgtgggttgtcttttagatgctttattttgcctaattttattttattttttaacctcagttcagagaattcaatttattagaacaggtctgaatggtacagaggtgctttaattattcagcagaattctggaaattttaagttttctagaaatgtatagttttgctttactttttctccccttataaatagaaacctgtccttccatgaatgaatgctacagtttcagagatgctttgtttttcccctgattgattgtcagtgggcagtagcctctaataaagggaacagttttaagtttccttttcttctcagcttctctgttaaatggttaatgatctggaagcaagtacttggaggtccttagggagctcctatttaaaggaacactgtgaagagaagttgccttctacagtaaaaaagtggggatgattagtcctccatttacatgtttagtaaatctgaatatttagacttccacggataccccctgccaacccccgccaaatagatgagctgaaagtacaggatagtactctacatgcatctgactgagaaagacttttactatctcaccttagggtcctaagagaagacagctggatggttgcatggcggtagaggtgtcaggaaaagctcccttataattattttcattcctatgtttctactcaatactatttaaactgaaatggggcttcatctgctcctttgtttattcagcaaatacttttgagcattttttatgatccagctactgtgctaggtgatggggttacaataagatacagtcccagccttcaaaaacttatgtgctcaaacgttattctccaaatctttattctgtttctcatctatcattaatgggaatagacagctcattttttattgttcttggaggctagagagtacaggcaaatgcagatgatcaagcctttcttattgccccactcctagttgattccctctccctttcttttacttatgacatgcaacttccacaaaggcagtttatgttagttatctatggctgcataacaaattactgttgaacttagcagctaaagacaaaaacatttattatttcacagtttccatggaggaggaactcaggcatacccttgctgcgtcctgtaactcagaatctctcagaaggttatcattgaggtgtcccctaaggctgcagtcatcctaagggtcgactggcaaaaggtctgcttccaagctttctcccggttgttggcaggatttagttcctcactggctattggccagatccctccctcattgcctcaccgtgtggacctttccatagagcggcccatggcatggcagcttgctttactagagagagcaagtgggaagagccagagagttataaacaagacagaagctatagtctttggtaagctaaacttggaagttatgtcccatcacttttgttgtattctattcaaaaaaagctacttactaggtctagcccacactcaggtggagaaggttatacttgggcacaaatactaggaggtagggattgttgtgagccattatagaagttgtctaccatgggcagaaggacatttcaattctggaaggtatctgatatggagactcttaaggcacaatgagttacccgtgagctacctcttgtacattcatagctgtccaccctttttatattttctgtggtatcagcacagagattgggggcagggggtggaagcatggaataaggaattagatgccaaaactaagaattttattttttacaaagcgttatcacatattaaatctggaaaggacattagagggccttatgcaaatgaataaactggcctagagatcttctatgcagcccccccagggtctgttctactgcagaccctggatctcctataacagaactataacagaacactggatctccacagaaagccacaaaggcccagagatgtgttcgcacagatgtcatcatccctcttctagtccctgcaggagcctcatgggagatcacgtgaccagtatttcacagctctttcccccagcacagaaatatctgccgtgttgagaggcctgtccatctcctagtccctgctagagcctcatggacaatcacgtgaacagtatttcccagctccttctcccagcacaggaacaccctgccatgttgagaggctcactcaagagcctcatgatctgcctgctacctagcaatagctttgttacataggttgattctgccttgtgcctagaaaataaatcatgtttaggattaataatagtttatataattaatatatgtgccatgcttgagccaacacattccatcacttatcttcaggctggctgcctcctgggagccactaggtctcgagctgcaggctgagcatgctgggtaacaatgctataagtctgcttactggacccagtcctacagcctatgaatattcttttctgtatttgaatagcaatagctggagatgcacaagtcttgataaaataattttacatttgttatattcactttttttcttgcctgtcaaaaatgtcagcttttactctctggcttgcaatctaaatggacccaattttaccttagctactttgatatgatattagctgcttagggcaattgcaagaaataccatacaagggttaatctccctcacccttccattcctttgatatgctgttggaaatttcaaagtgctcaaacacggagatgaggaggcagagggtaaatggatacagaatggctgggaaagggagtagcagtggttggctgctcttaagatctctctcccatggcctggtgccatgagtctgtgtccagtgtgatttttggcaatttctacattctatgtgtatttgtgaagtactgtttttgcatcagatgatatctaaggataaattttgtgttagaggagtgtagttacttgggaggaaagcagtgccatattattttatattaaacatcactggcagaaatatgaggatgggtaaatgtctactgataatttaatagattttacctgcctaaatgacattatttgcaatctgtttatttagttagtagcaaatcctggcacattagcataatacctaagggcaaaatattggattgactgtttgtttgcccttaggttatttttaaaaagctacttgtataaattaaaaaataaagcgaggcttggttgctaagaggatggtgggatttgtagactgcacaggagactaatgcaaatcaaagagaccaggaaggaaaggccaggagaacaacagacaacaggtgaatatccagaaaccagcagattctaacaggcaagaggtagaggctcaaggggagacagatgattgattggcttcagagaggtctggtaggaatctaggttgtcagctgggatcgtgatcttcagaacagaccagtgtggggcaagcccaaagcaataacttggggtcaggcatgaggtcagggcaaggcagtgggagaattgtaagctttgaggtatgtgtaggttaggggcttggtcaggaccaccatcagcaggatcaggattagggctcatgggtcttgaacttctttcattcttcctgaccagaggcagggctagtcccagggcctaggacaaggctaagcctgaaggtggacattatgtgacaaccaacaaaaggaggaacatcatactagagtcaccgtatgtcctagtttctctaggacaggcccactttacatgtgttgttccagcatgataatcagtggttctcccctttcacttgaaagtgactgacttgcgtgataagttacatagttaccctgattattttccagaatgtgtttcataaaaatctttttagaagaatgtcatccagagaccacaaaagtagagttctctagtcacataagtatggcaaatccagaatgaaaggaagtttaatggaggagtctttactgcaggatttctcactgcctttatatgctaaattataataggaattgctaagaggggaatagagttcttagtttcccatccttggttgatctatttgtacactttggtactcctgagactacgttatgtggaacacactttgggaaaccctggttagttgaatatggggtcagaaagggaaactggtcattgctcctgctgtaataagggtgcttgcaaagacagcagtcaccagttaaataaataattctggaaacaacaactgcagactctgacaaaatcttcaatttgctgattattgactgacattagcagaggtatatgtgactagccctagctgagtaactttctgaaggatgacttgttctctagctcattggcaaaaccacttactacttagggcatgggaagaaagagaattttctttgttaagtctttaactccatgatgttcttaaaggagagatgaatgaggagataatggtgtgtatgctgtgtctctgtgtatggggaaggggcctcaggaactatgtatttttcaccagcattccaggtaattctgataaaggtagccctcaaaccatttatggagaaacatttcctgggagttctgatgagaaactcatggtgataaaaacccattcatagtggtcatttctttaatcatatgagtcctttgatatgatggccagtgatctgatatttgcgaagttcccactatgtgccacaccctatctatgtgctttcagtgcttaacgtatactgtgtgaaatagtcctcatagaaatttagcaatggccccattttacagaagatgtctaaagatagaccttcaagtgggcccgacttactaggccattccatccgggcccgacaagagggtcacagctcttagacccacccctcagcaactccctaggacaaggacacaatgaggcaaatctctgagcctttgccctaaggttacacaaagctcatttagagccttaacaagcattaagaccattccattacaaacaggaccatatgctgacacattttatctctctgcctggtggaatgggtcaatatcaaacaagctaatccagggagaatgatgcattgatttcctaggccttaccaagtgtgcaggctgaagtcaacctacctaggaaggttttttttttaagatgaggtggaagagagaatacagcaagaaacaaggagaaagatttgctttgcttttgttatggagttacaaatccagacaagtgacataagcagcttcttgtttttagctgggccaaagaatgtttttcttttttaatcttattgaagagccaggatctttgtaattccatcaaggatttcaaactcaaatgcttacaggggcttggagcatgaggagatttagaactgcctgctgggtgggatctatggtgacctaaagaagacctgcctcttctaaaggggactcctgataataatgtattgtatgtttcaaaataaccaagagcaaatttcaaatgtcttactctaaaaatgctagatgagcaagatgataaagatgataattagcctgatttaatcatttcgcattgtatacgtgtcaaaagatcacataatattccataaatgtatacaatcatttatctatcaaaaataataacaaaaaataaaaaagcagactgtgctttttagcattcagagaatagattgcctatggaaaatatggctgttttctcagaaatttcaactttttaaacaaaagttgaaaatctatattttttgaaagtttttctgatttttaaaaacagacttcttgagatataattgatatacaaagagctgtacatatctaatttgatgaatttggacatatgcaaacatcgatgatgccttcaccataatcaaggtaatagacatattcaacacctcccaaagtgtcctgtgctcctttcttttttgtgggtaagacgcttaacctgtgatctaccctcaagaaactttgaagtgctcaataccatattattaactatgggcacaatgttgtatagcagatctctaaaatttattcattgagcctatatccattgaacaattccccatttctccctcccctccagtccctggaactaacattacactctctgcttctatgagtttgactattacagatatgtcatataaatggaaccctgtagtatttgtcctgtgactggcttatttcccttagcgtaatgtcctccagtttcattcgtgttgcaaatgataggatttccttcttttaaaaaactaaataatagtcatgcttggatgaaactttgggttgtttccatatgttattgcgaacagtgctgcaataaacatgggggtgcagatatctctttgagttcctggtatcaattgtttagatatatgtccagaagtgggattgctggatcatatggtagttttatttttaatcttttgagtagccttcatactgtttttcatagctcatactacattcctaccaacagtatacagggggtccaatttctctacatccttactaatagttgttatcagtttttttggataataaccaccctgacaggtgtgaggtaatatctcatatctcattgtagttttttttttttttttttttttttttttttaggagatgggggtctcactatgttgtacaggctggagggcaatggctattcacaggcacaatcatagcatgctacagccctaaattcctgggctcaagtgattctcttgcctcagtctcccaagtggctaggagtacaggtgcataccatcacacctggttctcactgtaattttaatgtttatttccctgataattaacaatgttgatcatcttgtatataattgtaggccatttttgtgtgtttttggagaaatatctgttcacctcctttgcccatttcttaatcaggcttttttcttgttattgagttgtaggcattccttatatattttgggaattatccctaatgttgcaattaatttgagtgtttaaaacattccataggccaaataagacatacagacttctggtcagtgacctctttcacagctacatgtgggtgacgctatgtcactcaaataacgggacactcgtttactgggtgtccatggtgttgcagacatttcataagctacctcatgaagtcctcaaaacgaatccatgggttgaaataatcatgcccatcttacagataaaagtgaggcccagagaaactaaatggtttttccaagttcacacagcctacatgtggttagtgcaggtctgaattctgattggtttgaccagaaagagctgcagatttggggaagttttgttttctctcctctggggaaaaagagtcccactcagggttattccattactacagatggtcactgccccggggccagggccatgccacttttctccaaaggttagtcccaccggtatgtgatgcagttggtggactggctctcctttgattagcatgagcgacgagttagtaattgatcatccacctttctaaggttgccaagcttagatttactatattttgtaaaatcacccttccacgtccttaaagtccacgtgcatagtctatctagattctgatatttcatgtgtgaaattaatcctctcggactgtaatgaaaatgtggctgttagcctctaattaagatgtgtgtatattgattgcagtggtcaagtctgtccactgatatattaaaataaataagcatccattttatattggaaattttgtgacacttcttgagacaccttgagtttctctgagttgttacaaaaccagagcaaagagtcaaagctgtaatttctgcctatcactggcttttgaatagattatgaactcttagaggattgggtttgtatctatatagttctctttatacagagatgaaggctttcacagcagtatctataattgggtgtttaataaatgctttttgatgagggtaatggtatggaaataaagctcttgagatccagagtttgcttggatttcttgcctcattagggaggaaaaggtgaatggggatgcatgggtaaatacgaatgtcaatctcaggtaggaaaccatatgctcttctagcatgaaatgctgaaaagagagaaaccagaagggtgtgactaagacagaaattctgctgattgacactaataccggtatttaccaatcttctgtaacgaggtagactccatttagaatctggtgatgtatcgcatacaagttagattgcttgacaagtcacaccaaggtttactcaaagtcactgccattatggtatataatcacaggctcaccagtgtcccacaagggtgaaggcagaggttaatggttttctttttatttgcattattacttgatctctggctttcctggtgagatgggtttttataagctcttcccatctcactttttgaagtgtttttaagctattttaaggctgttttataggtgccttttcttatgtttgttttgtatgctagaaagtaagtaaagaggatccaggatatgagctattgatactaccaggcacactgaagtaagtattaagtcttttattgagctttctaaatggcaaagtatatttcttttttatttaaaatgttaaaaaaaaaagtggtcaattctaactaactgccctaaatgtatcaaaaggcccttagaagttttcttctttgccaccatggtgaatccttcaagcaaattgattttaagcttgtacaacaatgtgaatgcaatgacactaaagtgtacacttaaaatggtacattttatgtatgtatattttaccacaataaaaaaatagattttaagcaactaatcaactacgaggttgtcagactgattcatagagcatgagcaatattttgtattcagtactataatgtagagaatattactctgttatagtcaagtgtaaaaaatatcatattttattttccttatgttaaatttgggccaggcatggtggctcatgcttgtaattccagcactttgggaggccgaggagggcagatcacttgaggtcagaagtttgagaccaacctggccaacacggtgaaaccttgtctctactaaaaatacaaaaattatttggcatagtgacacatgcttgtaatcctagctacttggaaggctgaggcaggaggattgcttgaacccgggaggcagaggttacagtgagccaagatcgtgctactgcactccagcctgggcaacagagcgagaccccatctcaaaaacaaacaaacaaaaaattaaatttggctctgagttctcatctactggaaaggtgtgtgagaatcaattgtgttatatttaaggaaacccatttcttaggggtctttgaaaatctaaatgagacttacatgagatcaggaaaatgggagaggagagctgcattcttcccatggggaactttgtaatcatttttctctttgccacacaatggaactctgcgatttggcccttcaccgcctgttaggtttatatgcttggaagtcagggagaggctcctgtaattgacctctctattgaccacagacttggccagaggagcaccttctgctcttctccaggctgcagtgttgttttcacctccagagggacctgcagcaatccttttcacctttggcattgcttcaaaggggacatgggtctctattagtcacagaaactcagcaagatcttatctcacttcagaaagctcatatcctctgagtggactcttctacctgcttgaaccccagcatgcagccagcccagattctcagacaaacctttggatgaagaaagtgaaactctgagtgacaaataactttggcttgtctgccctaagaaacacaaattgttagtgctcttgaaagtaaaggttctgagactcagaacaggatggcctaagatcttttctatataggggaggaaaaaaatgtttttctgttttctgaatgtccaaggcagccagaacatgacaaaattttatatatatatatatatattttggcaatgcctagatgagtattagtaacatactagttgcaagggtagctttagagacagagaacttgggtttgaatcaggttgaagcaggttaagttccccatgcctcaattttccccatctgtaaaatagaaataacagtaatttttttatcatgaatttactataaaaataaattaaataaaaattaatatgtgtaaagtactttagtctggcatgtagaaagtacttaatgaggaagctataataataataataataacaattagttaacattaccaaactggttattcagagtttaatcctctggaactctatgcttagctctaatctcaaggagtccagggaagcagactaatcctcactattaaattttgtattgattctcggatgttttcaaagaatcctacatccacatatctcaaaggagtgctattgatttgatcattttatgaaattcttacccttttgctttcagaattctagctagatgacaaaaaggaaataactcacacatgtaaattaatcaaactattttggaactcaaacattgcttgtggaagacttgcagattgagccaagccctgttctttattaactctggataatttgctttctttgtttgatccctggcctttaagtgaatgtcaatctcttgcttttttcctgaagacctataaggcttgctgactaaatttcatggaaattctttgagattcttagctagaagaggctgtaaaggccaagtgctataggtactaacgtctcattgctaacactgatattttaccttgatagtaacttccaacttgacataaaagcttgtaagcaccagatctttgcctctccccatggttgtatgtgtttgaattctttggagaaaattttatgacttgcatggcttagggtttcataaattataaaaatgttttatctctggtttgaatagagtagtaaagcatatccctgatttctcacttcttccataacccagtgccttcttatttctaatgcctcctagtctgatgtcactgagaagatgtttatggccttgcttgccagagaactaaaaaagaaaacaacaacaacagcagcagcaacaacaacaacaacaaaaaacatctaacaacggagccaatgcttactcatgccagtcccaggattccatatatggggacattgggcgtgttttaagccatatgctcataacctttgtgtcatgattcagttggtgtgtcttgatcagtttcctcatctgtcatctcttggaaagcatgtaaagattaatcacagatatctgcttgtattacctagattaatgctagatgattagcagatgaaccttaacatctcagtggcttaacaaaaaaaggtgttaatctcccacttctatatgaagcccaggtgggagtaaggctgtactccacaaagtcattcagagaaccaggctgttgaaggctctgccatttctagtaaatgacctccaaggtggttctcagcacaaacatctattcacagatggagaaagagattttgcatatatatttttctaattttcatttttgcaaaatgtcataataagcaggtaagatggagcctcagttggagttgtggttagtcatggtgaaacaagagttaaaaggtaaaatcgacagatttcctatcagctatttatccatcattactaagaattacggagtgttaggcttagaaaaggtctaggaattgactcattttcctacttccaggagatctggttctagaacccaggacttccagctcccaggcaaattgaagcgcttcttcttccacatgggacccacttctatgagagcatcagtctgttagggttaagtccaagctctaccacttaagagctgaacaagttatattaactgcaaagggataattttagcaacttcctcattaggaggttgtattaaatgcacaatgcgtgacacacagagacttattgtcattattaatatcccaaattttttaaatggtcacaataattccccttgcaacttctgtcatatgaataagcccaggatcgcttgatggatgatgatgaaggattcatggccaagtcatccacaccacctcagccgactttgagtcagtcaccagacatgtaagtcatgtaagtaagaccatcctagagcatacagccccaggcaagccagcctagatcagaagaaccagccagcctactcacagaactgtgagaatgaccaatgtttgttactttaagccactaagtttggtggtggtttattatccaacaaaggctgatacagaaaggatcacaattgaggagtttatgtgagctcaatctgaaagtttatatgagctagatttgcccattatttcactaaattcatcacatggccccacctaactccaaaagagactggaaaatgtaaaaaacccagacagaaagggaagtaggctccaggacagctggccaatatctgccacactgatttaccttgattttgtaaaaacaaaacaaaatcaaaacccttaggtggcaatcagagtgtaacaactttccaggcaagttctttgggacaggccactagacagtcacttttagtttatttgtttctcacaggaagatagagaaaaggaaatgcgacagatgtgatgccttcctgagaggctgtctggtaaatcaattcctgccaaagttctcctacaaccctaagagataaaaaaggaacctgcaggcgaaaaccacaaggtaggaagagtttgaagctgtgatctcttagaataagagcttttcatttattctttctgagaaggaagtctagggcatctgtcattgagagtgctattgatataattttgctttctgccccgtaggatctgaagcagtcctgccccaggcttagagaagtaagggcaagctagcccaattctgtttgctccagcacatctcatcccagagcatttgttgtaaggccctcttctttttgatcccatgtctacatttggatctctggtctgggaggagaaatctcagaggctatgaatctgatgaggaaggcaacttggcagtgcagaaagcaccctgctttgcagtcagactttccagcttccaattctacctctgccagattaattagctctgtgtgatcttgcacaacttctctaagccttaattgtgagaattaatattgtatttattaggagtatggcacacgataggtacttattagatgttagctatcatcatcatcttcatcataatttgattttgcttttcttattccctttgatcttgcctcctagtctaacaggagaaacattagaagttggtggagacggcctagaaaaggaagggtagattagagagcaggagatagtgaaaaattacagttatttcacaattgaaatcctatcccatgtttgcattgttaattatagttttcgaaagactgtcatctaggcaatctcatttcgcatgaccattctatgagacacaggaacatgcagtctattttggcagataaaaaataaatacatgaggagttaagtaaaaactgtgttactgagactgcagtaacttttataaatcaatgtgcaaaaaaaattcaagtattttggaatgagatttgttggattgaaatattttatggtggtctgtaacatcagctcgtgagctcatagaccaaaccccatcccaaatacctggtgttcaggattatcaatataaaaattgatttaagatccccataattcatttactcctatttcctgacatgcagaaagcttactgccactgggttatttcatcagtttttccccatctctccataactagtctacctctgtatgcttggcttctataacattgcttactggtctttcttaaggcatgttgtgttctgggtcagttctctttaatctgtggccaaactcttgctcagatctaggaatgtgtcatctatgtgcatctttgttctaagctgaacatttcttagcactatacctgagtttctgctgccacctttcatattcttttatgatttgcaaagctagcaggaacccaaagtgactttcataaccaagtgtccagggtctccaggagttcaggttctctctagtaaacagttccaagaccgcaatgaaagagatgtcacagagttgtatatagtataacattaactaatatttgaatgataaattattgccataggaaactagagaaagaaaaagacactttgggatggagaggttagggaagattctgtggaagatgtgagatctgagctgtgttctatggggtagctaggtcgaggtaaaaaatgccatagccaagcgatcagaggcataaatatgcaaggagtcttgggtggaatcacaaagtttagcagatgagtacatgaaggtagaccctttgtgccaggaagtaattttgacagaatgttggagataattttgcctgtaatggtttctgactgacagtttattcattcattcaatcattgagttcaacaaattcaatttattaagaacatactatatttcagtaactcttctacatcccagagatacagcaatggacaggaaaggttctttccctcatgctgattacatcttaagtatggagacaaacaattaaaaacaagcagatacacacagtaatatcgtatagtcatagaactatgaaatgttaaagcaaggaaacacaatagtgactataagggtcaaacaccattgtagagaggaaaatcagggaggaccacttgggttgggtgatatttaagctgagatttgaatgaagaatggaagccattcttgtgaaagatctgggtgattggcattcctggcagagggaacagctaatgcaaagctctaaggtggtaacgagcttggtagagtcaaggagcagctgtcattgctctgtagtgcacttggaaaatatgctcaggtctggtcctactattggcacattaagccagaatctctgagatgaggtctaagccacagtgcttattaacacctctccaggtgattctaacagttagccaaggttgaaaaccgctgtattaaaggaaagccaaaagatgaagggcttttttaagcagacagagaacactcaccaggggaatcaatggaggagggaagtgaagaatgtaactgtgcaggaagagtatgctagggatagagggatgctcatcttcgacctggtaatcaatggaatccagactgacctattacaagagtggggtccctatgctctttacatagtctcccttgtcagtttcctgaaatttattgtgccaactatggtgggagttaaagcgttaaggtttggcttatttgttttgggcagatcacagagatccaggactcagagctagggaatagacagctgaccccaagctggaaaaactttcccagatactccctcctgcctaggaagtggcctatgaaaaagcagtttaaataatggcagcctaaaatatagttctatatgcaacatttttttttctatgaaaactaccttttgccttatacaacctgttaaaaagtgggagatttcactaataggagggcaggagttgagcacagatccaatagaggaaaaatactgtcttcaggcagataggggatgtgccactggggccgagatgacgagtttcgtgaaaaacagagttcaaaagaggaggctcttgagtgtaaagataatttgaggggaaaagaaaaagatagaatgtgactggaaggaacggaataggaaaagcagcatgatatagatggaaatctcctcatttctttgacgtccttaacaagaacatcaagtgaggcagaatagtcaagaacttggactctagaatccaaattggatgagcgccttaagcactttaatccacagtttcctcatctttcaaatggaaacaacagtgcctaggattcgttgctgtgaggactaatgacaaattgcatgtaaaaagcttggcacagtacctggcacttagtccaggccccactccatggtattcatcaccagtgtcaaaattgccataataattaacattgcctcaatcacaaaattcatgtcatgttcaccaacagccaatggcttccagataaaagtgagaaggccaatatagagctggggttaaacatgtcaagaattcaaagctatagtgcccctgggtattcaaaaagcgtaaagatttgactaaattcacagccaaatggcatttaccccaggtctaccccataccagtcactggcttctctctaatagttgttatcccttttaattctatagaatagaaaagaaggaattggggctaggctgagcagcagaggagagattggctgtggagagtatagatgacacatgaggccaggtgatctctgagaaaagtttctcccatctgttgcttagattgcccatcttggaactcaggaaatctgagatggctttaaagaaaatgatggcattgagaagtagtgagattgcagggggctttcaattttctgcttgggtgttggtggagagcaccgaggtcaacatccatgcttgcagtataaaattctaggtctgtgtccctgaaaagaatgttggtgtgagctaatgtgaaagatttggggagaatttgtgtaaaaagtaacaacaaacaccaaatgcctagttgagttctctgatgggtaaggtagaatatttgagagatttttttgagaatatttcccactgaaacttgggaaataactatagttaatgaattttgaagaaaagagttagcaaaagagaaagtaaatctgatcattaacattatatacaataaactgaactgggaaccaggagacctgtgtgctagactggattacattgagtaagcaatttgaattatctaggtctcagtttcttcagtctgaaaaagaagggcatgagattatattatgttgaatccatcttttgtttaaatttttgttaaattctatggagtacagagaagttgatggcttcaggcacaagtgagaaagtattttaatcttcttacatttttaggccatgtccaaatcatttgttttttcactttattttatttgaatataatttaggttttctttctcatggggtgaatgaaaataaacactttagaaatgtataaatcagtgtgcatttattggagtatggccaataactttagataatgaaaaggatgattgagctatttaatatgttgatttaagtaatgctgggtgatgagtggtagtgacaaggctcttctcttactaggatatcacatgaacaggttctgtcctaattctgcccttgcctagtacatatgggtgactagaatttggtgagagggggctgtctgctgagctaccccaactgtggttacagcacagttacagagatggatttttaagtacacttgttttccctgtcatttgtcatgaaacagactccctatgctcattatcaaaaagcccatatgctatcttcagttcacattttgctcacctctttctcttcattgcattagtcaagttcagaaactagactgtcagctgccagacaggctgctgtttctctcagagataggtgaaaaccatttaggaattcattatcaaagtgtacagcccaagaaggtgtttttgccttcaattcaattattccaaagaagcacacgataaagaaaagtactcaggacaattagatggactatctagacgtcaaaaatcaaatttttacctttgcaaatgcaggttcatattctgttcttaagtcatcagagggaaacatatgatgttcactgtcagtttagattgtcagaaaaagcttgttcaaaatctgtaaagttgtcactcctcatgtattttcactcaagaaaccagggatccaacttcctgtgcctaaactctctgcctagacaaatggatcttttgggaggttaagtatgtcttagaagaatatctgagctggagttgcaaatagaggaatcatcttttgttaagttgttagaacctagataacatagaagattactctatggggtttgaaaaaactaagacatgatgccctctcatgagacctttacagtctatttggggagttaaggcatatatgcccagaactttattttcagtggttcttggcaattttaaagttccggtagtatagtacaagtacccaaatgtgatgcccacaatgagggctgtggtaagtcagaaaagaggctgggttttggtttcttaggaaatggtaatttacatggagtctcacccacctggaaggattgcagtctttatgtttagcatcactttttgtcatttaaatttctctctaggtggggatctaatccagtccggagttacaggagctagaggtgatcagaaagtgtgcctaatttgacttttgctccatatgtgacataaaatagaaaaaaagtgaggtccccaaagaaaaggtagcttgagaaccaatgagagtgtctctccatgaactgtcaaaacctctgggatccagcagaaacagggtttgatttaagctgttcctgggtacaaaatgcgagctcttacttggcatttatccttgacacatatgggagcaggctttaccagaggcaagaattcaatcaaaagtcaggctttttgaatttaggtctttctcttttcttctgctataaaatggtgagatcatagcccatgccctaattggttcacagatggatacatcctgaggcaggtgggggtaatcctcaagttttcctacaccaaagcataccccagaacaaagaactactcgttctggaggtgaagataaggcctgtgatgggttgtcccatttgatcactgtggatttcctctctgtgatatcttctgctcccctggaatctagtattgaggaaaaataaccttaatcaggaactgtcactcttcttcaaagagtaggacagtcaactggcctctagcctataaagaaatattcctttcagatagactctagtatataatatcattctgctattcatcaggaagtggctgaataatttattatacaacttgtctatagatcagagtagatgaataataaaatctttagtatgtaaaaaccttacaagaaagttgagacttatggtagcaaaggatccagaaggattgggtcattttgtagttattagtaaacatatgtctgtgataaagaccactttggcaaaccgaggtatctctctacccatcatcctgcttcaggagaacttgggctctgataagtatgtacgtaatgatcaaatcccccacatttaccaacctgctccagtcatcattgtggtagatgtgtgcacgagaaaaatgctcattttattccattccatggatacttacattctctgcgtgtttatttaggaagcattttattgaaatgattcctcattatgtgtaacttaataccatttattcattaatttatttactcagtacacattaattgagtacatacaatgtgcctggtgctgggaaagcaaaagaaaaaaccaccatacttatcctcaaagtcatctcagtctatttgtagaggtgaataataaatgactgtaatacatggtgaggaagaccaccattaagtcagaaattgctaaaggagttagcaactaactgtctaagatgattgggagcattcacagagaaggttatatttgttgaggaccttgaaggagtaggagttgcctaggtaaatcaaggaaataaagggaataaatatcaaaggacccacatgtatgaagacacagaagacatagctttagagaagtttagagatgtttgtagagcatgctggaacacaagaaatgcttttggaaagactctgtaaaatatttataccctaatactaggtatgcaacagtgaacatttaaagtttattgaattaagtcaaccaaagaagacccaagttgtgggattcaagaatagcaaggctctttcaaatgcctctgaaacagttgggggtggacctctccatggtgctgaaacatcccctgttcaagccttcctatctatctggattattggctcctttccatgttcctaaccctcattctgcatgcagtaattacttgattgaccatttcactcactggccctgccaggaccttgccttggatactacctgtccaatggtgagcttattattctttcctttaacctgcacagaccctggatgggcatttgatcaactgaaataattaatgggtagaaacagatattgtcagtgaagtcctttaacttctttctgcttgcttttctcccagatattttagcatttaattaatctggatgcaatttattagttgcttgggttggaatttctttagccttttagcccagatcacatatacttattacgtatttattggaattttcaggaaactgtagttcaaggtgaaactttgaagatagactcaaacaatgggcatgtctcacaatgatacagaggactcagataaagttggtggaatagagtggaaagaatactggatttgaaattaaaagttcaaatcagggtttcaccacttagaagctgggtaaagtcatttagtttattttgaagcctcagtatccttatttgtaaaatgtagacaggttattccctgtatactcacaaacttgtgctaagactcaaatattctcatgtttgtgaaattagtttgaaagtgatgcagttgggaacgattactggataggttggaaggttgtccaactggtgcccctcatgatgggaagagacagaacactgcgaattagcacagtgaaagttaggagctgtgaagaccctagggggcagaggaggtacaggcattaatattatggtgctgagaagttaatatctttctttttaaaaaatagctcggcatagaagctgtcagtagggctttctccccggtcagatttatgacttctgaatgacattgttttactttgccatttggaggataaacaaagctggagagaacaaaagttttattttcctatcagtgacaaatacatagcaatcaatgtaattgaagttcaagtggaataatttatgggggatccattgcatgctcctttgtgtactctgtctgtctgtctctctctcttcctctatccccactctaattcctttcaccgtcatttatttctgcctctttctggtattcagtcctgtatatattaaaagcataagccaattagaaaataattgctgttactctgcttggcccatctttcttgatgtttaggttagtttggcattttattctctccaaagaatgtatttattcaaaaaagacatctaccacatttaatgcgggccatttagatattaatcatcaaaggtaaacgatgaagaaaaattttagtctttaattcttttcttaaaagtcacatatacagagagctaattgacccatgctatgcagaagtgctctgcctgaagcccagggttaatttttacaatggccacttagccaattgaggatggttaagtgagcaatattttatagactcttgtattaattattttgggggatggatataagtttgtggatggggaaaacactctcagattattctaggggagatgaatgatatatctttacaaaaacatataaaaaccttaatttcagtgaatggtttataatgtaaaataccacaatgatatataactggataagagggcttctctgtgagtagagcttatctgtatatcctgatgaaatttaaaaaaaaccccatggaatatatgtttttgggggttaacaaaaggaaacttgggaaccaagaaaaaggaaggatgtaaattaacttattgttgtcctttattgtttgaaaaattcttatcataaaggatggtagcccactgatttttaatttcactgataagtgagcaggaaggaataggtaagagatgaagatgaatgatttaggtcatacttcaataaaatatttttactgtttatttcctgtatcacaggtttttcaaagtagagcatttcttatctggctggtatgatttaggcattattttatcactagaaaagccataacgatgaagggatggtatgttcaaagcagaggattaatatttactacatatctactatgagtaagttactatgcttttttacatatacttttttacatatcatttaatcaacagtcttgtgaattaggctattctgacagatgagaaaactgaaaatcaaagacactaagtagcttggtaagtgttacataaccatgatatgtcagagccattaaatcgaggtgtgcctaactctaaattccatactctttatattacactatgatgtctaataaataatttggttgaaagagtcatttttattcaagataggagagtagactcattgatttctgttagtcttttctatgaatctgttatcggaaatagttgactacaattaaaataattcctggcactataacactactagacatcttcatgtcatgtagccaacatctttttttcctttgcaccatataatctgttttctctatgggtaaaaatcacattttaatgatggggtggaacttcctttattccaaaactcatttgtagtcggggttgggcacatatctaggtctgataaatcagaatagcctattcttctgtccacagctatttatttttaatgttttcaagctgattttacctttctgctagagtcatcagggaagatactctctttccactggggttgttaaacaagtagaatgcaaggctagactactagcaggcatccttctcattaattagcgagagaagagcttgtctgaactatggagggaaaaatagagaatcaatatctaacggtattctttaagaccctgaatccagccacacttgaaccatttttctaaaggaatgtgaattcatagtgtttttcttttatcttgggtctatgttatttgattttaaaatatattaaaatctagcaatgttattttatatgtggctgatacattatatatccatagtcaaggagatagcactaatcacataccatgacaatagacacaagtctgatctaaactctgtatagatattggcactgcccttgttttccagattatctctggagtgctctgagggatcagttggttggccaacaaataccatttgtgcctcaggctctttgtaaaacctaggggaatgtctgaatttcccttgattgagacatctcccttccctgtcaagtcctgaaggagctgtaaactcaaggaataatgccaaaggagaaattagtgtctgccttattatcaattgtacttttgttcataactcgcaataatttggttgctgcatagggcttagcctcaaatctaagcagactttctctgcctcataaatcaaatcttaactctaggcagtggtaaaaccacagtgcccagtaatggttagtaaagaatacaagagagtgtaggccgggtgcggtggctcacgcctgtaatcccagcactttgggaggccaaggcgggcggatcacggggtcaggagattgagaccatcctggctaacacggtgaaaccccgtctctactacaaatacaaaaaaaaaaaaaaaaaaaaaaaattagctgggcgttgtggcaggtgcctatagtcccagctacttgggaggctgaggcaggagaatggtatgaacccaggaggcggagcttgcagtgagctgagatcgcgtcactgcactccagcctgggtgacagagcaagactctgtctcaaaaaaaaaaaaaaaaaaaaaaaaaaaaagaatacaagagagtgtgacccatagttcagactactcaagtctatgtgggtctgcttcctgaacagctggtaaacagtggagaaagccatactcaaatgaatttcctttcaatttcagtgcgtcctttcactacaaaacagcccaatcaatgtcctgggttctgttcactcagactgagaaaaagaagtaaatcatccatagattttggcattttgttattatcacaaagtatgctagacatacacctcataagtgattttgacaaaaagatgtgctgcaagcacagtgcttgaggggtggtcacgattatggatatcactgtactaatctcagaaatcttagtgtatgtttttttttgtctttactggatagtttcgtatttctacctgcatgtggagttctgtcagggccacattcttccgggatatataaacgtggagaaaagtccttacactgtggtacagtgatccgctggaggaaagtgctatatctgtgcattttgcaagaagtcattctatagcatgtgtatgtctattaacacaatcactgaaccagagccaaggttccaaagggactatctgagatcatctttctaacccagtgattctcgagctcaggtgcatggcagaatgcctggagggtttattaaaaacactgattcctaagctccacctaagaccgattgaatcaggttcttttagtgtagggtgcaggaatttttttttataacaacttccccaggcgatttttctgccagtctatagaatggcctttggggatctctttatcttttaccttcaagttaaaacacatcactctgaaacttcatgagccagatacgaatctaacctatattcaaagaggtttagaaaaagataccttcaacctctctcagcacaatttttttttctattaagctcccttttcaaaatacttgaactccacctggacctaggcaaaatgttttaaaatggcatcagagtgaatcaaatcacattaacctgagatggtgggcaaggatcatgaaaaaggacagagggaagcctgaatgtgagtttgcctgaagaggaaatgatgattccaataagtgccttttctttccgtttgcattctgtgcgtagctaatccgctcggcataatcctcttaacggcatgtgttccatcagtattttatctgatctacttctctgacaatcctatgtttgctagtttccttgtatttttgagaagctctagatgttacatggaaaattcaaccttgtttctctgttttcatacaaagtggggttcttggaattcttagaaaatggggaggaccctttgcacaggctgaagttgtgtgagaagtctggacagagtttccagctttcaaaatttagtaggggaaaactaaatagaggctttctcccttgtctcaaaactggattttaatttgcacactgctggtatgggtcaggggactgttgtgctgaatcagaggatgtaggatacagggaatcatgaaaataagcattggcccccatgcctaggtgatgagaacatttgtcagtagatgttaaggttcctttataagcttgactattgcttttatttgcataaccaaggaaattagaataagattggggcatccttcatttaccatagataaagacagggattctcttactgtagacccagccctatctgtgcactgcctcctatggggaataatctgagggctaaaatgcatgaccacttgccatggtactaaagtccctcagctggacttcatgccataatcacttcatcccattgggaattcagatccctctaaattaaaatacccctgagatgggtgtaaccttaatccctttatcagcttactctgtaattatcaattaatactttaggagagattaactggcaaaaaatggaaatcaagatggcatttctcctggttttgctcctcctcgttttgttctcctggttttgctcctcattagcagtgtgaccttaattttttaatttctctaggtcctgggttcttcatgtatgcagtgaaggaactaggtgatagaatctttgacctctcttctggttctgttttagtgacagaattcactaaattcacatttctggattcctgactgaaaggggattcataagagccttgcttacttcatggctttcctcattgtgtccatggaactcaggccacatgattgtgggtctagtgaaacaaagagagtgtggccagagaatgaaagccataggaaacctagatagccgcataattacttagttgaaagccttgaacagctgaattccagagatgagtttgcaaaagaggagtatcatatgggatgtcacacttcaacagcagaaaaataggctgatacgatcagaaaggatgccaggccattgtggacatctgccgtgcagaatgacatcaagtggctgtctgaacatagtctgaaatctctctctcttgactttgaagagacccctgggcctcaaacttcaaatctgcaaagatagcactatagccagcaggcctggctttctcatgtcaacatgatgcaaacgtttctgtggatacgggatttggagtcaggaaaactatattccagtgtgacatctagccaaaaacaaagaaaactaacaatgttattgttaactttgagctttcctctactttaagcactgggctaaatgtttcatgtactttctttcattcaaatggtgaccttaggttcttctgtgagtcttcatttctttttcagtaaaaatggagcatatctgctttatctgataatagtaactaacaattaactgaatgcttacttgtgcaccgtgcactagggtaagcactttcgtgcattattatctttgtacaataatcctaagaggtaggtagggatgatgactatttatagacaggaaagctgagttggactaagtgaaataaacagcgatgaataaagtctgtggaagaaaggggattcatattttctatgcttcctgatatccaagtcacccagaaatacaccaaagaagctttcagttttcacacctggctgtatgaatttattccatctcagtgagggccaaatggaagactatttgtacagggctgtgtggattaagggagtgaagtggcaatgagaaacagaattcaagtaatctagagctggatagaaactacttatttaagagagcacttggattccagagtttgagtaaaggctttattgactaacttcctaaagtcaccaagaatatcaataaactaaatttacccctttatttatccttacacctttgtattagtccattctcacactgctacaaataaatacctgagactgagtaatttataaagaaaggaggtttaattggctcatggtactgcaggctgtacaggaagcacagcagcatcttctctgcttctggggaggccttaagaaacttgtaatcatggcagaacgaaagggggaagcaggcacatcttacatggctggagcaggaggaagagatgaagtgggaaggtgatacacacttttaaacaaccagatcttgtaagagctcacttgctacacagtaccaaggaggatggtgttaaaccattcatgagaactccactcccatgatccaaccacctcccaccaggacccacctccagcactggggattacaattgagcttgagatttgggtggggacacagatccaaaccatgtcagccttcttttctgtgttatttttatgtccagccttactgaactttctaagctccaattttttatgatctgaaaaatggggctagtaatagctttaactggctagtggtggtgagtgggaggcaaataggagaattaaataatatagcagacattaaaatattttgtcaatgataaactaatatggatagctattaggcctaatagtgactgtgttgattgctgatttattatttgtcactgatgacaggacaatatctctcttattgagaagaaatgccttccttattttcttcttaaaaagattatcatttgcttattttcttcctcctctgtgaagtaaaactttatcaagaagaattaaacatttaaaaaagatgtgcagtaattggtagggaaggataacgagaagaaaagcagacaactgtctgctgcttagcatatccatgagtgtgttaatttaattagaactgccctgtataaatattaaactcaattcacttttgttatgatcctttgcttttcaaagtattcccagttacagattatctttttcaaattcttctgtgagtttgagggagttaatggaagtaaaacaacccaaattggaatgaactgagagaggttttcatcttatcacactttgcttctttctgttattttcctttgcctagttcctggcccagcggcaaaggaggtgattgattttcagtggttttgcctttcaagatgttggcaatgcaacaacttcccttcagtggaattcccattttgtgtagtattttggggtggaggattgaattgctttacatctccacactcctgattaaatgtgaacccccacctgacgtttccaggtcagtagccaggatgtgggatgtagtgcgggatggttgttttatttgattttccccacaactgtgtgagggcaggatatcattgtccccattttacagttaagagtagagtcagtaaatcacagagccaagcatgtataatttctaacagaaattatgggtttagtacctagattgagattttgatagattcaggataaaggtagtgaaaaaattgcccatggaattggtttgaactgaattcatgagaattatagacttccataggcagaagggatcacttttagagtcttttttcagaatgaggtgagtgaggcagagtcgtgcaagtacagatttggggtcctatctttatttaaatttttgatactttgtttagcatggatatttccattcatttttgtgttttaaatgttgcattaaaaattctgtatctagattaccaattcttttggtacccccttaaattttctgcctgatgcaagtgaggcacttccctcaccctattcccagccctgtatagcaggcacaatgctaggttgtttaccagtcatagccccttatttttcacatgaagaaactggggcctaagatcacaaagccagcaccaataacacatggctcttgactcacagtatcgttctcttcttgctagtggagctaaaataataggagagacaaacgtcaggagattgtaacctcataatagagcctgactaaatgtgccagggaaaaaagtgtagcgtccttaaactgtacaagtcagtttagcaccaaatctttcactcacccagcaagtagaaatagctgcaagttgcagcaggtggaatttagattcggttcaaagaagaattacttgacaatgtgggaagtgaggtgctacattgtttcctagataatggcataaaataagagtgggaaattcaaatcccctgagttgggtgtaaatggtggcaactgtgacaaactggagagagagatcatagtagaaactaagttctatacttaacttgattactagagaagcaatgtcttttctttctttctgggtctcggacacccttttgatttcaggtcaaaatcattttcttgaagtaacgtgaaccccaatatggcatcatcctcttctacctatccatagaacctccttgattctacttctttgttttgtctttgcagctttagtcaacagaggctgttcccacagttcctcatccttccctcagttatctatttctgtagctctgggtcctgaattacagcattttctaaccctttgatttggctctcttctgctctgaaaagcattggctctttcacagttactgtacagtatccccactgtggcattttctgactcccatgctgggccatctcatcccccatcaacaaatcaccttgctaccacatggccttttggtaactgacttttatgtagaataacatacatgtagaatgtgtgagagaacaatgcaggcaggagcctggctttgctctgcactgaatatttagcactagcatagttctctgctgtacaaataggaagtcaataatacttgttgaattaataaatatttatacagtgcaatttaattaattccaagtttggcatcttctaaaattcacataggaattttcaatgtggccaaaagccccacatttcatagcaaaatcatgacttggctaatcagagagataaaagaaagaaagaaagaaaaagctctgccctttgcatgtggcctgataaacaattatgccctccagacaccagggctgtgaattccgcctttttaaacaggcccagagtcagcttatttggagattttcagcaccgtggacagaggcaccaggttactttttatctgtcactccctgaacagcaggatgaagaactactcagtttgggacagggctctcagccactgtggtgaaaatcaccccctttagcagaaggaaatttacttagaccctttttatttcccctttcccttggaaaaattgcattttcagttgtcaaggcacttaggcttctacaagttatttttcaggtgcctggaggatggaaaagggttgccctggaaattgatatcttcttctgagtttggcttaacaggggaaccaccagtgcccttgcggatggctgaggtgtcttttatgctaggtatggctctcttccagataaccaagtgtagacaggagtaggcccagttgttcatggagcattggttttaggacttgacctaaaagctgggtcatactattgccagggcaagaattacaaaagcaggtaaactctgccaagatttttctagtggaacatacacattcatggggatgaatccttcccaaactttcaggttttactgtatttggctgtaaaattcaaaagccagattgactaattctcagtgcctgttaaattcttttaggagcaaagtgatacattgtccccacccctgcctttcctaagaactcattttttcccctactcattagctgtattcaaatgcagagctttgctgatgaacagcaaagtggcttcttgactattgggtctctcactttgtcttctcctggactctgtaagtagccctactttcatttattttctaatctttgatgcctttccttcattttcttgaagcacctttacttttcatagtctgtctctttctttttgccccttttatggccattacacacaaatctgagctggccctcttctcatggcaatagacatcctgggctactttcatgaggaagcttaggacaggagctgatggagattagccaaaatgtcagagttagcctaccctttgacctgggcctggaggtgaggttttcttcttacacttactttggaatgagaaatgagagagtgaagttttcttcctacacttacttcatgtcaatcttctcagtgtctaattgctatgatcagaaattcagagttatcccaggctgggtatttgcataccacaatgagaattgctacaactaatgttgcttgatggaagggcaggagctgaaattttacctgagccaccaattttctcaaaaccttggcctgagagagaattcaagttttacccagaagtatctacattttgttttttacaaaagggctcatgatagagctcagttaccttctgctatccatctgtgccaatctgaactgaatcagagtatcatttccttttttttgcatgtgctggtgtctcctgtgttggccttttagagtctgacacggtatttgggaccctccatgagattggaaggagttccattaagtgatagataaagatgtagccagtagaggccaaaggtactcaaatactttttatttaaccttcttactttttgtccttagggaaactgtagacactttgagactgtttattttatgcttcttttctaggaggtaaagcttttgggggaaggttttatgctttcagaattttcagttaacatttctgctttgtgatggtctcccaatcccatctccttcaatgacagctccaaaatatcaccagttttttatttttcttattcaaccctaagttttattggagaaccttattcctgcttcatggagaaaactggctaggcgtggtggctcatgcctgtaatcccagcactttgagaggccgaggtaggtggatcacctgaggttggaagttcaagactagcctgaccaacatggagaaaccccatctttactaaaaatacaaaaaaaaaaaaaaaatagccaagtgcgcgcgtggtggcacatgcctgtaatcccagctactcgggaggctgaggcaggagaatcacttgaacccaggaggcggaagttctggtgagccaagatcgcgccattgcactccagcctgggcaataagagcgaaactccatctcaaaagaaaaaaaaaaagaaaagaaaagaaaagaaaaagaaaattgatgatattttgtgtgtgtgtgtgtgtgtgtgtgtgtgtgtgtgtgtgtgtgttttagttctccagcccccttagaaagattctttcttccacaccaattctcatttccttttcttcaggtttagagatgacttctctcattcaagaccagttccttctctcctatctttcaggagatttctctataattcattctctctctccacactcaccccaccccactacatgatcttcaacctctccctctctcttctctacttgtcttcattctgtcagcttagaatcatctttcctgtgttcccacctagcaaatatcctttctttgacgccacatctctttagctcccatctttgtttatcttcgctttcttcttcttttttttttccttcgtatccaaatcatcattcattacacaactcattgaaatctgaattatctttcttttcatccaatgaatcatgcctaggtcaatgatttatttttccaccaaacttgctattcttcgagtatttaccatttctgcatgtgacaccactatctatctcagctagctgtctcagaaacgtcacatcttccacacccatcaagctctaattactttcttcctcaacagctctcaatttcctgtcctctctatttctgctaccactgcctatattctgagctttgttgtttcttactatgccactacatcagtctcccaactgatatctctctctctctccctccagccttttttttttttttttttgagatggagtcttgctctgtcgcccagggtggagtgcagtggtgcgatcttggctcactgcaacttctgcctccaggtgattctcctgcctcagcctcccaagtagctgggactacagccaccacgcccggctaatttttgtatttttagtagagacagggtttcgccacattggtcaggctggtctcaaactcctgacctcaggtgatccgcccgcctcagcctcccaacctccagctctcttctagttgtttatcctcctgtatcactagtgtacaccctcactcatattcactgtgtaaaatgcaaagctgacctgattaaaatctgtgttaccttcctatttcctgtggggtaatagtccaatcttctgtataaggctgtccacgatccatctcctgccatttttcctgctttttgttccaaccatcatttaccttgctgttcaccctccacaacacccacagttgctagtggttccctgtatttgatacgctgtttctcatgtttgcggtttgtgggagccttcccctttgccaatattggcatttgcctattttcttagttaactcgtggtcatctgttgaaaatcagctcgatatcatctctccaggaagccctccccgcatttctgcactcactttctccatccgttaccaaggttgaagcaccttcctttctgttggtataaagtaccatgcatatggccactatggccattgcactcatggtactgagttacctgtttttgtattttttttcctcaatgtgcctccatactcagtacatcatttttttctatagtactgggcaaggttcttgacacacatgagctgcttaattaagtttaatgtatttatgacaaatttagagcaggtttgaagaaattcaggcttttccccattaagtaatggtgcaccccattaagtaatggtgcactttgggagaaatgggctgaaaaagttttaacgatagcttttgcagcctatttgccccaattgtgtaaatactaatttaaaaccaaatgacttctagaaagtctgtagtcagtcttcaccattgggagataatgaggcaacatggattttgctgcctctctcttaaataacatgaatctactgtggagacttttaagcctatgatgatattttatatcaaaactgagataaataaaaaatgttcactgacaataatgactatagataaatgctgtcagttgtaaggaagtgtcaatcacagacagacgtcagtggatctgtgagggccacactgaatttttgcatgtgtaaactgtataaaataagattttaaagaatgtcataatcatattcagaaagtggaatgagtgtgcatctgaatggctgcccaatctataacgaatattctatctacagggcaataagcagaaaaggtgatgcagagcagccagccagatactatcatcctcatttctttaacatgtatttctagatccttttttgctcagaacattgttatggcattcctcagaacgcttttagtctctctctttctcttttatacttaaaattctaaaccagattctggtgtagagttctgagattatcactgtgccacagtgccattcaacattcctgggattacatttttctttacaaaaggtagcactttggtattcccctaggaccctcagattctccttttttcttttcattgctgcttaccagaaacaggtgctcctcaacctgtatttgtgcagtattttttgcaataggcaattatatgtacttttagtgataatagttgtttgtacattaacaatagtttcacttttaaaattggtgtattttccccttccgcatatgtgtatgtacacaaaggaatacaaacaaggacagacctgattgttcctttgttataagtaaagaccatctaattataataaagcacaattaataattgtgtgtaatgagcaaattagagcaataatacaagaaaatgagaggcaattccttgaaatgtttctgtcttatcttttaattgaaaaaaaaaaaaaagccttccatttccctcaggtagagtgaaactgacaactgagctgccctgcttctgccaaatatgaagatatctaagactctgcttctctgtttactgggcaaagtcctggagggagagtggggaggggaaaggaagaagtctgttgaacttggggcttagtttcactctggattatgtggcaaattgattttgataacaggcacctccccattcatacctatgttattcttaggattatgcagtaaaatagtttaatagtaaaaggatagaactttggtgttagaaagacctaatttctggtcctgactttgccactttactaatttgtggttttaagaagctacttaagtattccaagatgtagttataggtcacatggtttttgtgacacttaattggatagtgcttacttcaaggcctagcatgtagccagggctccatcaatattctctatgagagaaagaggaggaggaaaagactaaaaagtccgaaggatgatatgatgtagttgaaagaggatgcacttagacacttaaatcctgtattcgtttcttactgtctgtattgtgttgggtaaagcaacttgaactttcaaactcaccattttccaaatctattaaaaaatggataatcatgcttaatatagaacagttctgagaattaggtaagaaaatgtctatgtaagtgcctagtgccacatcttgccattagtaagaaccaagaaatgctatttgtggtgggatgccattgatgttgggtagagcttagctatgatttatgatactcccaagagactttttttttaatcgtgtgaagccatgtgttctattctgctcaacgttctcatcagactcatgattcctaattcttaaagcaaaaaatggggtctgagagtgtttcgtggcatgacagttgtggtcagaacccctcccatattcccttattctcaccaagtcaatgcaacttcgatcaggcatgcatttttctgcctgggggcttgctctttgctaatggatctgctttgtatcctgtgctatagaccagaagtgcagagaaattaatgtcctctttcctcagtgttcatcaaacaatggctggtgttgttttctactggctcctagaccttcctcagtgagctaaaattccattttccctagatagtagctggctcttgccccgtctgtaggtcacatccccgcatcacgttcctaataatctacctgcacttcactcttggtctgaaggtttgcttctgaggaaacccaaactaaggcatggggctactctagtaagccagcccagtgatgtttatggtgaattatcataagtagatctcgataccaggatttgtattatattgtacagaactggttataatagaactagctctagctggtctgaggcttaatatgtagattgaaataaacatgcctgagacctacagattatttttcttttttttttttattatactttaagttctagggtacatgtgcacaacgtgcagatttgatacataggtatacatgtgccatgttggtttgctgcacccatcaactcatcatttacattaggtatttctcttaatgctatccctcccccagccccccacccatgacaggccccagtgtgtgatgttccccggcctgtgtccaagtgaactcaatgttccattctcacctatgagtgagaacatgcagtgtttggttttctgtccttgtgacagtttgctgagaatgatggtttccagcttcatccatgttcctgcaaaggacatgaactcatccttttttatggctgcatagtattccatggtgtatatgtgccacattttcttaatccagtctatcattgatggacatttgggttggttccaagtctttgctattgtgagtagtaccaccataaacatacatgtgcatatgtctttatagtagcatgatttataatcctttgggtatatacccagttatgggattgctgggtccaatcataattctagttctagatccttgaggaattgccacactgtcttccacaatggttgaactaatttacactcccaccaacagtgtaaaagcattcctatttctccacatcctctccagcatcttttgtttcctgactttttaatgattgccattctaactggtgtgagatgctatctcattgtggttttgatttgcatttctctgatgactggtgatgatgagcatttttacatgtgtctattaattggctgcatagatgtcttcttttgagaagtgtctgttcatatctttgcccactttttggtggggttgtttgatttttcttgtgaatttgtttgagttctttgtagattctggatattaaccctttgtcagatgggtaggttgcaaaaattttctcccattctgtaggttgcttgttcactctgatagtagtttcttttgccatgcagaaactgtttggtttaattagatcccatttgcctattttggcttttgttgccattgctttttgtgttttagtcatgaagtccttgcccatgcctatgtactgaatggtattgcctagattttcttctagggtttttatggttttggatctaacatttaagtctttaatccatcttgaattaatttttgtataaggtataaggaagggatccagtttcagctttctacatatggctagccagttttcccagcaccatttattaaatagggaatcctttccccatttcttgtttttgtcaggtttgtcaaagatcagatggttgtagatgtgtagtgttatttctgaggcctctgttctgtttcattggtctgtatatctgttttggtaacagtaccatgctgttttggttactatagccttgtactatagtttgaagtcaggtagcatgatgcttccagctttgttctttttgcttaggattgacttggcaatgcgggctcttttttggttccatatgaactttaaagtagtttttttccaattctgtgaagaaagggtcattggtagcttaatggggatggcattgaatctataaattactttgggcagtatggccattttcacgatattgattcttcctatccatgagcatggaatgtacttccatttgtttgtatcctcttttatttcattgagcagtggtttgtagttctccttgaagaggtacttcacatcccttgtaagttggattcctaggtactttattctctttgtagcaattgtgaatgggagttcactcatgatttggctctcagtttgtctgttaatggtgtataggaatgcttgtgatttttgcacattgattttgtatcctgagactttgctgaagttgcttatcagcttaaggagattttgggctgagacgatggggttttctaaatatgcaatcatgtcatctgcaaatggagacaatttgacttcctcattgtgtaattgaatacagtttatttctttctcctgcctgattgccctggccagaacttccaacactatgttgaatgggagtggtgagagagggcatccctgtcttgtgccagttttcaaagggaatgcttccagtttttgcccattcagtatgatattggctgtgggtttgtcataaatagctcttattattttgagataagttccatcaatacctagtttattgagagtttttagcatgaaaggctgttgaattttgtggaaggccttttctgcatctattgagataatcatgtggtttttattgttggtgctgtttatgtgatggattacgtttattgatttgtgtatcttgaaccagtcttgcatcccagggatgaagctgacttgatcatggtggataagctttttgatgtgctgctggattcagttcgaaagtattttattgaggatttttgcattgatgttcatcagggatattggtctgaaattctgtttttttgttgtgtctctgccaggctttggtatcacgattatgttggcctcataaaatgagttagggagggttccctctttttctattgattggaatagttttagaaggaatgctagcagctcctctttgtacctctggtagaatttggcagtgaatccatctggtcctggactttttttggttggtaggttattaattattgcctcaatttcagagcctgttattggtctattcagagattcaccttcttcctggtttagtcttgggagggtatatgtgtccaggaatttatccatttcttctagattttctagttcatttgcatagaggtgtttatagtattctctgatggtagtttgtatttctgtgggatcaatggtgatatccccttttttttattgcatctatttgattcttctctcttttcttctttattagtcttgctagtgatctatcaattttgttgatcttttcaaaaaaccagcccctggattcattaattttttgaagggttttttgtgtctctttctctttcagttcttccctgatcttacttatctcttgccttctgctaacttttgaatttgtttgctcttgtttctgtcgttcttttaattgtaatgttagggtgtcgattatagatccttcctgctttctcttgtgggcatttagtgtaaatttccctgtacacactgttttaaatgtgtcccagagattctggtatgttgtgtctttgttatcattggtttcaaagaacatctttatttctgccttcattttgttatttacccagtagtcattcaggagcaagttgttcagtttccatgtagttgagtggttttgagtgagtttcttaatcctgagttctaatttgattgcactgtggtctcagagacagtttgttgtgatttctgttcttttacatttgctgaggagtgctttactcccaattatgtggtcaattttggaataagcgcgatgtggtgctgagaagaatgtatattctgttgatgtggggtggagagttctgtagatgtctattagttctgcttgttgcagagctgagttcaagtcctggatatccttgttaatcttctgtcttattgatttgtctaatattggcagtggggttttaaagtctcccattattattgtgtgggagtctaagtctctttgtaggtctcgaaggacttgccttatgaatctgggtgctcctgcattgggtgcatatatatttaggatagttagctcttcttgttgaattgatccctttaccattatataatggccttctttttctcttttgatctttgttggtttaaagtctgttttatcagagactaggattgcaacccctgctttttttttttttttttgctttccatttgcttggtagatcttcctccattcctctattttgagcctatatgcatctttgcacatgagatgggtctcctgaatacagcacactgatggatcttgactctttatccaatttgccagtctgtgtcttttaattgggggcatttagcccatttacatttaagggtaatattgttatgtgtgaatttgattctgtcattatgatattcactggttattttgcccattaattgatgcagtttcttcataccatcaatggtctttacaatttggcatgtttttgcagtggctggtaccagttgtctctttccatgtttagtgcttccttcaggagctcttgtaagacaggtctggtggtgacaaaatctctcagtgtttggttgtctgtaaaggattttatttctccttcacttatgaagcttagtttggctggatatgaaattctgggttgaaaattcttttattttagaatgttgaatattggcctccactctcttctggcttgtaatgtttctgctgagagatctgctgttactctcatgggcttccctttgtgggtaactcggcttttctctctggctacccttaacacttttcccttcatttcaaccttggtgaatctgacaattatgtgtctggggttgctcttcttgaggagtatctttgtgatgttgtctatatttcctgaatttgaatgttggcctgccttgctaggttggggaagttctggataatatcctgaagagtgttttccaacatggttccattctccccatcactttcagggaaaccaatcagacgtagatttggtcttttcacatactcccatatttctttgaggctttgttcatttctttttactcttttttccctaaccttgtcttcttgctttatttcattaatttgatcttcaatcactgataccctttcttccacttgattgaatcagctattgaaacttgtgtatgcatcatgaagttctcgtgccatgattttcagctccatcaggtcatttaaggtcttctctcactgtttgttctagttagccattcatgtaatattttttcaaggttcttagcttccttgcgatgggttctaacatcctcctttagcttggagacgtttgttattaccgaccttctgaagcctacttctgtcaactcgtcaaagtcattctccatccagctttgttccgttgttggtgaggagctgtgatcctttggaggagaagaggcactctgatttttagaattttcagctttcctgctctggtttctccccacctttgtgctttcatcccacctttggtctttgatgttggtgacctacagatggggttttggtgtagatgacctttctgttgatgttgatgctattcttttctgtttgttagttttccttctaacagtctggtccctcagctgcaggtctattggagtttgctggaggtccactcaagaccatgtttgcctgggtatcaccagcagaggctgcagaacagcaaatattgcagaacagcaaatattgcagaacagcaaatactgcaggaaagcaaatattgctgcctgattcttcctctggaagcttcgttccagaggggcagctgcctatatgaggtgtctgtcatcccctactgggaggtgtctcccagttaggctacacgggggtcagggaccaacttgaggaggcagtctgtccattctcagagcccaaacactgtgctgagagaaccactgctctcttcagagctgtcagacagggacgtttaagtctgcacaagttgtctgctgccttttcttcagctgtgccctgcccatagctgatgtggagtgtagaggtggagtctagaggcagtaggccttcttgagctgtggtgggctctgcccagtttgagcttccaggccactttgtttacctactcaagcctcagcaatggcagatgcccctcccccagccaggctgccaccttgcagttcaatctcagactgttgcgctagcagtgagcaaggctctgtgggtgtgtgacccatcgagccaggcacaggagagaatctccttgtctgccagttgctaagaccttgggaaaagtgcagtatttgggcgggagtgtcccgttttttccaggtagtctgtcatggcttcccttggctaggaaagggaaatcccctgaccccttgcacttcctgggtgaggcgatgccccaccctacttcagcttgccctccatgggctacacccactgtctaaccagtcccagtaagatgaaccaggtacctcagttggaaatgcagaaatcacccatcttctgcatcgatcacactgggagctgcagactggagctgttactatttggccatcttggaatacccactccagatttcttttcttaaaataatacctttctaaatacctgttggagtgcttgagttggtaggggctatgggaatgtcatctgactgattttgtcagaggactttgtggatttgagacagggtgggtaggagaggatcatcacattgattccagaactaaacttagggcttgaggtcactttaggtggggtagaagtggggatatctggcatactatgagatttagagggccactgtagcctcataggtactcagactttatagtgttggtttaattagggattttcttaagctggctgccctgattcaaggtgatggttatctgagcaccaggtaaggcctgggaagggtagaggcaatatggctagatgtccatttcctataatctctaaatttgtatgaattgatgcattcatgatctgagatcataaatgaagtccataaagtccataaacctcctgatattttatgtaaaacttaatgcatatgtacacttttctagagaggaagtcttgagcttttggattttaacaggtgtcctcaacatattgaaaactgcttcagcttgatgtccaatttcagtgctaacaattgttgcagaagtgtttttgagcactaatcatatcaattgcaataatggtgctccttggggtctcaggtgagctgagacttggagccttgggatccagaactcacccttaaataagcatagcatctctcttggtgggggtctgtggaggtacagggaggttggagagagttggcattacccaatttagtgaggttaagataaacactgcagagtaatccatggctgacctcagtgatgagttatccattttgcaatctggccttttattacattgctgttgactttgttgttgttgttattgttacatgtttgtttttctttggatatcaatgcttttatgggaattatttctcatttcgttaatcctagcctagtttccttcaaaagggtcttgagtgcaggtagcctcttcagggtagagtaaaacaacaaaaaagtcaaagccggaatcaagggtgtgttttctatcatacagaatattatgatggaccactgaggctcagtgccactagggactctcttgggaggtgcatagaatgaatattaaaactctctgcctgaaagatggaataaggcagaatgtatttactgttcccatttccccttggccaaggattacttcatggggcattaactgtcttacatttccaggtttactcagatgccctgcaggttcccacaggcttcctgcatgctgatagcagaggagccctggggcacaccatgagagatacatgatacagctcaggcaaatgctatcaagttataccaaaggcacctctttgcagcagctggcatgcaaaagtgaacagagaggatatgagggcacaagaggtgtctcatacaccttctccattctagcatctctcctcactgagaccatggtaatcttaacttgtaggcatgcagtgttaataaatgaagccaaagtgctggatttgatccctatgtaggtcacttagctgcccacagtgaaaagtagcaccatggacatcaaagtgaacaaacccctgcctgagtacttatttccatggatcaaaaggatggggaaatgctgatggagagttgaactttataatcgggaaaagtccattcaaatgggctattttattcaattcccaaatagccctagactttatataacttacatggtggaattcatgcttttactaacaagtaagttaaggctcatagaggctgcgtgacttgaccagggtcccatagttaatagactgaaatgtattccttcttacttcaaacttgttcacatcatccagctctctggcaacacattactggaaaagaaaaatagttcagagaaggatgtgctcatgaggactgcatagagttgcaatcttcttgggagggtacacatgcatgacctgccaaatctgaaatattaggaacttttgcttgcaacttgttccatctacagcatgggtagaggtggcaacagagaggtgactggggagaggtttgcccaagagacagcagggagattctgggaataaacaggagttgggttctcaatttggcaactaagcattcttttgttattgcactttctcaggctgcagcagagcctgattagctttaaaattcatttccattggtttcttctttcatgatagttttagatgttgttttattggcattcctatagatgtaatttaaccttggtagtactgatgaactggttgttctcttgtaaattttagaaggaaggtggacagtctgggagaaccagaactgacaggagcaatagggtgcattgctaactggcaccctgtgctctgaggtcaaaaggaaacataggaaggtggtttctgagggcaagacctaggctcctctctcaattctcttttgatttcaaattttgtttcttaatttactttaaacacacacacaaacaactttacataaatgtgtacatatgatttcagtacattttcctaagtgtattcttttctttccatttttgtttgatgtctcccctcttctcctttttgtccatgttggtcccctaactctactccaagatagttcatattaataacctagtataaatcctggcacatttttctctatacacatataatttatacatatagaaatgtatacaagtttttcaggtcattgttttataaaatgggatattatatacttattttgcatcttgattttctttttagaagaacactattgtgcatcatagaataaatacaaaaaagtttaaaacatatttaggtactttaaataataatgaagcaaacatttgtagtatgtctatctacccactgcattaaagaaatagggaattaccagtgccttagaacctgctgtgtgccactttgcaatctctttttcctctttccctcaggaactctactttctggaatcagtcctgtgtttctctttctatattttgcttctgttgctcaacattactttataaaaattttttcatatcaaaaggcagtgctctaattcactctttttaatgggtgcataatattccagtctgatgatatgttatatatgtggtattctccttcctgtaaattataattttatttccatcttacttttttctaccatgcacaatgttgcaataaatatcattgtgtatttgcactggtgcttttatatctggtgcagtccaggaatggggttgataaatagaagaggatatgtattttaaatatgaacaaatactgtcatatggcttttcaaaacattgtaacacttcacatactcaagcaatgtatgagcacacccttttcacacatccctgatagtgatacgaattattgcttttttaaattgtgccagctgagaagtgtaaagtgatatttcattgttattttaatttgcatttctcggactgttagtgaatctgagcatttttgcatttgtttgtaggccatttagctgagcacttctgtaaatgggctattcatgacttcttgtttctacaatggagatatttgtctttttcttgtctttccatagtaatatttgtttaccttgtttagggtatattttgccatcaaatatgttactttttaatgtagttagatgtctgtttttaactttcacatcttctaatttccagtcttcgtagagaatgttttccccgtccccacctttaaaaagtgtgtttagtttttaagattctttttaaatctttgttttcattttttatatttaaatcttaatccatttagaaatttatttttgtgtttatagatgctagaggtccatgtttactttgttcctgatgataatgataataacaatagctaacacttactgctgctatgtggtaagcattgttatataggcactttccacatattgcatcgctgacttggccttgtccctcacaactctgagacataggttttcttaccatatccattttacacttgaggaaaatgaggcacaaaaaaattgagtaattagcccaaaggtcacagaggaggtcaagtggtgaatgtgggatttgaactctgggaatctggcactgaaatccactcttattatagttcctcttatttgttaggccaggactatttatgaaaaaagccactcttttcccactgaattacattacttttcttgtcatttattaaattctcacatataccagagtttatttctcgattgtctgtctgctccctgatcttttcatctattcctagcattttttgttgagttgatgatcatggtcgtataatgtctgatatctatgaagtccagtcttctgtcattgctctttttttttcatttatttttttttgagacggagtctctctctgtcgcccagcctggatgcagtggcgagatctcagctcactgcaagctccccgtcctgggttcatgccattctcctgcctcagcctcccaagcagctgggattacaggcgcccgctaccacattttttttgtatttttagtagagatgggtttttaccattttagccaggatggtctctatctcctgacctcgtgatccaccctcctcggcctcccaatttccaggcattcatacttttatgtataatttatgtttattttattcaattaaagtagccgatgggatcctaattgaagttgtattaaatcaatatgttaattttgggacaattgccatgttcatactaattactccataaatttaaaatatagtatgtttcctcttcattcagaaattaatttatatcttttatatatttatattttctttgtgttgtcttttaaatttttgggggagatgtatttataaatattttaaagcttttgctgatataaatagaaatatttttctcatttctattccttagtgattgttactagagttgagaaaaggtactgattttgtatattttatatataaatcagtaggaagagcactgtcaatctaatatttttaattaattaaacaagaaaaatacattcatgtcattaagggctgaaacagcttttgataaacttcagcaggcattattaatacagttcaggtaaaattgaaataaaagatgattgcttagatatataaagattatttactaaaaacagcaacagatttaacaaacatggagatcattttagttaaaattagaatgcatttagggatgtcccttgttatctatattaaacattgcatttgctatagcctccaaggccataaaacagaaaagtaaaatagttggtgtaaatatcagaagaggtaaaactatctctttttgctgatactataattccttatcaagaaatttaaacaactctagttaaaaacttacagaatgaataagatactttgataagctatctggatataagtatataatatcaatcacttctttattctatcaataattaaccatttttagttctcaaggttcaaatttcagagaaggtggctttgagctataggttggatcatttcccatgacttggacagggagataaaagcttcttaggacggccccactagactctaccaagtggaacaaaggtgattgctcaaatttgagctgaaaggggaaatggatgatagacagaagttttttaaaaaataaactccacatactgtatgtaactgcacttcagaagtcaggtgcctagcttttaagaggataaatctaaattctttgcctgcttcttctagaatccttcccaaacccttttccgttgccccctccctttttacctgttctacactgcatcccaactggttgttacattgtcccctgcacacgttttgcacattcctctgttgtttgcccatccattcccctcactagacgtattctattcctttttctttcatgtaattctgattcgccctgtagggctctctgcacgttcccatcaaatgcttgttccattacccaagaccaggtcccttctcccaaaccacaggggctctaggagcccactctaccaaagacctgaagaacctccagctgtcacagtctcttcactcctaggactgaaggacctgttctcttctccgcatctgttcctgcatccctgtgacatctgccccaacgaaatcagaagaggagaagggaccaggactctcacttcccagactatacattgttcagcttcctctttccccctttctgacatggaaatagcgagcgaagatttgagggccagttttttcatgttgttgttttgggatgttttttggtgtgctgtcatagattttattttttcatttagagaagccaggtccaacctaaacagtttcatactcttaccaagaggatgctttgtccttcactgtttcaagtttgtacaggattcaggaccatgttttgcacctagtaaatgagtcttcgtttatccaaactattttgagttctcacctttatgcctttgctgttgctatgtcatttctcctgaaggcccttctccttctctttgttcacttgattactcttagtttttacatttcagctcaggtgtcaactgctccaagaagcctttctcgagctcatgctccccttcaccaaactgccacaacaacctgtgtgaatcttgatcaccaagcttacagtgctgtttgagataattatctgctcaagtttctggtgttcccattagactgtcagtgcctcatcgatgtgctcagcctctagctgtgaatggtgcacaggtgaccccagtggatattttttgaataaaaaaataaatgtatggatgaactgagcaatgttttgttaccatggatgttggtcatatcatttcatgatttgctatctaattttgccatttctcctctaattccattaccctcccagctcttgtttctctacgtgagcatgttgtgtgaatgctgagtgaacttttagtttactatgcattcatagtgcattcattccagtattcatttcttccttgggtcctggcctactccttccttttctctcatctattcattctaatctcatttgaacatcaagctcctcccactgtcgatactttatcatcattactatcccttttagtaacttagtaaaaaagcacctctaggatctttcaacttactaaagacttttcctagaggaggagacaaatctgattctgcaaactttttttttttttttttttttgagacaggatctcactttgtcacccaggttggagtgcagtagtgcgatcacagcacactgcagcctcaacctccccaggctcaagtgatcctcccacctcagcctcctgagtagctggaacgacagtcatgtgccaccacgcctggctaaattttgtaatttttgtagcgacagggattcagcatatttcccaggctggaattcctggacttaagtgatccacgtgcttctgcctcccacagtgctgggatgatatgctgcaagccactatgcctggctggctctgcaaacttttacttctatgaccctttctttctcttggtttctccttgacacttctccccaatgaacccatggtgcaatatgggagttggtgccctaaaagtgactacctcctaaaatcactcacactcaattattagtaaagttcaaatgacaacttttttatgataattgtgttttaaaagaaaatctgagggatagtaaaaacaaaaaaaaaattcatgccagaatttcaggcaagcaccagttgagaatgtatttttgtgtgagcagggtgttatcagtaaggttcaacatgttctacataagggactggaagctctgcccgggatgtatgagggcaatcttgcctggcctaaaggttggactgtaggtagcacaggacttccgggtttggagatttagaggataagtctaggcttcacccaaataccaacaataagaacttgagtagttcctgggacctccctgagcctaagtataaaatgaggacagcaacacatatctatactgccatgctgttataagaaataaatgagataagaaatataaagccttaggagtcaatacagtgcaatggtggagcatgagtattgcagagtccgattggttgggttcaaactctggacctgacactaattaagggttaatgaccttgtgtaagcttttaatctctgtgtgcctcaatctctctatccatatgataagggatacaagacctttctcatacagtggtttaaagatgagagtaaataatatatgtgagaacacaaatagaagagcatgcatatgaatagcatttaatgctcagttaatgaggctcttatcaaagtgacagagggcctccatgtaatcagagaagggtccacttaaggctctattggcatttgctgaaggatcaagacttgctgtattcctatctatgaatagacctatggaattaaaacccagtacaagcattttttttttctacttatatctatgtatgctctttctctcttgccttcttgataattcagaagcagaactttgtcttattactgacttccagaagaaatttcacaactctcataaagtttgtgatttttgtagactatactgaacatttagtgactcccagggaggatcattttaatcagcatacaatagtttgctcttcctcttcccttccattttcttctttccctttctccccccttctctagttttttaatctcacctcctctccctgcccttttctatcctcctcccctctcatttcccttcctttatttcttctctcatttctactctttccccctttctccttccttctttcctgccctcctcccctccctcctcacctcctcccctttctccttttcccatccctccttccctccttccacttctctctcctctttcatctccctttctatcctccctcttctctcccttccccactctacttccccccattcctccctggagttctccctttttacttttcttcaagtgggcttatcaaagtattttttttaaataaaataaaggcaagtctttctgtaagaaaaaaagtcagaaaaacattttcttctcattataggaccaaaagtgcccttagagatcaagtagcccagtgatccccagactttgcttgttggtcgcgataccctgggcagcatttgaaagccaggccctgcctccagtggtggttctgaatcaaaagatcagtgtagaggcttggagtggcatttgtgtggggtgtgccagaatatatttattttaattcaagaagatttggatttcagtcctaagtctgtcacttgctaatggaaccatcttggctgtgtgctattaaaacttccagagcctcagtaacatttgtaagaatgtggaaaataatatcttcctcaaataacaagcagtgatcagcagattggctggcacatagtaggtgttaaaaattgtttcttttcttccttccttttgagtatggtacagaatcctggttatctctctcaacacacaggatggtgataaaggaaagcctgagtatttctgtgccttgtagcacatcttagaaagggagaagggctattcagcagcattgttcatgctcaggcccaggcccagctgcctctaactgtggtcatgagaagtctcagacactggcatgaagtcagcaaataaaaataaacaacatagccaagtatgatggtgcacgcctgtagccccagctactcaggaggctgaagcaggaggattgctggagcccaggagtttgaggctgcagtgacctgtgatcacaccagtgcactccagtatgggcaacagggaaaaatctctgtctccaataaataaataaataaataagtagtaattagaaataaataaacaacatttttgaggagaagggatgaagttgattaatgggtacaaatacaccgtttgatggaataagacctagtgttagatcagtaaggtgactatagcctataataatctattgtacccttcaaaatagctagaagagaataatttgaatgtttctagcattaagaaaatattaagataaacatttaagtgatggatatcctaagtatactgatttgacctttataaattatatcaatgtattaaattatcacatatatcttgaaactatgtacatctattatacatcaataaaaaataatttaaaaccccatttattgtgaattcactttcccaggactattttaattaatcatcataacaaccttatgaagtaaatgctatgattatctttaaccacattgacttggtaaaatgtctgtaggcagagcttttttatttttttgaattttggctactatttgcatgtctgtatcatttacgccgtcctttgtctgtgtttcttagatcccaaataagtactgaggggtcctatattcatttcaaccatactgtattgagtacctaatataaaaaatccagcctctagtttgaggagctgaaagaatgaaccctatgcagtcctgattgtctgggcttattttcacttgctctgtgaagcacctgagcccttgttggtgaaccctgctacagtccccactgagtttaagacccactcttttcaagggtccccatgttaggtttgcctccacaccttagcttccaaagctttgttcccccctgccaatggggcactctagccccatccacccatcccctctcagagttgtagaaaaggcttctatcagcaagaatccagagaggttattcatacatgggacacttgatagtggttcttattctttgaggaggaggaatacttctgatttaatggtaacgaagttctaattttggtaagtccggggatctgaggctagagctgctttgtcacaagtcttgtttgcatatgctgtgtatttctacccataccctcatccaacttatctaaatcttgctcctttttttccattcttgctgatttaattttatccctcaactcatggttccaaataatcccctgtgttagttgtgcctacagcaacttgtttaactctctctaccaggcaataaggtggaggggcaggggaaggataaatgcagcctacttgtgatttatcacagttggaaagaaaagggaaaagacatgcataacactttttaaaaaagaaccagagaggcagagagagaagagtgtgtggagggagatgaagggtgcactctgatgggaacagatggcccaaaaggtaagtgggtggcagagagtaaaaataaccagggagtgaccaagccttcattttctttgaaacactcacactttagggatatattgaaactgctaattttgttggcactttgacacctcctcctaattaatgagaaatttattaggaggatgactgaggtgagcaagctgcttacaaagagagaagggagagaatacattgaacctattcagcttggcggtcacgaccaagcgaggtgccattggatatgtggttacttgtgggtgagctcaagtagaagcctcgggctgggctcctctcctggggtggaacccttctgctgggctcctttcctcctggctccctgtactcactgctgctctctggtttaccagcatagaggcacaaccccaaaacaggcttcgtggggaccaaattggcttttggatctcaagtgtgtctctgagtcactccagtgaacacgttataggtcactctgtgcaggttagtggcccgaaaatctgcccttcaaaggaaaagaaaagtgaaattctcatgacttttacactttttgtcaaatcttctgcatagagaccttctgagttggctctacctagtctgtgattccaaatctcaagcaccacctgcaattgtccatatttttcacccacaggatgctcatgttaccaggaacttaaaagagtaaacgtggttgctgacattttagcgttcgtgggccagttttctgagatcaacactaggcaaggtactggggagtgtcttctaacacttttcagactttgaacagctaactccattttctgggagagcagggttacttgacaggtatctaaatcctctgtcctagccatccaccaagccacccatttgcccttccaaatcccttatgcagttcattatctgtgcaacatagaacagtcgagagcatgggctctggaggcccattgggagcttattcactcctctgctctgccattcatcagcttgagttgtcttaggcaagtcacataccatcctctgtgtctctatttctccctctgtaaaatgagatcactaatggcattcactaacggatggttgtgagagttaatgaggtaacagttataaagaggttagtactgtgcttggtataaactaagcacaaaataaatagcactatgacatttaacactataacatttaactttcaaaatgatttcatatgcaattttgtggcagtgtcttcatacattgggtagtacagagttttaaagattatcctttaataaatggaaaaattgagtcatgtaatggattagagactttcccaaggtttacaactacagaggaatagaattggctctagagctaagtcttctcattctagtttaattgtttgtttatttgtttctatgcaaacatgttcatactcttccttagcatgtttcatcctatctctactagtgcaacaagatgctgagaagagggaagaatgccacaaaactgcatacaccaaagatgtgtggctcaaaggatacaacttttgacttgaacagtcaccaggccttgtgatcttgaacaaatcattctgcctgtctaaacattaattaattcctcaacttttaaatggaatatgatgactatttccctttatatgtgtatcttagatgtaggcatggagctaaaatagaaactcaaaatgaagtaacagtaagggctggcagtggaatattattgatcccagaggaaaataaaaattttatttccaacgttgtgccaagatggtggcaagggtggggaaaccatgtgtcctagaagaagaaaacagaagaggttaagttacctctttattcttttgtttttcagattcaaaggttgtctttttaacaaaatgaataatgcaggtggtgattatggaaagatgttaaattttgatgatgttgaaatgtgagattggtatcctgtgtgtgaggagctcttgtctcctttttcaaaggcaaggttcctatgtgtgcactttcacagaccagccctgcccctgttgcctggaatctcccttctagcacaggctgctgctgaagaggtggttcagaccattttccaaggcaaatccaaagaaaataatggtttccattggttctccttattcttcagccttcccagcttcccccacccctactccagtcttcatgacatcactaattcatacatctattatgcaactcatgccaagaggctggttaaattggaaattgctctttgttaaataatactggtatagatggcatttccattttaatccaaagctcttgagattccaaaatccttcaaaactcaactaaatttcaaaaggtgtaaatcaagcactgcattttactgactctaaaggaaacgtttatgtgagagtagacctccctggagcttcttaaactagccaatgttaatcttggtgctgagacatattgatggtatgtcatatgtaataggttaccaaataataatgcatatactaaaattatgctaaagatttactaaaaatttaaattaaggcagatcaggcttatggctaaaataacatcatttccatgcacctgcattctgacatgctctctggagattctttgctatgggagtgtgccttgtgtataaatagcatttatgatgttggttgcactagaaaaaggaaagttatcaactttaagctccactgaattaacaaatacctgatctccatttttgtagaccatcaagaaatagcattgtgatcattgggcttctccctagcagttgatggtaaaaaaaaaatacatctaggagacctctcctctcctctcttctcctctcctctcccctcttctcctctcctctcccctccccctcccccttcccctcctcctcccctgcctgtcccctccttctcccctccccctcccctcccctccctcccttcccttctcccttcccttctctcttctcttccctctctcctcccctccccttccctctcctcccctctccgctccctcttctcttttctgagaccgggacttgctctgccacccaggctgcagtgcatgatcatggctgaatgtagccttaacttcccaggctcaagaaatcttcccacctcagcttcctgagtagctaggaccacaggtgaaaatgatcacacctggctatatttttttctatttttttttttttgtagagatgcagtctccccatgttgctcaggctggtctcgaactcctggctcaagcaatcttcctgccttggcctctcaaagtactgggatcacaggttcaagccactgtgcctggctgagatctctatctttaatattcctcttccctcctgcttaattgaatgaggaaggggcagtgtcatacaatggaaggagcatagtaactctaacattaataggttgtgtggccttgaacaattcactcaactgctctgaactttagtgtgtcatccataaaatggagctaacagtgactagtttgttttgagaatgagaaccaagatgcgtaaagttcctgacacaaagccaggtgcctagtggcctttagttcttatgacagctgcaggactacctttgtcactgtgcttttacgtctcctccagtgcctggtaagaagagtttatgtatatttcacctgtgtgagtacaaggcccaacttctaactgttaataagagacaactttgcctccctcacagctggtacttaaagcgtcaaagaatatctacactccagatacttgttaagataattcagtcagaatcgactgcaatctagcacctgccagaggcttgctgaaggcatctgttacttatttattgagcacatgattatataactcttgtttactgtacacccagcactgttctaggagtcttaagaatattaacttatttaattctcacaacaaacctgtgatataggtactatcatccccattttacagttgagagaactgaggcacagagagggtaagtaacttccccaagatgacagagctagtaagtggtagagcagcatttgaacctagatggtttggctccagagtttgggaccttcacaactatactatgtaagaaagactggctaatcgttatgttcaccagccattcttccagattcatccagttctttctctgagcttagtgaaattatcagaaaacaagagacccaaacatgtgacttcagcactcccttcccccttccaacagcttcatgaccatccttcagttcctgagtcacctttctagatggatattctgtgtcttcgacaaactcctggtaggaattgtcttccatgttatccaacagttctaacatgaaaacccatgtattaaagtatctaaacaaagtgtgtttctgcataggacctttccagctttatttgctatgaaatgaaaatgatgaagtctgttagttccctttctatgaatattttcattgctattactctggctaacttctgtgctcaggtgtagtctccagttctgcctagatagttgctgatatttactttctctacttcctttagggggcatcttttctgtttttatccctgatggttctgttttcttattgattaatctcatataatgcctctgaatctgttggatgcagggaaagtataaaccataatccaataagcagcttatgatgattttcttaccatgtaaaatgtttcaaggtgtgtggactaaagtagaaggagatgaaaaaaataatgataaattatatcatctattatggatagctaccatttgctcattgcttactttgtactggcactgtgctaagtgcattacctacattattgtttcttaatcctcatggacatggctaataaatgacagggctctaattcaaaaccaggtctttctgacatcaatgcctgtccttgtaaactacactgtatatgaatttggctcagacacatatctcacattttgccctagtgaaacaaagtgtattttctccttttgaccttgggtgaagagagttgaatacaagtctttccatttgtaacacactgtcatcagtagcacaaggcctccctggttttatttatttttcccttcatccctaattatatcttcaatggcctttccctagagatacccattacaatagcttttatatatatctttaaaaatgcatatacccttgtaagatatgtaacatgcttttcttgttatttatttaaaatttattttactggcagcatgctgtatatcttaatgcatttttttaccttttccattcaacactgtttataagatctttcatgttgctatgttttcatttagttggttttctgtaactgctgcatagcatttctctgtatgcatccaccacatctttgcatctgttcctctagtgctaaaactctgcttcaattccacaattaccaatagtgtggtgtgtggccctgagcaaaaattgcttggggatatattcccaaaagtggtgttcctgagttatagggcaaataatgcttaatcacaccaaatactttcagattgctttccagaagggctgtaccagttcagattaccaccagccatgcacaagaaaaatttctaaactgtctctattcttgacaatacttggcattatcacctttgtactcattgccatttgacacgtataaaattgtatttcataagtaaagttcttctgcaagtttggaaaaagttgatttggacttgaacatgccactaaggctgcttaaaatgtcttagatgggatgctgattgagtgaatgcagaggcagaggaggagcaggctctcatttgagccctccttgcaattggtttatgtgtctcttatgacaactaacattgttttgcaatatgcagtgattatttgtgtacttgtctgcagcgagcaccttttggattgtaaattgcatctttcttccttacctgtgtatgccctcaatgctttgcttgttgcaagactccagtaagtgttttctgaaataaattgtctgatctctcgaaggtcctgcctgacaataaggggccattggctatgaaagggtggtaggatctaggagtggaaagtcacagatgattattttctattctaatagggtgatcggtttatttttttcttttcttgactgttttcctccctactttaaccagaggtgcttgcattaggatagatgaactatatgaaactgctctggtaaaaccaaacttttgaacatactggatttttccccctaaattgacaactaaaaatcatgccatgctattgactcattgtcctcttcagtaatcttctggttgggattgggaagggaaatttccagaactacaaacacttctcttagggactcaggtcccaaccttgctgggcagagtgcatgatgtgtttcataatgcatgagtgtttatttaacaaacagcaacactttttaattaaactgttgttgaagatacagactgtataacctttctccaaggcctggatgctcactggcccttccaagatgctgacccctcgctagctgcaggcctctggggcagtacatgctgtgagagttattacaagccagctggattagagggccacctctcttgaatcattcagaagctgaagtgcaggctctgggatggagagtttctcaatatgccaaagctattggaatgcaggcaggtctggagacacttagctggaacctgggggaaaagagtgttcaagataacttcatagaggaaattccctaccgcttttggctttaaaggataatcattggttcttgctggtcttgtactactatttcctgagctactctgaaatagaattgcttttaggtttcaggtcttcatttatagagctatatccctaaaagattagatacgtctcagggatgtttttcaggatgctttttcgcatcatggtgattgtattagtcaggttagacttgattatgctgcagtaatacattacttcccaaattttagtgacttagaacagcatagctttacttcttattcatattacatgtttaacactgggtaacagtggggctatgcttatcttggacgttcagggacctatacgctcagaagcttggctgctttttgatgtgaccatctcgacatgagtctttagggttttctacagcagagaaagaacaagaaataaattgtctcttaaatgttcttaccattttcattggccaaagcaggtcacatgatcatgcttacctataactttgtagagaactgtaatttttctgtcttctcagagagaaaagaggactggaaatgacagagaatatgaataacatataccacagtttcattgggcatgagaaaatggtgatactttgatagatctcagaaaattacatacactcagcaccatatacatgcccttgaagagaagagaccatagactcttaaaaatgtaagtatctcagaggagattttggccagtgaatccaaattatacagcttggaagtctacaggtttatgccataggggacacagaggggaaaatgaggaactaagatgggaatcttgcccacacatctccttcaaacagggcagtataggaaagcatatacttccaaaatgatatgattttcagtcctactctacctcgaacactcttcctggaacatactccaatttgtcatcggctcctcttaaattcagcactcagtcatgaaaatgttctttcatacctggtctcatcagtgtagaggccagaagacctgttggttttccttgctttggatttgttattttggcaattaacgtttctgacaatcatactatacctttgactcattataagcctcatgtgggtttctctactccaaggaggcataggagtttaaaataggaaaacagtagtacgttgtgatggattgtatttttcaaagaaagtcacaataatatttcccatcccatgcactcttctgcaatgtatccttgacattctgtcatcaagattaagaggtagactctctctctaccctcttgaatgtggataggccctatgatggcttcgatcaataaaatatggtggtttaacgctgaggcaggtggggcacgatgtctcacgcctgtaatcccagcactttgggaggccgaggtgggtggatcatgaggtcaggagattgagaacatcctggccaacatgatgaaacccagtctttactaaaaatacaaaaattagtcaggtgtggtggcacacccctgtagtcccggctactcaggaggctgaggcagaggaatcgcttgaacccagaaggcggaggtttcagtgacccaagatcgcgccactgcactccagcctggtgacagagtgagacttatatctcaaaaaaaaaaaaaaaaaaaaaaaaagtgctgaggcagtgaggcagctctggaaatagcccttaactggcttggcagcttctgttttctgactcttagaagccagttgccatgtaagtaatgtgactaccaaaaaatgaccacactgtgagaagcccaagtgtggtggagaggccttggggaaagagataacccatgaggcaagaaagaggcccaggaggtcccaggcatgggaatgaagaaaccagcttgcacatcctgcccaggctacaatggactgtaaccacatgagaggttccaagattaaaccactcaattgaccccagccaactcatagcaccatgagaaataacattgttttaagccactatattttggaatagttttcttaaaaatataaagtgatagataaccataatagaaatttgtgctagaggaaaatccttaagactcttgaaagccattttgtctaacaaagagtgtaaataagatatggccttaacgatcctaagtaatttttctagttaagaaataactgtaatcagttgagtgtttttccactttatgtgacttcagttgaggctgcaatcatttggtgtctggatgagatgggacatccaaggtacctcattcacataaatagctggcagttgatgagataactcagccagagagaacctatgcatgatctctccatgtgaccaaggcttctcacaggatggcaactgggttccaagaagggctatctgaagaaaaactattcttagaaaaccaggcagaaaaaataaaatttcttatgacctagcttcaggagtcattcattgtcacttttgctatattttgttgatcaaaagcaaggcaaagggctctccaatattcatcgattaggggactacacaaagggaaatattaggagtcatggtttattggggggctatctttggagacaagctaccttgatggatagagaaatgataacggaaataggtttgatgaaaaacgtggttaatctgaattgcagtaggtctgatggttggttggcaagttgtccttattctggtgtatgggtgaagggaataagcagtgagttagctcttacctagatccatcccctagaaagtaactgtgtccagttatcaatgggcagggcttgctgggcgttaagcacaggtaacctctagtcttttactatgtttctgcgacagtggcataaaacagctttttaatgagacctactgagatgcactgacagatctcttcctttccttttgtgtctagcccatccaccttcatgtaaatgatttatcaagaaataagacctaggattttgagatgggtacataagagcaaaagagaactaggatgagatcattctcttttgcctgcccttcagcattctcaatgcaagcaggttggggttctaaaggaagagcagggatgactggaaccctatagcagtgagtctgaggaatgggatcatgggggacccagaaggaggaagcagaactggaagatgtttccattctgtgaaagtggcttttggctttgaggcagcaacagtaatatttcatgtcttccgtggtgtctcctacctttaaatgtcagtctctgcagctgccttatctcctgtagcacatttcaattaggtattccaaattatactcttttcttccaggacaaatatgccagaggtgatatttactgttacagcagcatttaaaatacttagggggaaaaaatcctagtgaatagcaatttctcccttataataataataaagcacaataataatggagagaggaggtgaattctggctttgatgccaataactggctgacttaaagtgaacatcttttgtctccgccctcttttgtccccctcctcctattcccgcctcagtgtgaaggttatagtgtttggctctgtcaagagcaacctcacacatcttcttcactggaggctcacaaatgctcctcagaatgtctatttaactatctctaggtaggactgggctctgactgggctcctacttcacccattacctgtttcttcctttgtcctgagaatgtttgcatgaagccagaatctctgtttgtttagaaatttaccaggcaccactgcttactcctcacctatgggacattgtaggtcctgatggaacaccccggcctcctctctaggaggtatatgggttagaaacttatgtattgtacctttccttcttggaatcaagtccttggcctggtaatgaaggtccttcgatctggtctgcattttccagctccatctcctactaatctttatatccttatctactgtttccctaggctgttgtcttcacggccgccatggtaggttttgcctatcatcccaaaccttgtgcaggcctaccacagtacttgacatatggtgggggtctcagtcagtattctcccctatatttagaacccttccactagatcttgtcttcatatttttgattcctgctcagggatcagattatgttccatgtcctccactgagccttttctgacctcctcagcgcactcagtgccgttccctctctgaatttctaaagtgctcagcagcagcagcactcatttggcacttggtatatactatcttatgctattttgtatgaccatatgttgtctatacaactacattataagcacctgatagggataactgtgccctgtgtgtttttcctatccctttgattctaagatagttccttgaacattgaagatgctcagttaatattcatttattaagtagatagatcaaggagtaaatgaaagcaaggatcctaagaagcctgccttttggtgccaatctattcaatttggaattcacaaacttacctaaaacaaggcctttcaatttcctgtttcccctgtaaacagagctctaccaccaggatttctcagaagctctttctccacactgaaccctaaaactgaaggttcaggtagagagcttttccagtgtgagagaatttttaaagcatctggggtttggcacatccagtgctttgaaaatcaaggtgtcttgatcattgggtgaaggggattagaacagcaggctgtgttttcaagttcaagtccataagcagacaggaatagaatcccacaagagtttgttctgtctctgccatttactagttaatctctctatgcctcaatttccccatttgtaaaatggatttaataatggctgtctaccttataaggttgctatgaggtgccagtgtgataataaacgtaaaagtactttgaatattgcaaaacactgtatgaatgtcaggaattaggcaggcaacaactatttcttgggggtttgttctgcatgtagccctgcactatgtgtagatagaggcctctgtacattacagaagactggcagaggcattggggattcatcatggctggaattctggttctcagatagatgaaagctggaaaaagtattatagcctagcaatcacatctgaaaggttggcagcaacaattgagtcagagaagacgggaggtgaagtattggcaaaaatttgaccctggtcattctttgaacacttcagatttccacagattctatccctttaacatttctgaacgttatgattttgcttcctccccacactggcagctctgcctcaatgaaaccgtgttgcttttttggttgatcaattgtgcccaacttcctgatcatacttgtcctgagagcctgtgttaagctcatgccggctctcccaccccgcccccaacgccggccaaaaaaaagactctctaaaaacaggtgcccccgatgatctcacactgctgctggcattggcagcagcccagaagggccaaatggtgacttcaggtccagggaggctactgtcctcagctctgttttcatgtaaatgtcgctcctgctgaaaggaagtggatgcaaaaaaatatctgctatggaagcagaactaccccagactaaaatgttggtttttttttttttctctcccccttttcttttccttcaagttttccatgtggcatcagcagctgagtaagggaaagctaagaggtttaagtgtgctggggctgggtgggctagattaataacccaaagccttccaagctggcggtgctgggtgagacaggccaaccagaaagcgttaggttatggggagccctggccacagagccagaccctaccagggtggaaggtgaaggagcagcgagctctgcgtgcttgccccgagcccccaccttccttccttcctcctccctctggtttctttcctcccattttatcgagtccctctgagatggctgcgcaccagtggctccagcctctgaccgttgctgccctctgctgggaagaaagctttactcggtgtggaaagtgctaagctctaccagggaccagcttaatgcagaccaagtccacagtctgtggctagtgtgtgatttggcccagaggaaggaaggacaattcagaaaacccttgcaccacagtgtttccctagtggtttcaggtgggggcaggactttggaatctattagggaaggattgcttgaatcctcagagttctctgttcaagaggaacatccctgggagaggagcctcctggctcctctttacctgggtcagacatgatgtatggagactccaccatggatgacccttaaatatgatggatggctttagttacaggacacaattctttctcaagggaaggtgaccaaaagaagttgggtcttgaaggggctgcaggatgggcctggaagtctcttggctctaaaggaaccatcatagaatggggattctgagcaaccaggaagcagcagaaaaatatgcaaagccagatgggagtggggaatattgcccattaatgggcaagagtacatagaaaggtagataataaactggcttcaccacttctcaactttccccagagctggctgtgccagtaaactgtgctcagctggctttggatgagagaaggacaagagggtgcctatctccagcatggctgtggggtcgccctgctccatctctggatcttcagcctagagtgcagcccagccaaacaagagcgatgacctcactgaccacatgtaattctgcttgagggatttattttcttccatgagctcctgccaagactcttggttaaagctaatggggctcccccagccagtgagtgtctcctagttatatgtgtaaacaacgccaggcaggaaataggtttcctgttcttaatgggcttgttaaacctcttatcgagtggggtttaaatggctttattatgaataataataatagtaaataaacattattattattagtagtagaaaaattatgatgtcagccctgactaccccttctcattttaatcttgccaacgtggaggtctttggcctctaagtgcacaggaatatggtgagtgacactgggacttataactggagaagatggcagaattcatcttcgttgcctgcagctttccaatcctgagcccttttccactttcatcgtgtttccatctccatcattcctttcattcagggttttcatgatcttattctatcagagaagatagaactacacatccctctccttctcagttttatttagcattgaaagccatggacagaggttctgaggttaaattgaggtatcgggtagaggggattttggagagagcagtggatgctggtaggggagctcagttggaagtggggctcatgttctgatcttcagtgccgaatgtctgtgtccctccctcagatttacatgttgaaacgtaatcaccaatgtgatggtattaggaggggggccttttgggaggttagtaagtcatgagtgctttgggattagtgctcttataaaataggcccaagggagcttgttcaccccttccaccatggaaagacagaagaagaactagaagccaccatctatgaaccaggaggtagccctcacctgatgccaaatcttccagcaccttaatcttggacttccaagcccccagaattgtcagatacaaatttttgttgtttataagctacccagtttatggcattttgttgtagccacctgaacagattgagatatccagtttatagctggaactggaggtataccaggtatcccagactttggtaatttatgtatcaggttcactattttcaccataactccctacaacagtattgattttctttacaccgattatcttgtttgacttaagtagatttggcatcatcttacaagcaatatgtctttgaaatcctgggttcaatgtgttagccaggttttttactgactgcatattgaaatgaatatctaagagctaaatattttttcctaaagttcatcatgtggcaaatgtgtcacaccctccagggaaaacataccacaacatctggagacactgctatagggtagtggttcttaaactttagtgggcatgagaaacactggcagagcttctaccagaaacactggtagatagctgtgctcttccccagagaatctgattcagcaggtctgtggtgggaaatatgactttgcaggttttttttttttttttttttttttgagacagggtctcattctgtcacccaggctggagtgcagtggcgcggtcttggctcactgccagctctgcctcccaggttcacaccattcttctgcctcagcctcctgagtagctgggactacaggcgccagccaccacgcctggctaattttttgtatttttagtagagatggggtttcaccgtgttagccaggatggtctcgatctcctgatctcaggtgatcttcccgcctcggcctcccaaagtgctgggattgcaggcatgagccactgtgcccggccttttctttattttttgagacagagtctcattctgtcacccaggctggagtgcagcagcgtggtctcggctcactgcaagctccgcctcccgggttcacgccattctcctgcctcagccttctgagtagctgggactacaggtgcccactaccacgcccagctaattttttgtatttttagtagagacggggtttcaccatgttagcaagggtggtctcaatctcctgacctcgtgatccacccatctcggcctcccaaagtgctgggattacaggggtgagccaccgcgtccggccgccttttatttttttttgagatggagtctccctctgtcacccaggctggagtgcagtggcacaatctcagctcactgcaacctccaccttctgggttcaagcaattctgcttcagccttcaagtagctgagactacaggcacccgcccccacacccagctaatttttgtatttttagtagagatggggtttgaccatgctggccaggctggtctcaaactcctgatctcaagtgatctacccgcctcggcctcccaaagtgtccagaactcctagactcaagcgatcctcctgcctcagcctcctgagtagctgcgactacgggcttgcacccggaaactgcagttctaacagttgctcaagagatgttgatatccaggggccacactggcagtggcactggcctggagaataagggcctgttctccatttccacatgtgaaaatttcctcatttgaaaatggggataatgtgtgctgtataaaatgaaataattttttcttggtgccaatctgtctatgcaatggaatgtttgtgtctccccaaaattcacatgtggaagccctaactgccaatgtgatattaggagatagagcctttgggaggtaattagatcataagggtgaggtccttagaatgaaatccatgcccttagaaaaaggaccccagagagttccctcaccctctttctgccatgtcaggatacaatgagaagtaagaagtctgcagtacagaagagggctatcaccagaagctgaccatgctggcaccataatcttagacttccagaatgcagtactgtgagaaataaatttctattgtttataagccacccagtctatggtacttagttatagaagcccagatggagtaagccaacctgtttggagtgtttttgagctgtcatgcttttcaggttcagcttaaagctcagatgggaaatacaggaacttctgcaggttaattctggttctaagttcaagtcctaagaataagcccattatgcaattctgggtggccaagcagttctccagcagcccccaggaagtattctatctcacagaatcctggcaaaaggagacagtcttctcagtctggtcaagggctatgttgagtgtgagggaacagaggtgaatgtcccttgctgtgctcaccatgttctgagagacaggcagacaaagcgtaatttacaatttgattaagtgattgcattggtgactttttaaagccgcccagtagttgagccccctttctgcatttggaagtttacccgtatgagtctaaaagggagacagggccctcattccatgactgaggcccccaaagtctagtctcactttcctcagtctcagtgagccacagaagccaggctcagtgtctgggaggagaaatcctctctgatggtggcaggggtggggacagcagccccgctgggccctgtggggacagtcccagcagcagacagtcccagttgggcttatcctgtgatgttggcctcactgtcttggcagcctctggcatttctgttctctgttcatcttccacatatggttctcaggttcactcatcaaatcccttcccatttcacccaatcaataatgctgaactaataatggtttttagagcagggaagtggcacaatcacaacttattttaaagataactgaccactctctggagcatggattggaggatgagtgactcaaggtggggtgactagtgaggaggtgatgaaggagatgagaggaaagaggaagaaacactcacagagtaaacctggccatatctaatgactggaagcctgagtttctcttcaaactcagaagagaaaaatgaatttatggttttgggcgcagctttagttttgtctttggggatgagtatgtattttgttgggaaggtggatgccctgaagcagggttgggaaacaagattagaggtttttgaataagactgtgtttgaatacagcttggctatggtcttctccatttcaagtctgttcaacttaacaaatattgagcccttactaggtgtcagacattcttgggtatttagaatacagtatattttgattttggtgttgaaaaaggtgtggaggtatgcagggaaaaatctcacatgcttttacctacacacacacacattcacgcaacacaaagtgcacgcacatattggtcttgaaattccccaaggaccaaaatggacccatgtgatgagtctgtgttataacagggaatctaccgtaggttcttggctaccttttgtgaaccttctgtcttctttcctctcacttacaagtaatcccctgagtttttacctcctgaaccctgtgatttcaagggttcacaactaaatgcttcttatgctgagcaaatgtatacactgctaaaaccatatactcactccttgtggtgtgtttgttaggaagctgccacttctgtcttctccattctttggaaaaggctgtgagtaaacacagagcactggctatttacatacctagctcctgcttgctttttcaaagctctttgttcaagtgtcagtgctggtttgtaaaacatgaacagagttggggtaaaaaaagtaattacagttcaaatctggtgtttctactgacatgatactgagctgcctgactgctcttctttcttatcccttctctagttctgtcttttcagttgcaagttcactctgtctctgtctcccctctctctcccttgctctcactctcattctcttgcttgctcttctgtgtgtcagaaagctacacacatgaaaggtagctggcctcatagccactgggtagcccatccttgagagcctggccaccttcagtgtgtcgagatgccagggccctctatggctttttgcacagggaagttctagtgttttcagtttccagagcccacaatgagctgtcctccaaatccagatctaaaaccaaaccttctcttggatcagaccaatccagaagcactctatagtttcaggggtgtccaatcttttgacttccctgggccacagtggaagaagaagaattgtcttaggccacacatataatacactaacactgagatatagagtaagctcagttgttgacatagcaagtttgaaattacagcagaacttccagaaaacatcacaccagagttttctatccttccaactatattttacattttttgctttcagaggctatgcttcttcttctttgttcttctcttaattcagcccatgagcacatggtagattatgaatggatgctttaggaaccatgtagatggaggtttgtgaaaatttccacggaacatggcagttgagaattggtgactgatatggtctagctctgtgtccctacccaaatctcaccttgaattgtaataatccccatgtatcaagggtgagactaggtggagacaattaaaaaatgggattggtttctgccattctgttctcgtgatagtgagtgagttctcacaagatccgatggtataagggggtataagaggctaccccttttgcttggcactcattctctatcctactgccccgtgaagagatgccttctgccatgattgtaagtttcctgaggtctcaccagccatgcagaactgtgagccagttgaaccacttttctttataaattacccagtctcagttacttcctcatagcagcatgagaacagactcatgctggtaccacagagagtagagttctgctataaagatacccaaaaatgtgaaagtgactttggaactaggtaacaggcagaggttggaacatgttggagagctcagaagaaagaagacaggaagatgtgggaaagtttggaacttcctagagtcttgttgaatggctttgaccagaatgctaatagtgatataaacaatgaagtcctcagatggggatgaggaacttggtgggaactggaataaaagtaattcttgctatactttagcaaacagactaaatttgcatttcacccctgccctagacatctatggaactttgaacttgagagagatgatttaaggtatctggtggaagaaatttctaagcagcaaatcattcaagaggtgacttgggtgttcttaaaagcattcagttatatgtattcacaaagatatggtttggaattggaacttatatttaaaaggtaagcagagcataaaagtttgggaaatttgcagcctgacgatgcgatagaaaagaaaaacccattttctgaggaaaagttcaagtcagctgaagaaatttgcataagtaatgaggagccaaatgttaatcaccaagacagtggggaaaacgtatccaagatattcagagatcttcatggcagtccctcccattacaggactagaggccaaggaggaaaaaatggtttcatggattgggcccagggccttgctgctttgtgcagtctcagaacttggtgctctgcatcccagctgtggctaaaaggggccaatgtagagctcaggccattgcttcagagggtacaagccccaagccttggcagcttacatgtggtgttgggcctgtgggtgcacagaagtcaagaatttaggtttggtaacctccacctagattttagcagatgtatgggaatgcctggatatccaggcagaagtttgctgcaggggcgaagcccctatggcgaacctctgctagggcagtgcagaagggaaatgtggggtctgagctcccacacagagtccccactggggcactgcctagtgaagctgtgagtagaggactagcatcctccagacttcagaatggtagattctctaataggttacaccatacacttggaaaagctgcagggactcaatgccagccaatgaaagcagccgaaagaggggctgtatcctgcaaagccacaggggtggagctgcccaaggctatgtgagcccacctcttgcatcagcatgccctggatgttagacacagagtcaaaggagataattttggagctttaagatttaactgccccgctggattttggacttgcatgggacctgtagccccttcgttttggccagtttctcccatgtggaataggtgtattcacccaatgcctgtaaccccattgtatctaagaagtaactaacatgctttttattttacaggctcataggtggaagggatttgccttgtgtcagatgaaactttggacttcaaattttgagttaatgctggaatgagttaagactttggaggactgtgggaagggcatgactgttttttgaaatgtgaggattaagcataaaataatggcaaaccgcacaagaattattacaattcaaggtgagatttgggaggagccagggacagaatgatatggtttgcctctggggccccacccaaatctcaccttgaattataataattcccacatgtcaagggtgggaccaggtggagacaattgaatcatgagggtggtttctgccatgctgttttcatgatagtgagtgagttctcatgatatctgatggttttataaggggcttccctgtttgcttggcactcattctgtcccctgccgccctgtgaggaggtgacttttgccatgattgtaagtttcctgaggccttctcagccatgtggaactgtgagtcaattaaacctcttttctttgtacatttataaattacctagtctcaggtatttcctcatagtagcgcaagcacagactaatacaatggccaagaagtgatcataggatggtaatataataaacacatggaggggaaagtgagtgtagttgcaggttttcaggagaaaatctgaaaggggtgaccaaaaatgagtacctgaatgatgcagctttttgaaaaagtctatttgtaggtcattaacaaattgagattcaggaaatcattgtatggtttaaataggataaaatttttcactagaatgcttgatctctggggattcccagaagcccattcatgaaagtggttcattcatgcaacaaatattttaacaaatgccaagtatgttgtagaattattttaggtgctaggaaaacagcagtggataaaacaaaaattccttagagtttatattctaatggcgagtcataagtaatctacaaaataaataaatatacagtattctagatgatggtaagtgttttaaaggaaaaatgaaacaacaaatagtgatagtacaagcgggggtggtggtgataatttcaagtttaggtagggtaaagaagaagacatggatagacaggaagcccagatatagcatagtattccagggaccaaagcaagatgttcaggaaactagaggcctcaaattctcctactgcaatctgactttgtaccccaattaacagtgacagcatactgctttaaaataggaaataaagtggaaggaaagcaaatgcttgatagttgacctgacattcactgttgcaagattgggaacgtacaataaatgtcactgatggagaaatattcatgaagtaaaaatgtcagttttcaatttggcatgaggatggtttgacatgtattagtcatgcacagaatattatcataattaatgcattaataatacagctgtcctttttctcccaatcataagttaaaagggaggaaatagaggcaagtgaaagagcagctctcatcctgatcagaccttttctcttggcatttgtctcttcctctgcccagccatttctgtggcattggcttctgatcagtatcagtcttgatttatccatctcagttcttccttcacctttcatgaacaacaccagtggttttgtctgctgagggctttttccttaattttcagccatactttaaaaaatattttaaaagagagagatatatatagtaaaaatgagacataagcaaaatcaagaatataaaaatctcccataagctcactacccagagaaaactactattactattttggtgtttgtactgatctcggatagctggcgctgggatgactcaggggatttgattcttctccactgtttctcattctccagcaggctggccctagcctattctcatgtcattggcagaggcacgggcaagcttattctcacacctgctttttaagtctctatttgtgtcacattcactaacatcacaaagcaaatcatgtgattaagcccagtgtcaaggggcggaacattctgtcctacccatagttggaaggtactgcagggttatgtggcaaagggaagggtgaaaacttggggcaaaatttgcgacttcctatactgggtcaaaagacacccttgtttcaaggcttatgatagatgtttccaaattgctttctagaagggctgaaccaaccccactaatggtataagacttcctggctttccagttctctttagtcttgctgattctgggaatgatttatgaccttctgtctgggctgttttgatttgtatctccacctgtcttttaaggctgcacagtttttctttgtggtaattctttacttgcagaatacccccaaagctccctaagactctggtctacttaccttcttcatcctgatttcttctgcctgctttatctaacacttgtgctgaccaactcccagctatctgaatattcagtaatccatgtaggcctactccccaagtgttctaagttggtaggagttactacacatcttttaactttgctgcctacaccagcagtaatgtaattgttggtcctcattattcccagaatattggaatttttagggtcagaaaagagctcagaatccaatctcatttttatacaatattattccaaagatgtatgggtatttgtgtagatgaagataagggtatagatagaaatttgcatagaaaaaaggttgaaaggcattgccattgttaatatgctagtatacatctgtatatgggaattataggtgaattttttttttgcgatggagttttgctcttgttgcccaggttggagtgcaatggcacgatccctgctcactacaaccgccacctcccaggttcaagcgatcctcctgcctcagcctcccaaatagctgggattacaggcttgtagtaccacgcccagctaattttgtatttttagtagagatggggtttctccatgttggtcaggctggtctcgaactcctgacctcaggtgatccacccgcctcggcctcccataggtgaattttaaaaaatctttaatgttgcgtacagaaactgagggtcacagaagttaaataactcacctcatatcctaaagattaataatagtgaaactgactaatgcccagttctgctgattcctggtttaatgctctcttgagataataccacagtatgatctctgaggcctagctgtcttttgtttgattgtttgtatccaagctgtattggcagtttcttttggttttataagagtgctctgctgattgtgggttcacagggaaataaagaatgttttttaaatgattgagtcatctaagtcagctatgtaaatgtatatatatatatacacacatatatgtaatatctgtatgcataaattaccatgacttcaaaatttgacaaatggttcaggtaaatagtggattttatcttttaaatcacattaaggctcccaagtggatgcatcctgagttctggacacataatttatcataggcatcacatggattttatgtaattatattaattatttagtacatacaaaggtaagctctgcagaattagaatagaatcggataagtttttagggagatctaaattggtaagattgatcaaatttcttgctatgagtaattgaaggtgggtcactgtgatggagtgttcttcactggagctaagcttcactagagctattcggagtaattggggactggttaggagaccaatgcatcaacatctgtctataggaagtatggattcatctgctttgaaatgagtctttagtttgtttcctgcttgttctttatttctttttcacctgaatgctctttcaagaatattcaaaaacacaaaaacaaaaacttttcccctggagagtggggattagctcaagaatcaccatgatgatgagaagcagaaaacctggtttggagagtcctggacctggagaacaccaaaaagatgttagcatcttgagtatattgttctgatctaaagtcagatgttaaattttttactcacttagggctgtctgtgagactttgcggatcacagagagaatagacactgagaaatgaacgtgaactagtgggtacaaaggaaagggcacccgaggctgcttcatcaagctagaggagtgggaatctcagcccctgagaatgagcatctacaggctcttttttcctagtgcttctgtggtgtttgtttttcattgtgccacttggtttgcagaaaagaaaaaagaaaaaaaaaaaggctgccctggaagctgaggttttacaagtgctgagagaactgtcaacctattatagaattcagacagagactttcagctagagagggtttaggtattctgtgcctggctggactctagggactcacgcttgatcatactaggattcaagaacaacgcagttgtcactgttagcccatgatcccacacgtacccagacacattctctcacggcaagtacatctgcacctggatgccttctactagtatgacatacttaaaagtatcttggatatgccttaaagatcattgttggctgcttcttgatggcaaagtgctcagttagagccagtttaaacacatgtcaccagaactgaataaatagattttgataaaactgattcagtgaatatctcccttagggcgaagctcagccttctccacttcactggtgctatgaaaatcactagtcctcatttccaagctgtgtctgaattcagatttaactgctaaccattgtttaagaccgcagtgagatccacagggtagtctcaaggtgtgattaagacacttgggagtggtggtggttaaaaaaaaaaaaaaaatagagccaaagtgtaaggaggcaagctggaggcacgtggttatatgaggagaaaaattgcagtgaggccttctcatcaccctcttcagggtcaatgtgatggcttcgtagaatcaagtgcaagtctgtggctccattatctcaactggctagaagagagtgctactaaggcagaggtgggagcatgaaagttcacctaatagcttagttttgttaagtctcattgccacagtctgcaccttatcctgatgttctcactggaaaataactagcctagttcctgagaaggaattgtgaacagggcattgcctgtttgtcaaaaagttatttaaagtcactccagctcctcacttaacctctctatgcctgtttcctcttctcgaaaattacagtaataattattacagtaataatagaatagtacctatctcataggctttttgggaggattaaatgagttaataatctgaagatattgaaaaccacacctgtcatgtggtaagtggtcttcaaatgctaattgtttttatctttattaactgccatacccatgtttgattggcagctacatcttgtatgagtctttaatatttcatctgtaatttctgggttgctcctgccacagagaaggagcaagggagccattggtactactgatgaatattaggaggtggagacaccttgacaactgctgaaatgtactcatgcctgcctgcttgccctaactgcacttagtggcctggatttaggagctgccaatctcattacacaccagttttcatgactatcctcaacttactcctttcttaccactgctcagcacttatcctaagttgacaccaggctcattggtaatcatggactcacttctcccatctgaagtattcttgagttggctcccaagaagcattctctcttcatctccaactcaagggtgagctccttttcgtggaggaactaccctgtgtgtcctttccctccctctctccatcaccatcagcattcaattcagtattctgcacacacaggagtttagtctcaatttaaggtaggtcaggtttcattcacccttgagctccccttagcacccactacagactcattggagaggtgactattagaggtgcttgtggaaatgaatctcaaatagtgtccttctgcctgagtccttcattgaatccctcacttgtatacatgattcatactctggtagctttgatcattgtacaaaagaaaagtagtaactcttctttggggccaggccaggactgtggagcccaaagggcttttgtcatccctcctggaatggagttacctgatctggatattggaatgtttacatccttagtccttgaaaaggggaaaagttatgcttatcctcaattgtttaccatgacccttcctgtcacatcatactgttctacgaacacaagaatcatggctaacatttgtaaaccatctactatatgccaggtactctataatggaaggtattttacataaactttttatttaagtctgtgaattaggtataattcaatgcatttttaaagttaaagaaactgaggcttagagagctacttgaccaaaatcacaaggctactaattagtacaagccatttgatctaatactaacactaacttgttgtaactagcttgtcttgctcttaacttcttatctcagtccatttgtgctgctggaacaaaataccacagactgaataatttataaataatggaaacttatttctcacagtcctggagtctgggaagtccaagatccaggtgctggcacgtttcatgtctgctgagggctgctctctgcttccgggacgacagcttgttgctacttcctcctaaggggaggcatactgtgtcctcacatagctgaccttttatagaggttgctaatgccactcacgagggttctgccctcatggtttaactacttccccaaagccccacctcttaatacttatcacattggtgattaagtttcaacacatggattttaggcgacaatcagaccatagcatttcttctctacaggtttataaaaatacttttttgtcttgtatatattttcattatttttcctgcttgagtatacattttcatctctgaagacagggacacatttatggacattccttcctctgctctctaagactgcagtgattttatgtgcacatacatacattgaaaatgtatagttggctagatcctggaccccatataatagcttactggttactatacagcaggaggaactgaagagaaagaaagaatcaacagcaaaggtgcccatacctgttgcaatttgtattttgctcatgtcctagttcagcccatccaagggccaaccctgatagggcttaaatgttctcagcattagcttctcttcattaatatctgtttgtacctttctttgatgccgtatctatcctccataaggtacttattaattttcgcatcatcctgcttcatgttgttctgtccattatctgtaaggctcaaatatagaaagaaagtgcatccatatcagtgagagacagttcagagtgattgtgggtgagctcatggtttcctgcagctgcaggactagagagagctacttcatgatgttggagatctggagtttaggaagcctaggaggtattcaagcagcagtcagtcagcttgccttgcatttttaaaagcatgtctgcaattttatggtgtgttctcctctcccaccactgctgttttcctccattactgcttaggttgctaccctgagagagaagcagccatgctgattctttatcttttaccaaaagggcagcagcagcatctctttctaaattgttattatgaagagaatagctactgtggtttgaatatccccttcaaaactcatgtaaaatgtaattgccattgtgatggtattaagagatgggacccttaagaggtgattaggccacaagagctccattttcataaataaattaatatcattatttcaagagtgggttgttataaaaacaaacttgcccccgtctgtgtttcagtctcaccctcacttgcccttctgcctctgtcatgagatgacatagcatgaaggcccttgtaaaatgtcagcaccttgatattgaacttcccagcatctggaactatgagaaatcaatttgttttcgttgtaaattatccagcctatggtattccactatacaataacaaaatggactaagacaataacccatccacacgatacaatgcatgatgtagaaagtaaatacattgaaataaatacaatgcaaagaaggtctttgttatccaagacgctctgtcctgttctgcagagttaacaaccatcatatctctcatatgatacttcttactagaaaattcccaggcgtacacaggtgtgtgtgtttcacccctttttgcctttataaatggaattggctggaatgctgctgagatcccagctgctgaccctcctgtcaggtgccctgtggttctcattagggcctctgggatactaacattcacacaggcaatgtactttcccttcctgacgcctctggggcccacccgggaccgtcaaacagaccctgcaaagcttaggagatcaattccaacagaagtccagagccatggtgctcttggaaaaatcacaaaccaaaatatagaagtaagactttttcttcctaaattttaggaagaataagaaaatttagtggacttatttgtccactaaaatattaaatgtgaggagaggggaaggcaaaactatggatgattattttcttttttttatatttctgtaactttaaataaggatctatatttataatgaaaacatttatttataatgaaaaaaacctcaatctatcaaaaaaaaaacaaaccccaaaaagtattgccagttcccattgaagtggaatcttaggctctcaacttattaaatgtactaataaagtttttattggtaagcagatacaaaatcgctttataagaatccccagggaattactaagcattgttttgtaatagtaaaattggatcctaatgagcatagtggtagaagtcactgtctgcagaaattagaaatgaaatagagttgattctgggtatgtctgcattgaattagtagagtgtcttggaaagcttgctggactatgatgtgcacggtgggtaacaggatctcccagggtgttcaaagcagcatgattccatccccagcttgccctgcttgttgaaaatcactctctaggacagtattttctgtgctgtgggttttagcctctgtgggcctggaatattactgctggtgactgtggacccttccaaacataacatactgtctgccacaaataacacagttactatttattgagtgtttcttatgtgccagccaccgttctaagaactttcatgcatttacttatccagttcagtaatccggtaaagctaatagcatgttgattaccttatgattgaggaaactgaaacacaaagggctgaagaagattgtctagagtctctcttctattaggaggtggggtcatggttaaaaagagccacctcctaatcactaaaccatgtcacctctcagattagtggatgacatctcctgtatgtggaccatctgtctgtatgtgtgcctgcgattgttttccagatatttgtagagattgttgagattgaacaagcagaaattcatataagagccatactgagtttacatcagcttttggtcatcagtattttctgtcagtggatctaaaatgcgactcttttcttgtgatgatcctccaagtatttggctgttctaaaaaggctatggtcccaaaggctgaacgtcattgttctagaggaaggattttcctgtgatgatcctccaagtatttggctgttctaaaaaggctatggtcccaaaggctgaacatcattgtcctacaggaaggatttggtcatcaaacacacaccatccctagttctttcccaaacagctctcctccagctctgtcatgtctccaccaggatcaaatggcatggtctctcattctttgtgatgtagacagacactggtgagataaattgataagcactgctttgggagtcatctgttgaaatacaaaaataactttgtaacataacctccttctccttagaaacaattattggaggaatttatgaattttacatcttgtgtgagaggctgacagaacctccaatcagaaaggccgtgttctagcgtcaaatcatccatcatttgtgtaactttcagcaagtcactctacctctgtacctctgcattttcaatttgcaagagtggttgcagagttaaactagatgatggtattatatacttgtttttggtttgtctatttctttattttaaagaatgttcaatatctactccataacaggcatagcattagcttcaggatttccagcagtgagccaaacatacagagccctagttctcatggggttgatttcctatttgaggaaaagagacaaaaaggaaatatacaaatacatacattattaggtggtgataaatgctatggagaaaaataagaagaaataggggagataaggggggggggtgattaatttatgtagacattcaggaaaggcctcaatgttgaagtagtattcaagctcatacctgagaaaattagagcctgagccaaaaggctatcagggcagatggtcacaggcagccagtgcaaaggacctgaggtgggaatgtgcttggtgagttggaggcacaggaaggggcctgtgtggctagtacagagggaggaaggctgagagtagagatgatatctgagcttccaaggggccagagaatggaaggtttgggagtgagacggagccatggacaaattgaagcagagtgaatatgctctgatttatactgttaaaagttgatcactcctgcggagtgtggatagaaatttagggacaagggagggtggagggagactagttaggagactattgtcataatccaggtggcttggccatgaagttagtggcggaagaggtctcattctgggcatatcttgaagctatgcttgatggggttgttggtaattgggtctggggtatgagaggaagggaggggccagggtgacaccaagcatgtgattaaggcctgagcacctggactgatgagctgttgtttgctaagatgggtaaggctgagagagatgcagttttaggggaagggttggatattaggggttcagctttggacttgcatttccgtgtctaggagacactctagtagagatatgaaattggtgatggtatgagtaaggttggagtttagacaaaaatctaggctagaattatggatttgagaatcattagcatacacatgctatttagaggcttgagactggatggaagcgtagataaattgagtgtagctagtgggggccaaagcattgattctcttcccaaatgctagggagccctattacttggagcaggaattgtcagacagtgaccagattttcatgtctttttgtaaataaagtttaattggaaccattcatctgcatttctttatctattgtctgtggctgttgttgagctacaacaggagagctgagtagttgtgacaaagactcatggcctgccaaaggccaacaaaatctaccatctggctgtttagagacagggtttttgtttttgtttttgttttttttgacccttgatttagagatcaaggagataagaggcatccagcaaaggaagctgagaaggaatagccagagaggaaagaagagtgccaagagttctgcattgaaggaaagatggtgccagggtttgaacacacagcattagaatacgtgaggctgggcaagttacttccccataaggacggtagtagcacaggattggcataaaaattaaagtagatgatgcatgcaaaacacttacagctgtgcctggtatccagtaagtattcagtaaatgctcttacagcatctacttctatttgcttagtctgtagtcctcagccaaggctctgtactggagacaaatcaggatgtttgaggattagccccaccgcctgatcaggtaagcctatgatctatgctcagggacctgaggaagaaggaggaaggtgagccatgtcccccgaccctgaccgtgtacaccctgtcccccaagaggaccttgaagaagagcccttcagcatctgctttttacttcctatctttgacaaacagtctttatggaaagcttttgagcaaacggcaaatccatctttatgagattactaatgtcaacacattttgtgtatcaggattttataggctcctgcgggcctgtgcctgtgacaacattggctggcagtgctcgcctgaggaattatgcaacatgcccctgatgctggagaaggatcttgatatcccactgaggcccgggacattttctcccagaaacagtcttgaatgagaagcttgaagaggggagttagatttactggggcttctctaaagattctgtgtccaaagcttgaatagggaaagaaatactttgcatccatgtagcaggttctgcattcagcataccaggtttgctcctagttaaagagtcatggagcccatgggagtgtttgttctttgggaatgtcataaaagagaatttggcctctcccacttacatgttcttgcatttcttattggtccttctcttgcaattattgctactttccctggtcaacctctagagcagtggctttccaagtgccttctgtggacaggtagtatcagcatcatctagaaacttagagacgcaaatcctcggtgcacccccaacccatggaatcaaccgtttttaatgtgtgacctttggcagattagttacccctctgaaatctagtcttaccctatgaaatatgggaacgttaatagcacaggattattgtaaatattaaatgagatgattttaatgagtcttccaggcgattctgattatgctacagttccactcctaaagattcttctaaaagattcccatttttggacaattagaagttcctgctaagagaaattttcagattttatccctctacacattcgcaactatttttaatctgagctaatctgccaatcatctttccaaaatgaattaatactctcccattttcttaaaaattttgtaggatatcaaccattttaaactttttcttaaagactcagggcatcatcatgaatataattattgttatattagatgttgggcctttgtcatatttctatattttgtgttgtttaccagtttttttcagcttctttaaaaatagaatctttagtttgctaccttcttcttcattgtctggatatcagctatttttttaatagctatatccagtattatccccatcactttctaattttttacttttaacttgattttgcacaaggactgaaataaccaagatgattaataatgtactcaaagcaagaataaatcattaaacataatagtaaataaatgagaagaatttattgagaggaaataaatgagagggattttttttgaaagtataagcttctgtacctgagttttgcatcataaagtctggattcttgggtaccttactatttacttctgatcatgtcatagttgtcttgaataactgaatagctgatgttttgaataaatgaaaagtttttgtagcatactcaccactcaatcattctcctgaatgttccaccctcatcatgttatacctttctatcctttgcatatattgttgacatatacattttcctaggtgatacagtttgtaactgatatcatccaatcacaagtaaattactgctctgtggaataaaaggtaataactaaatgggacatgtctcctctttcactccctttttgctgttgttccacttctcctgggctcctgatgaagtctaggggagagtatacagggctgagatgtgaacaaccctaggatctaggcttggctctgccactaagtgactatgtagaactaggcaaatctcttggcctctctgggccatgagatgcaacactataaatcagtacgataatactcgcttctccttccttatagcagtagagcaagaatccaaataaatagtacaagtgagaactcaacacaatctacatctgtgaagcatcattcttaaggtatatccagggcatttggctccacgtagacctagaggttgctttctcagtcccttgtccgccccatatccagctgccttggctcacagagtttgagactgtgctgtattttctgtcatgcttcagagtgtatcaaatcaacacaaatataaaataaagccataaagagaaggctgatattcaccatagaaaatgttggagggaaagacaaaaacactcaacgacaacttcacaaacaacccttattatggctgtggaagacacaatagtatgtgtaatgtggtgtttgggctgtatttgctgcttgggaatctggtgcattctgagatggagggaatgccaagtgtttagacaacatgctgcttggcgcctgcaggttcctggaaaggactggggtctccagatctaggctgccagccaggagtctcaggcagagacatgcattctaccgtttaaggcctttctagacttcagcagtgagcagatacaggagccctcaagaagctctgcaaaagcctaccaccactgagatccaggacataatatgcattcctaagcaggctgctgcctttggctgagtctatctgggggccttctctctgcaggagaggatgctaacagctactgttcctgaaggactcataagaagacttctgtgcacttccagcctcccacatgaagcttctggaagggctaacccggttcatttcatctacttgctgcctatgccaatcctatcccctcttcaaagcccagtttaagtctgaccttccccatgaaatcaccaaagcctttagtcttcatgacccctcctgcctctggcggtctcttgcacttgttgcctgagattctcttaagctcttttcatctgctgccttgttagttaaatttactctgagtgtgttttatcttgtttcctcagctggattgtctgcatcttgggggaagggaaagttcttataaatcctggttctgctcttgggccaggacatgcctggggcagcaggtgtgtcttccccacctagactgaggaattgtgtctcaggggctgggctggattccgcaggagggaggccagggctgccaagagcaggagagccagagaaaagaatcaaatggccttaaatttgatttaagtttcaaattgcttgaacccaggaggcggaggttgtagtgagccaaatcgcaccattgcactccagcctgggcgacaagagtgaaactccgtttgaaacaaacaaacaaaaaaacaaacaaacaaacaaacaaaaacaagcctggcaactgctgccaagtgtctcatccaaagaaggaagggggatcgaaaccaaagaattgtgaagtcacaggatcaacagtcaggcaagtggctaaggactcaggctatgaagggtcctctgccacggttaggaggtttctttgttgttttgtggtgctctttgtggtgtagaaacaggtcatttctctacaaggattcatgcaggttggacagttccatcatggtctgctcccaagcatggggcctgtagaagtaatgacttttcttctggtcccagtccacaaagagatcgtgatcccattccccttacctgtacaatgcaggggtgagactcaatcctttcttgagtcccagtaaatgacttgagagattgtgagcagaccaatatcttctgtaaatgactggatattccagggaatactttcaaaaagcatcttggacataaaaacttttttttttcataagcagtggaggcttggggtcaaaagctagaccattcctaaaggaaagtttgatagtttcttctttgggagtgaaaaccctatgcatttaagaacagaaaggaaagcttgcataggtctgaaaatggaaaataggcctatttcctttaagaatagtaaatttcaggccagatgcactggctcatgcctgtaatcccaggactttcggaggctgaggtgggcagatcacttgagatcaggagttcaagaccatcctggccaacatggcaaaaccttctctctactaaaaaatacaaaaattagctgggtgtggtggcacgtggctgtaattccagctactcgggaagctgaggcacaagaagcagaggttgcagtaagccaagagcaggccactgcactccagccagggagacagaaggagactctgtctcaaaacaaacaaacaaacaaacaaaaaaccaaaaaagaatggtaaattccaattaacaacaggagatggaacaaatggtggacagtgactgtcatcagagaagtaaatgctatgtctgcaaaaaagaggtgagggcacagtgatgcgtagagacccctggctttaattatcccatgccttggtgttactggtcctctggagatctacttaacaggaagtagtgagctatgtccccacaaaagcatcccagaggccatttctgagcaggatggcctgtgggagtcgagtggtcagttgccatggttagcagagatttcctgctgagaagtcgcccctatgtgtgcacatggacagtgttgggtagagcaatgctccttcaactttagtgtgtttaccatcacctggggatcttgttgagctacacgttctgatttcataggcctggagtggaacccaagactgtgtttctaactagcttccaggtgctgtccatattgcggggctgtggaccacattttgagtagcgtggtgtagtggacactggaggaagaagtgtagacctgagctctagccccagctcagccctgtgtgtggccctgggcaagtcactgacactctaagactcacaattatgtcaatcatagtgataaagggaaatgaactagaaagactctccctggttctatgatgcgatgtttctgttacagtcccacagagaatttagacctctaccttgttcttccttagagtagactgttggccctagagatgtgcccagtggtcatgtaacatggagatatgcttgattaattcactgtacatgggttgtttgaccagcttctacccagtgcctataagagtagataccagactctatttttatgtcatttgaaagacaagggtagaagagacagcagttcagtgacagttgcgccatcgccattactctaatggttcagaaatagcttcccctcttcccctgtggaatgtttagattcatacttttaacctgtagcattttcctacccttcctgtgtaggaagcaggtgcattggaccaccctaaaacaatgcgtaggcctcagacttctgaactcatttctctgagatgagatgtccagtttgttcactacaacaatagttgccagacctattacggttatgtaataggtttctttttttaaacaggtcttgaaaatgtatgcattattctttaggtaataaatgaaatttaaaagactgaaaataaatcagctttgcaaagtgggggctgaagcttttctactaactgaaccatcttttcttttttattcttgttactttttaaggagatgatggcaagtgatttctttttaacccattttaagggcccagttcatcttgtacaattcttgtgcaaagtctctactgagactttggcctgatgcaaaagaagaggcccttagagaataatgctgggcatggagtgtgattcaagaagttattatcgtgtgttctctgacacagggtggctcttgctccccaagggtccaacagagaggggcccaggcatgcagaatattacatgcctgccctgtttccccatcagagaaatgttttccaacagccattgtggttgtagtaaggaaaaacatgtctttctgcctggatatatcaactgagggatgaacggtgagagaatataattgtctaaggatgacaacaggatcaatttccctttgacactgtaggccaccacctctttgtctccataaaatttcattagcacttgaatttatcagattggcttagctgttgtgcattctgctctgtgtgcaacgggcccattgttctactctactttaactggttttctgatggatgtgtttatgatacctcctgctgggtattgtgcgtgacaactggggactcgataactaaacaatatctgaacgcagaatccctctgtccagggaggggctgaggaagtcacaacagttaatctgtagtaggacccatgtcctcccatctgcaggggatgctctgttggcttgcaaagtggaaagatctgggaggctgaggtctgatgtcgtcgtcatcggcagagcgaccttgctcctcatttgtgcgcacaggcactgaatggagggagccttgaatcatctgattttgctcctcattagtatttctccactgtgttctctgaccacactttcctcctcggtgcatgcaaagctattagcaatgcacacacgcggcacatctgtggagccattattgctgctggatagctgtgtttgtgtaaaatattgaacaccctgtgaagatttataatggtttcccgccctgtcctctatccaccccctcttctctatttaaagacatattaacatctctagctctacctggaggaaaaactctttgaagtgagactgcacgaagataaaatgccttctctgaaagcgtccctctagaatgagcatggaggccttctgagaggccagggaaccacctgaggcacaggggcaggatgtctctgctggaaggcctcaggcccctctctccctgctttctgtccctactgggagtcagctctcccaagcacaggctaagcacccttgtgaccacagttatctggcccttgtgagagcttgctggtgactttcctgagactggagtcccgaggcttttaacaatgtggatgtgccttggccaaaagacatcctctgggttccttaatacttgtcttcactcttctgttttgtcagtggagatgccagtagctgtaatttagtcttgggtgggagagagccagaggtcgaggagggggtggggaaattgtcatcctaacccagcatagaggacctggtttaaagaggcttaacagaccactggtcttaccagcagatgcacctggggcttcgagagtgacttgggcttagcttcttcaaagggtgctgaaatctctcaccacccctgctcaaccctcttgctgcccccaccccaatggagaggggcccaggcatgcagaatattgtattccaacgatgctagattcatgtgcatgatatggaagggtctggagggaagaggctgctggtgcctatggccctgaggaccagctttctccttcccccatgtccccaggccaccccacccagagcatgccctcggcacgcaacaagcggcatgttccaggttgttccagggccagagagagtgacatgaggcaatgtctgtggcaagcgaaaaatgtgtgctgagccttgggaggcgccgattggctggcagtgaggtaatgcaatgcagtccaaatgtggaagcagcagtaccagcatcgagggcgtgcctcctcggcaagcctgagtctcctgccagccatctgaaggacaaggcgccgaggggtgctgcagacctcatgcaggtggctggctcacatggcagggtctgggtggtagagatcagatggcaggatctgagttgtcatgtctgttctctgtccctgaacacaccaaatgccactacaattctgatctctgttcttcaatggggatctcttagtggggagggcaaagaagcttgaaaatgagggtctggacctcagaaccacttacccaggtcatggtgagtgatggtcaatacaactactcttgaggattaggatggttttctcagtaaccgatggcttccctttaatgatataaaccttctcagggtctttcctaagcacagttctagattcatatttgggccagaagtccacactcaatctccccattccagtccatttcctatgactttgtgtcattggcaatgtccgctacgaaggatggaggaattcaagaggccactgtgggctatgctttcttctctttaataagactcctgttccaggagaaaactggcctctcaaaaaaagtcttctgaggaatagcagctaccaggaatcacagttggttccccatgaacatttcagatcaattacataaataataactacctattgtcttctagtgtcagtaccacaggagtaactccacatctttgagttaataaataaatttacttacttattcaataaatattctggactctttacggcagttctgacaatgttctaaatgtataggctatggtggtgagcagaacaaagtccttggtctcatgaagctaacattgtaaagggagatacagacaaaaagcaagagagctaagaagaaaatgaaagaggataatgaaatacagggtggctagtgattgaggcaactgtagttgggtggtcagggatgacctctgtaaagaggtaacattttagctgagacatcagtgaagccaatatggccatgagaagttctaggagaaaactccctgctggccccagaaattaattacaatatgaagctttagggaaggccacagggttgaatacctaagaagaaatatcccagtggttaaggacaacttctgctttgccactcagagagaagcagagcttgtcattgagctagtacagtcctgtgcactcgtgggagtaaggtcgcctcctttccccaggcacacagtaactctgctggattgctgactcctggcagtgtcttgtagcaaggtagactggggggtggcagatgcaaactctccctaaagaggtatcatcctcagttatttccattcacccaaaccctttctttcctccaaatcacactggctatatatctgaatgttttctttgacccagatcctattcttggcttctgtagacattgtcttgtttgatccctataaaaatctgcaagatggatgctataatttgcatttgactaaggaggaaactgaggctgtaagagataaggcaactctcccaagatggctcttttggggagacgtagaattgaggtccaaactcctaagaaagatggaactttggccatctccattgaggatgaataactcatcaaactattcctgggaaagggggtggcagaggagagagagatattgagacaggctacatatcataatatcatgggttaaaccaacagcaattttagaccccaaggggacaattcgcatagctgcagacgtttttccttgtcacactggggatgggtggggagcgctactgacatctagtgggtagagacctgggatgaggttctaaatgttctacgacgcacatgacagtgccacagcaaagaattatttggccccagatgtcaatagtgctgaggttgagaaaccttcgattaaagtcttacagtgctcactgctctctgcttcctctgtcttccttctatggctgccctcggggttacttacacactggatctctagatacaggactaaagtcataatggaaatttaagattccatttggatgctgatttttttcccaagctctcttcactatttattaaatggttagtgaagggaggtggaaagcttgatctccaggcaagtgagtcccttggacgtggggtggggagggtgaagctctggtgtggtactgcatcagcctagtgggaggtgcttgttaaccctctgtgctgtggcttccccatctgtaaaatggaggtgaaaatacctcctcctgccacctctcaggtttgctgtgagaagtcagtgatgtgtaagtgctttcataaaagtactatatacgtgtgttattactaattcttatatcatgaataaaatgaaatcatcattctgcccctgacaacaccaatttgctgaaccattagaattctgtacattacagtcttaaagagccatagagagaactgtaagggacctcaagaggtcatgcggtagaaaatggccagtgagacacttgggaatgattaaagtgaggtgggaagacacatggcatcttattcagttactcaactctcctttgttcacttccttgcatcatcattgcctttaggagtaatataataactgcattaataaagttgttatcctcctcccacccctgccagagctctgagggcacagtctaaacagaataattaattaatgaaaatgaagagaaaatagctcaagtgatggctataggagatcaaatagcaaagagaaagctgcaaaaacgttcgttgttatttgacactgagtagtgcaaagagggctgggagagtcccaggatccctgatcaacagagagagagtatcctgggggtttcctctttactttttctttttctgctctgaaaggttaggaaagatcctgagggcataatctgaccatctgatccaggccagcatactgctggagaagactgtgtcggggatgaggtggtctgagaagctggaataaatgcaggatcagctgataaggagggtgaggaaaaggtgagcttagtgtctgactttaaaaatatgtagatgagctccctaaataaaatacccctccacactgtactgatgactgaaattcctttaagagaaaatattttcgttctacaattaaagatagaatcctattttttccagggagaagtaatattgtcttaaatttatcctacattactacatgttgattacaaaaactgaagaatctattttctttgttttttttccagtttttatctccatccccatcttgcatcttacaaaggacccaatagaagcttcatggggtacaggaaagaatatagcaaggaccttggaggcctcaggcctcaatctggctctgccattcaatagtttgaccttggagagcaatcagaattctcagggccttagatcctctgcccgtgaagctgaggtattggactggatatctccaagggccctactaacaataagattatggactggggatggcttttcttctttccattttgttcaaggaagcctcctcttcgtcatttctcacctaccacccagctctgtattttcccatatttcaatgtcctttcatgaagacatataaacagtggccatgagtcaaggggatgcaagggtatctgtggttcaagaagatgcacgtgatgaccacggctagttgatccctcttggcatattgttgccatctcagaaagacaggaagggtgggttacagctgccagcaccatcaggattaaaagcaggaggactttaagactcaccctcgatgatgcagaactcaaaaggtctctgcttcacagctctgggccaccttgaagggcaagttgacaaaataaagcaaagcccagacagccttacagagtagtagattctgcattcctcattttcatggataattactgtagccttcaatttgaggaacatggcagtgatttgtgtgcagtttactcttctttcaggtgatggaaccagagccagaggcgtggatgtgactctgttgccctctagtggctagaatgcagtagcatacccagcaccccctcagacttggcttggtggtgccgctgacacgtgagcaagggttcctgggacactgactgccaagggggctcgggattctttcagcacaactcctgacctgagattctgcagagagagagagagagggagggagggaaagagcatcatccttcctatttctggaagtcagatctgtaacacagagggcctgtttcgtctagagtaaccctgtaccagctgcagcgctgggacgctcctgcctcttctgcggtcgcatgtccatgttttggggcagctaaggcacctggggtctgctctcgcagtcacacatttgctgtgtcacttctgcctcagttagatgttttctctagcaaacagatatcattatgtggttttccaattatcacttcccaaagggagctggttaatatggatgaggctttttaacatttggctttgaagacagggttatatgtagttgtagcagagggagccaatatctcggtaattggctaaggtttgcagaggagcaaggcagtctggggtatgtgccatctctgggacgcggggtctttgcagaatgtgttattgtggtgtagtctttaagtgagttctcagataaactggaaggtgggtctaggtggagattatttcaagaaggttagaactctggtctctggttacaataaaaaagctggattgctgaagatcatatgggcattgttgatgttgggctcaggcagagagttcttagtagggtcttcttaccctgacggttgccctttgtaacaggcaataatacaagaggattaatttatggagaggctgaagaggttagtggaatgagaagagatgcagcatgcagggacaaaactcagtttactatatcagcttcttttaccctttgggacaagaatccccaatttactgggcaaaacttccctccttctacttcctcttccaagagtttaactcatggaaaggaaatgaggggaaatagcacatttcatggcatcgaagagggcatctttgaaacctagcggctttccacctacagacatttagaatgcaacttatgctggcaaagctattgagggtttaaatgatatgctttatagcgtgttgcatttcttcctttgaaaatgaggagcttgaattacctttcttgcttcataatagaaatttagtcttatttctcagtctatagttaacacatagcaatctggtgccttcgagtgacaatttacctaaaagtcagcgttacatagatagttctacaaaatccaaacttacatgctttgtctgtacacttcttggtcttccaaccttcaggatcaccattgattccttttcctgtacccctccaacccctgacactgttaaactccatttcagtagtcattcacccagtcctgcagattttttgtccctacagcctaacattagttttcaaccagatcactctttttttacactattcaaaaatttctttagctttaaaagccctcatgagccaaagtgccagagatacttgtggtgttctaaagtatttgctgggacagggttaaatggatagggaaaaaaagaaataataggagggaaaagggtcccatgaaaagcttgctgcctggtggtggggaagatggagtaccaccagctatcattataggctgggccaggtgataggcagaataaagtgacttaagaaatttctggaagcacttcactgcactgcaagtcatgccactcttcctcagctcacagttggcagaagcaccactataaactgggttcagccacgtgtcccttagacacataagagagggagtgccaattgggaggacaggtgaccgaggggggcagagggacacattcatttattacccagttttgtcctggattgatgctggtcttgggtatccgacagtggaaccactctagtacctgacacacctactcttgacccagctttttcactcccaatttggttgttatacagcaccacaaatagggaaagatggctgggactttgaagagaacaggtggctcctatcagctggtgctaaaagagccccaccttatagatatgtatcttacactcatatgaccttccctactacaatactgtcataaagtcaaaaatgtgtgtctcttgtccctttgggctcccccagctccatttaataccgttcccaatgtttgtacctaattacagatttgaggagtcataaaaccacatctcccaagaggtagatctgctttattttggcttctgtgacacctgattgtcctctttcttcattcacctttaatgatttgcttccttttgttgcttatcaaggacttgtgctcctgaaggttctgtccttgactcccttgtcttcccccaacattatctttctggacaatctctaccaccttaatgttaatgagcctcaactccaaattggcagcccagatcaccctccagggctctggacatgtgtccccagctttctattagacatctctacctacttgtcccacaagaacctcaaacaacaaacatctaaacctgaatttatcctctgctccacaaaagtcacttctctatttctcattagaagtatagaaatggaagaatgaaaaacttccatccattctatcacttggtattaacctagaccttttccccttgctcaaccccatctctccttttgccttttaccacgaatctgtcaccagatcttacaattctacttctcaaatatctttccagacagactcttcctctccatgtctactttactgccctagttcagggtttcatcaccttgatctggcctttgatatctgcctccatgtgtccaggacctgcatgctaatccctgaaagaaaacctggatacagttttgcagctgaattttattttaatgaaatctgcattcttgtggataaccttccaacacactacttcagtaatatcactgactgtagcaataataataatatcagtgactataacaaaaacttttggcttaaaaaaaaatccatttgcaatgacttcactttccgaagttctcaactgatacccagagccattctttttggtcatatgccaattttgtgagtaaaatatagggtttctttatgaccatacatttcctatgatggcgagcttatgagggtggtccttcatgcaagtttctcatctttctatagcctgaaaagtactgattctttttttttttttgagatggaatctcactgtgttgcccaggctggagtgcagtggcatgatctcggctcactgcaagctccgtctcctgggttcacgccattctcctgcctcagcctcccaagtagctgggactacaggtacccgccaccacgcccggctaattttttgtatatttttagtagacacagggtttcaccatgttagccaggatggtctctatctcctgacctcgtgatccacccacctcggcctcccaaagtgctgggattacaggtgtgagccactgtgcctggccttgattctttgaaaatgaactctttttggcaccctcatcttctgccatcttggtccattttgcttatcagagtaaatacaactggtaaaaaggtttatgctatttattctccctccagtcttggttcataacatgctcagttaaatttctccctcattgagtgtctcctcaaagataaatattttaccttggaaagtctggtcatttctaaggttaggaaaatgctatcagtcactttggagttgattgcctatgtcaggttggcattcttggatgaactacaggtttaagatttgctgttctgcatgcatcactgtgaagtcatctgagatgggcgctgacctgtagctcacaaggagtttcaaggtcttctatcatcctcctttcaaacactcacagtgattaattctccagaaatcactactggtgctatcaccttcagaaaacaattttctttctgaatacatgtagggtatataggcttctctggtttggtttgcatttcacattagcctttttttttttttttttttttaaattccaaggaactctaccttcaaaagcaagcaaagcattctcctcccaggtggcccatgtactggattttggagtctgaattgttatttcctcactcctgccttcctctcttcttggctttctttctagggcacctgacgtccttccttattactgatggcagcagagactgaacccctgggagaggaaagtgaactgagtaattgttttgccttttcatgtctgatgtatcactctgggtcagtgtagctttagttgaaagagtaatgttgttacccaggagcagctgtagtgtctccagacaactccaagacctctccagtcccgcagaggtcagtttctggtctgggcataatggtcttttttccaggggttgaagcccagctagaagcaaattcctactctgatttctcaagactctgaacacccacaccggcccatgagggcagagagtggtggctggctttctaaaccagccttgtgtcttcagagtccttgatcagagataacttggggaaagctgtgtctcataaatccactttgctactgggtcagagagatgccttgagaatgaccttagctagggaagggatggaatattggtttccctttgtcccctgcccttcagttcatggcatagggttaagagagtgtcaggagcctgcaggcctgttctgtgcttagcgtggggagacatggcagcaagttggcaagctggggtcttcttattccaaattcaaccatttcttggcactttttttgtttctttttctgagaggtagtagacagtggagctaaataaaattttctcccaagaaaaaatggttagaagcagcgtgtcccctgcccaggcctgaaatctcttcattccctttccctttccccagggttcccaaaggtcttctgcattgcccacctgctgctctctttcctgccctgtttgttttgatggcattaaaaggcctgcctgcctactttacaaggaccctcatttctttacccatcatgttttgatatattttttcttgctttttcttgaggtttgcaatcaagagccctttaactgaaatcctgggctgcctgcagcagctgtggggttcccagccaactgccttgtcctctgagggataaattccctttgaccgtgccacttgtgaaaacacagagcaagtgtagagtattttacatataatttagaaagagagaggacttatcggtgggtggtaggaaaggacagaagatggattaatattttttctttatcacttggcatgttaaacttaattatatttcttgaaagacctctaaacagttataattagaaattatgataatagctgcggttgccttacacatgttcattttactgcttgcttctttgtgaatgtgggctgtgattaataaataaccaccaacatcattaggacaagacctctccttgcctgctgggacccctttgactttggatggacagtgtcaaggatcaggagcacctagactagccccatgagccatggccttcataggctagatggtcattggaaatgaagttgttggcaccgacagtcacagttatgaaaataagaatttggatctcagatttttctgctccctcttctcctgtgtattagtccgttcttatgctgctaataaagacatacccgagactgagtaatttataaaggaaagaggtttaatggactcacagttccacttggctagggaggcctcacaatcacgacggaagatgaaggaagagcaaagggatgtcttacacggaggcaggctagagagaattagagccaagtgaaagaggaaacccattataaaatcatcagatcttgtgagacttattcactaccacaagaacagtatgagggaaactgcctccataattcaattatctcctaccgggtttctctcacaacacttgggaattatgggagctacaattcaagatgagatttgggtggggacacagccaaaccatgtcatcctctcttggtcatttgttttttttttttttgatttacaagtatcgtttattcactcacttatttttgtgcagggatgacaagagagtcacaggaatatccctaaatacttacggtatcattgtaaagagaaataacccaagaagagagtgaaaaaagaacctcctaaccaagggctgcagttgagtactaactactctgtggtgagaaataggaaatttagtattaagttaaagcaaaatcctttttaacatttctgaggtctattctcatgttgattataaatgggaaaagtgagaattagcttacttctaacctagctgcctgtttggccctgcaaaggattttagagatccccttcattctgtttattttatggaagaggaatttgagtctggaggagttaagacattgactgggcaaagaggcccaaccactcatgttcagacctccctgtgagatgccatataagaatatcaagagaaaaccttttaccctctaggctgttcaaccttagaaattcataagagcccccttagtagtcaattatgaatgataacaataaagatccatgttcaaagtattgaaagcactgtttcaataactttcttacagcatgggtgtatgacagaccagagactaaatacggagtcctaattctcaagacagtctcaaaggatattcaagatcaaatttagaaaatatattgtcagaagcctgttccccagagtcacattcaaagatttttctcagagaaattttcctaaaggcatgattctaaagagatctagtacaaggcaaaggatttcgattttttttcccctactacttcctcatctccaccccacaagttgacctggagtcatctttggtccttttgagttttaagtcatcatcttccctcaggctcaagaggaagcctgctgtattttgatgagacaactcacctttgatgtcacagttttcactcttcaagaacaaggagtcattagtatcttgacatctaactgtataagttaaagcacttcctggaagctcaaagggaaacactgaactcttaacacacagattctgctggaagtaaatgactctgccctataaaaggaggagaaagaaattctatttgagtaatgccgttgaaatattaaaagaaattcagagggaaaaatatccaagtgaataatatatattggatctctggcctctaatttgacattcaggtcagatcaaaactaaccctgtgagattctggaatttaatgtcatataaaaatgctactgggcaaggaactttattacacatgatcataaaaatatatgggaggcgccatctctgggtatttttctatcaaatctttactcattttacagtctttacaaacagaagccagaagtgctatatttgaacatctacatttgttgggatttctttaaaaaaaataaaacaaaaagaagaatcacattttatacgtgttaaatggtgtagtagtaaaccatgtttaaaaaagcttcagttttcattggtgtacaaagctgctacatgtaaatattggaaccactttttaaaagaggattgctgcagtcagattttttaaaataataaaataatcacaaagttcaacatatggtgtcttcatgtgattataagtgtgcgagtgtgtatacatgtttttaattccttaggattagcagaatgacaaaatgtgtgaagaaggatagatgatggttatttcaagcagcacaagaatttgaggaggaggtggagactaagaagagagaggaaaaaaagatcaagcaggacaagggacatgggtacaagactagaagaaaagctggatttctttaaactagaaaaatcaaagacatctgttccccttatggcaataaccacatttttctagaaatttacacattaacatctaaaaatggatttgtgctaaaaatacaagctatgctcaatgcatgactcttgaatgactttcccctatgattcctctgtagtcatatggcaaggccatgccctcatctgacattttttttagtcaggaaataccaacttcagttttctttgatcatgtgatttccttggcctggaaactcttctctgtctttccccctaaccaactcttactcattcttctagactaactcagctctttaatcactgagaaaaccttccctgcctatctttgtcccttccttagttttactgaatttgcctgccctgtactctgatagcacattgtatttaaataaacacttacggtctctcccgctaggctgtgaacttcttaagtgaaaagccatgttttattgaaatctatatttctggaacctaacacagtgtcctagatgctcgataaatatgttttggactaaaatatgctgctagtttaatgctccagttcctgatgaagccagggctttctttcccaggagacagtcaactcagggggcatgtttggtttagtacctgccagcgtgttgttgacaaacaccatatactctctgttgcaaagccaaaacatgaccttttccacaaatggagtaagcgtttattggggaataaaaaagtatgatgattgtttttaagtaacgtataaacctaagtgtctcaatagaaattgtgagaaatatttatttactgcgagagaaacattttccttaagctttcattgttttaggtagtcttcgttttcctgttccccatcctcctaggttgaattccctgattctggctggcatgctcataatttctatgatcacagccccattgtctgttggagctgagggcattgtaagtttttgtaagcagcctttgataagttttagaggtgtagagaaagagctctgtctcctccctgggagaatactcctttccctacacctcagaggaccaaatcatgtctttattaatatgaagcattcattccagtggcatattttattcattacaagaggatcagtagtttgagcaatcagagatgaattctaatatatggaatcctttcccgctgagcttccatgaaagcatttgatcctttttggcctgccccctttgagctggctcctttattaatcctaaaggaccaaggtgtaagaactcaggcaggacaactgtctctttaggcaaacccaggctttgatccgcttccctgacacagtgatctcacctcctttggctcagtcctctccttcgtcattggcccagctatgagtctggaagtccccacagtgccttctttgggtcaatactattatcgtgcacctgctatttgcctggtgctgtgctagagactcaggatacagatgtgtagagggaagagtgtttattcttgtgaccttatcatggagagctttcagatgagatttattcctaccaaatttattatttgagtgaaactgaacagttccattctgataagtaagggaagaaccaggcatactatgttgctattctccacgatctgtgttaaggtttctgtggatgtgtgtgtgtgtctacttaaagaaatggcagtctatccctcttacatcctcagatattcacagagcccctcagtgacattttttggcctaggctttttaacattctagagtagaagagttgactggtaggaacatttctaagtgctcttttgcaccataaagcaagaggagtgtagctgttaggggaacttgagaagttggttagtgtgtaagtgatgtgagaaaattctaagttttccagtttaaaaatggagacaggagggaaatggccctttgttaagaaaataatgttaaggtattaagaaaacaatattaaggtataaagaaaaccagagacatgaaacagaagttggactctgagagtcttggcggagatggtggtagttttagcctgcataggtctgggataggagtcacttgctgtccactggcatcagaggacacaacggagtctttgatgtgggtctgaaatgttacaacttcccacccccacttaaggatgcttggatggagaataagagatgtcagttgtgttctgaaaaccctaacctagatataccttcagccaaaagagagacatgctaccatggttatcatccaaagccactctgtagaatatagcccaaacatcactgtgtattaaaacatttctctttactgttttcacataaatagattaatttatacagatttgtatttatttacatatttgtgtatatgctgcactaaatcctcactagtgggacattgtttaggaatcctggtacagggtgtagtaccaacaaggaaaaccttcttattaagctcagtgtcacttgatccattatatttaatgccaggaagggtatatatacagatttagaaattaccttatttctttgtcgactgagatgggtaatctactcaataaccatttaatgacaatgcacaatgttccaggatgcagaattgaatagcctagcctgggtcgctcccctctgagaagattacagtgtaatatgataattattaccatagtgctacccctggggcagaggacactcagagaaggggtatctgatttagacatggggatcactacagctgcctggaggagaggaagcttaaactgtgttgggaagtgtgagtaggacacagattggtaaggtgggggtggagaggtattccagaaaaagggctgggcatagggaggcttgtagcaatctacaatatttgggaagctatgggtgggttaatactacgggcattaagtatgctttgggagggagtgaatggggataggattcagggcacagctgggccaggtcacgaagtaaataagatcagaaagactttgaatagctcagtcaggatggagattcatcttgaaactaatagctggagaccttgattgacttgagaaggaagagaatcatgtgatcctatttacacgtggaaagatcatgctagctgtcatttggaggaggaagtagttaagggcagggtagagataggcagatatcatgagataacctccatgaaaaaaaaaagggtgaggtggcacaggtgaaagtaaacttaggaaagtaaagccaggattctaatgaaagatgttattaattaaacttactgtttaggaggatgatggagaaacccaggtcctggcaaaaacggtcacactactttaaagtttgggactaagaaggaaatgaataggatatcatgaaagtaggctctgtgattttcttagtttgtagggagatggtagaacttagtggttaagcacttgagctttgagctctgaaagatgtgagtggattcctggcctgatctcatactagctgcatgaccttggttgaccttcagcattctcatctgttgaatggggtaataataatatatgactccaggagttcttgtgagaatttaatcagaaagtacatgttaaatactttttggcacctagtaagtgttcaataaattaccactttgcttatttttataattggtaattaaaagccagcaaaagtatgcttgtagtggaaaaggcactacaggcacaagtactaatggggcttgggctgccaggaaaataccctgtgatctccttctgatacctggcacacaattttcagggatcttggaaaacgtttacctcatatgcaagtccatgcatggtaccagcaaacagggatccttgaagaagtgaattcacagctgtctttaccttctactatgtaacagaatgtgagatagagagaaggagagggaggagagagggagggagagagagagagagagaggagagagagaaagaaagtgacaaattagattatggaatggaaagttacatttgggaaggtgaagagttttgtcaagtatcttagcctttcttagcctcattttaaaatgatgttggactaagtccagctgcaaactgacagcccatgcaactagcacgtggaaatattttaaaaagctgagccaacgtttaaaaattggaaatttgtcaattgaggtagcttcttccataataagttcatttttattatttattcaaagctaaataattttattcaaaaatagatttctggattctgttgaaaaatcctaagatctggccaaccaggctcctgctcttccaagggcgtaagcattgctgccccttttgggcaaagaatcaggtttctaggtcctcaaggctcatcacttggggtgtgtgctggtctctcatgccaggtccccttctcttatttgcaaactgtctctgtttgatattaaaatttgtaatggggaaacactcactggtttctaaaaccctatgtagatttaagtagttgatgattctgtgaaaaaaccaaataccttctagagaaaacatacaggttgggcagagcccaggtattgatgtccttgatgaaactggtttttgtattctgaatgttggagattgagagatccaaagccattctctaaggttgacaccaaggtgcaggtgaaaccatggggggcaggtgtggggagaaagggaaggagttgaaggaagaaatctacaattactcggaactccacatccactcagctgctgtagaatatgagttgagaggaaatgcagaggagaatctgctgcataggaccactggaatatagattgtgttttggaaatgactgatttatcaggtggaagcagagaatgataagccagctccatgctgttctctcctttgtcatgttcccctgcccctggcccttggccttcctctcacttccctccctgacaccccaactccatgcagcatttgctccccctccacccaactcctccttgctttcctggcaggttcaccaagaaacaaccgggcctccatggcaacgtgaagacagctgaaaaatggcagctaaatgcagctgcccctcatttaatatcgactctggcactgacagaacagataatgggcaataacacaccattatgttgtgggaaaatgaaatgcttcagcagaaggctgtcatgctggggggatttatttgttactgtaccagcaccagtttctatttacttcccttccgttctttttgttccctcatttccatgccagtttctccctcctcctggtttctctcccattcctcccttctatagcttctcttttttgtacttcctttccctcctcttttttttttttccttctctctgaatcacttatggatataccagaaagcatacatatataatgcaattatttgcatgatgacttacaagttccaaagcacattcaaatacattgctttttcatttggagggtgaggcaaccctatgaagacaggtagggcctagacactgatgtttattttgcagatttttaaaggggctcagagaagttgaacccaagatcaggcaagtaagtgtcagcagctgcattgcaagtcagattttctagcccctagacaggactctttcctttctacgacatgaaaaacttcagagtcaccaatttctacccactttactagcaccctatcttcttactgaataatctgcaggtgcagagaaagtcttctaggctttgagacttcagaaggtctttagatctttacttatattgccagtcacttacagattcttccagacaagtgcctttgaattgttgataagattggtttatttttgttttcatttttactctttaaacccaagacgtctatctgctcattacctcctattgcatcattatataatcatgaaatcttggtatgcagaagggcgtggtgtgctctttgacttgaaagtgggggcattttggtggccaacagctttctgttttgcaaaagaccgtggtacattgaggtccagaggacatcactgatggacttggcatgaggaaaacccttctctaagttgttgctgtagtttaaacttgctttcttacatcctgttggttggattgtcatagcaccctcatcttctgttgaaatatcatttagtagactctaaattctggaaagatctgagatcaagtttcttagttctttgggtcttgaaaggattacaaatggagtgagaatggctattgcaaacatgttttcatttctagttatggctggtgagggaagaactaaatgtcaaaaaatatatgtgtacatctgtagaaggtacagtatgagtaatgaatatagtggttttcaatcatatgaaagaatgatttatattgataaagagatcaatgtttgtacttcccagcaaatattttttaacctgggatctctgagccccttgaaaacatgtgcaaaattttgtatggataaggcaatgcagtgcagtgtttcaacccactgatgttgaacatactgaccaggattttggctctgccacttgccagatttgtagctttagaaaaattacttacactcttcagggcttagatttttgaactagtctggtactcagttgagatttgctattctgtattgtttcttttctgtctgtaatgctttgttctcattcctgcatactgaaactcttcctgcaggtttttctctctggcagccatccccagttttagctgtggaaactcaagtaggcctctaacaaaatgttctgtggtggtgagaaagctaaggaaaaccagctgctaaaattacagcaagtctctggttgctgttgcttggtttctttccctgtatagttatttcccgtgcatggttcctcaaagtgaaatgaaccttagtgtcatatcacataatcatggaatgttagaactggcaggaaccagagatgattccatttctgtggtctgccagttcaaatccttgctgtgtagaaagcaagtccttgaccaaaggcctgccttgccaatcagcctccttgctattaatatattgtccctctgactcctttaacttgtttaattgcgctaagttcttaagtggatttactgccattccttatccagatctgaggctgtatgatataaagataactagtgtttgtttagtatttatgccattttagtagttatattttattcttaaaaagtaaaagtgactggttcaggaaataagtactctcaggattgagacatatttttacatgtttcattattttgataaattttaaaattagattttgtattaagaagactgttcagaaattatccccattatctcatttttattcattattcaaagaaatgtaagaaaataataagccctttatctagctattggaattttggaacttccgaggcaactgtgaatctcaagttagccagagaaaagggggcacagagtctttaagcaagaggagaaaactgtctcacaaccatagtttttttttttttttttttttttttcccttggaaaggaatagagctagccagaggacttagggtctagtttccataccaggtgggagggttagagacagcaagtgaaattggtggagaactttggaagttgtcaaatcttcattgagtgagaaaaataaagccgggacagaagtaccccaaggaagaccacagaaggaaatcctaacagaacatacatagctcaggagaccagaatcttttaggtcaaaagcaacaacctcaagagaacttaagaaaaccaagtgcattcttaaaccagaaaagtacactcagaaatcacggagaactcaagcaaaggactttcaggcaccaacctctcttacaagctctattatagcaccagtgaaataattgatattcatgaagatcatacaattttagactctttgggttggttgtagcttagagattatctagttcagggctgctcaaggtgtttcctgcacatcagtgccgtccaagagctgtttgttactaatccataaggatataaatatggaaactgagagtaagcatttaagcacttttgtagtaattccatgtgtgggaacacacaggtgagggagagtggactggtctcattcaagagggtgtcaaacagttcagcattttaaaacttacttggtgagtcatatgtggcatgagctggtagttcttcacagtagggcatgtattgatctgaaaggatggaaaaatctaaaaaacaaaataaaacaaaattggctgtttactaaaaagatcttgtgaagccccaatctagtgaaaaagcctacttttacatatgaaaagatagatgatttatccaagaaaatataaaaagatgatggcagaacccagaatatgggattaataacattttattaattaagcaaattatgcccaacatactctgcttcttaaaataggcaaagcatgcaacacattgtagaattaaaaaaaaaaaaagacaaacatttgagacctgtgggctcttaaaggttgaatcattcctccatggacttcacatttcaaataagattttgctatatatacacatacaactgtatcaccccacagaaaacatattttgcacttgaagtttgttgatctcttggggcattattttgtttctgggaattcttaaagaatataaggctatgctggatggcaattttctgggtcaattgtgcccaaggcactccctacagcaaattaggtaatgaaacaactcttgtgggcccttatgatgcaatttagggcactatagtggtaatagactagctgggggctcagcagctagtggaactctagggacctcaaagcatgactaagccttcttcagtgcccagttttctgccgtgggatggtgttaggcccgggaagaacagagcctaaatgcacccctctacccacttccaccgggatcttgacgaaggtagggatgctcctcgtatttccatggttagattaggctaattgtcccttacaagttgaggttttgaaacaactggaagtggatagaatcacaatggtcatattaccatgataataacaatatcttacatgtataccattgaacttttatctcattaggtcctcactatagtctcactataggccaagcagctacttttagctgctttgtaataagtaagccaaataaaggctcaaagattgaacagatttattgattttacccctcagttaaaactaagatccagggccgggcgcggtggctcacgcctataatcccagcactttgggaggccgaggtgggtggatcacgagttcaggagatcgaaaccatcctagctaacacggtgaaaccccatctctactgaaaatacaaaaaaaaaaaaaaaaattagtctgttgtggtggcgggtgcctgtagtcccagctacttgggaggctgaggcaggagaatggcgtgaacccgggaggtggagcttgcagtgagctgagatcgcaccactgcacttcagcctgggcgacagtgtgagactccatctcaaaaacaacaacaacaacaataaccaaaaaaactaagatccaggatgggtacagtggctcaggcctgtgatcccagcactttgggaggccaaagtgggaggattgcttgaggccaggagtttaggaccagcctggacaacatggtgagacacagtctctacccccaaaaaaaacaaaacaattagttggatgtgggcatagtggcatatgcctgtagtcctaactactcaggagactgaggtgggagactaaggcaggaggatcactggagaccaggagtttaaggctgaagtaagctatgattaaatcactatactccagcctgggtgacaaagcaagatcatctccaaacaaaacaaaacaaatcaacaaaaccctcagattcatccccatgtctccatctctactgtcactatccaagtccgtgccgccatcactcatcacctgcataactgcagaagcctaccaatagtctccctgactcactcagctcctccagtggattatttacatagcagccagagtgatctttttaaagtataaatcataccctgtctctctaagcttaaaaccctttaatggtttccatttttcttaggataaagtccaaacttcttggcaaggtttgcaaagcccagcaggtagcacttggccacctctgcaacttcctcttacactgctctcttgttactcttggtgcatttgccccattagccttcaaattcatcaagctcttttctgctctccctcccctcccaaaggctaactcgtactcatttgcaggtttccgtttaaaccctgcttcttcaagagcttccttaattcttcatctaaattagctccttctactttctctttcctcttattccaccctgatcttgtctccacggagtttttagcacgattcaaagttacgtccatctgtaggcttttctttgtttgagggccgtctccctcactacaatgcaagattgatgaggacaagccctatgcagctttgttcaccagtgaatattcacacatagctctctgcttcagagttctcttgctataaatatgtgataaataaaaaatgagggaatgataggcccaagagggcacagatgggcaagggtgatgtgagataatgcactctgcttctgaaataattcctaattacctttggttttgttcttaaaacacaactggagttcttagaagaaatatgcaatctggcatatagtaagggctcaataaatgtttgaatacatgaattaatatgtaatgaaagaatgaatgccatcgttacaaattagctgagttctccatgtgtttgtaatattaggatattactgtccccaagttgcattatcgacttcctggctttcagtgggcccagtgtccccacatgcctgctcaccccccactgcactaacctaaataatctctgattattttctttttctcttgctactaccaaattctgttctgagtgaggaagcagcttggttaaaaaacaaaagccctgatatgtatatatattttttttcctgaagaataccatcaggatgaaggctatgattaatacacataattgctacaaatggcagctaactgcagaaaaccacctcccagctgttggaggaaggaaattgctgacagccactccccattgggtggctaccaaaagagaggagctcacaggagcaggagagaatacacatctccatcccacgtgacccatagagatgacccatagggctctgtcttacatgtgagctttgccataaaatggtagtgttaagagtttttagggctggggtttacagccaggctttccatggctggggctggttttataggacatgctgtcctgcagaatgaacatttagaatccctgtggcccagttggtattactgcaaaacccaggttgaatcccttcaggaggagacagatgattcttggctggtcagatttcttctctcatcctttccttgttcatttgccctattctaatgggatggggaatgcacaaacaaggaagaagctctgggttgcttcttggagtctgctttgtgacctgagctcgacccttcactttcctgggcctcagtctcttcagtctataatgtgaggtgttagactagaagatcactgtttccttaattttaagcatctgtgttacaaaacatacgtacaaagtatgtgtacatatcatattaaaatgtatataaagttatatctatatctgtctatctatcatctattctctagtttctattagcttggtgcaaaagtaattgcggtttttgccattgaaagtaatggcaaaaaccgcaattacttttgcaccaactttgtatcaattatcacctatttatctttcaacgattattcatcatctatccatccacctatctatctatttatcaatcaatcattcttatgtatctccatacccccatcttctctgtctactgttttacagttagcacccgaaaagttatttgtacttgtgttagtgttaacatgtgtctggcttaactagtcccttgttcaggtgcaggaatttatcaacatataaatcagaagacaaaaaacttcaagcctaacacacttaatgcacataagcttctccaggccaccacttacagagttgtgctatacctttttttttttttttgatgtggcaaaaacaaaacaactcagcagctaaacagatgaaaagccaagctgtgggctaaggtatgtatttgatgaagctctctcttctctagatctttagtgggaagagttttgccacttgacacatatttaccccgcaaacctacactggcaatgctaaggcagtgagcacagaacacaggcctgaagtgtgctggaagttagctgaagggcaatgtcagcgcaccagctttgaaattacatgcagcgcagtcaccgtccctctggaaaactgtgcattctgtgaatgctgactctggaagtgcacacgctgagcatcagggctggaaaacagctgagagagaatgttctcccaggagaacaaaccttagcgagcttcctccatgtgttctgtacatctgcatcatctcatttcatcttcaaacaatccatgaagtaatgcagtcttctttatatggtaggaaaactgaggatcagaaaaattaactgattttattcaaggataccctgttagttgcagccactggtggtaacattttttagtgctttggtgccaaaaaagaaaaaaagaaatttttgtgctccaaataaaagaggacttctgtagaaattaaaataaggcattattagaactttaggaattttgcttctttctttgtcctctgattattcctgtgactttatgtatgaccccttaatgcaatggctgtgttctaccagttgatttggacatgtacatagttgaccttcaaacccattactgttgcatccgagactatccccttgaggagttccatcagggagggaggagcatcgtctagaagtcagaagtctttgcctgctgttagtattctccacagagctcctcctctccctcagttgagggtcacaggatgttagagaaatcaaaagccactggacatcagggaaagattgaggagcctgttacctgtcaccttttcatttagacggccttgcttctaaaattatattctgaattttccatttattcttgctgctatagactgaatgtttttccccctcccacacccactgttcatatgttgaagccctaatccccaatgtgatggtatttgaggtaggtagggaggtaattaggtttagatgaggacatggggatagagcccccttatgggataagaaaatgattataagaagagtgctcgatatggttaagctttgtgtcccacccgaatctcatcttgaattgagattcccataatccccataatccccatgtgtcaagggagagaccaggtggaggtaattgaatcatgggggttgctccctcatactgctcttgtgatagtgagtgagttctaatgagatctgatggttttataaggggctcttgccctctttgcttggcatttctccttcctggcgccttgcaaagagggtgccttgcttcctctttgccttccaccatgattgtaaatttcctgaggtttcccaagccatgctgaaatgtgagtcaattaaacctctttcctttataaattacccagcctcaggtagttctttacagcagtagaaaaatggactaatataatgcccttagaacaagaggaagagacaagagtcttccctttttctcggccatgtgaggacacaggaagaagatggccatctacaaatcagaaagagggcactcaccaggcaccgaatctgccagcactttgatcttggacttcctagcctccagaactgtgcaaaataaatgttggctgcttaagtcacccagtctatggtattttgttacagcagcccaaactggctaagatactgtcttgtaggtgaaacagggctaggagttattttacaggcataaagttacctgtttttacactcttgagaatcaattagtgggttggtatactaatggtagggtctaaaaaaagaagaaaaacaccaaatgcatttgaagcgattccaactttgggacactttttattatttcagacaaatgcagatagaatgtttactgaggtgtctccctggccctttatgtaatatttggatagcgcaatccttagctgcatgcagataatgtgttaggcagctagaaaaataacctgcttgtactgtttctgatttattccccctcctccctcacgtctttgttcacagtaaacacatcactgcagagtagctagcaaatgaatgcctttttatcagaggtacatgcccagttggtggctacgaccacatagaacagcagatatggccaaagggggaatcactgacaaaacaggcagaccctcacccagagtggatggtgtttcttggcatctgagaatcagaatatagaggaagatgaaagcactgtcgtgtttacggtgctggaaattatattgaaactcaagtaaaataatgatgctgctgctgctgatgatgatttgttgagtgtttactataggctctgatctggcatgctttccatgtataatttcatttatactttactacaacctcaggtgagagctacagttattatattattatacctattttataggtgaggaaaccgagacatagagagtttaaataacttgcccagtgtcacataggttaagaaccaggatcaagataagagctttcctcaactacccaggaaggaccaaacaagttaagagtctccagaatttgagaggaggaattatgattctggaagttccaatctttctctccagcttcagaaggatcaaccaatattttaaaggaatgtttaatccttgtggtatgagctgttggggtaagaaagaatatgggctggggtgaagattgaatatgagccaagttcagtctcattacaggactaggaagacagagaaataccaagatctagagcattgagggatattttgatgaagctctgttggctcttgcatggtccacatgaatgcaaagcattcattttttttctagatgagaggcacaaagaaataagacagcatttttcttttttcagtaaaatccctttagttttgactgcactaattctgtattttcctaatttagtcatgttaagctaaaatttacctttataccatgtaggttgagaggaggatttataaaacaaaaagagaaagtggtcagcctattctatcggatcaaatcagtaaattactaccaatcttcactacttcaggacaattattttattcaaataacaaatacactaattacaaatgaatgtccatttttaaatcacttgcaagagtcccacacacatttaacagagtggttttcttttctttaccttatgttcttggagataataaatcaacatttccctcagaaagcatttgttaattttttattcaatcataccaatcttttgcccaattaggaggcattagtgtaattttttcccattaaattgtacataagtactgtcgtccttgtttgaataattaactttcacctagatgccctatgtgtttcggttgatgtatttgctcacttgcatctgcggtttgctgtagctttgaaactactgacactttcaagcaagatggactaatgtctctgaaatgaagctggacatttggatttgtgacagtgagcttgacacttattaccttactaataggtagtaagcatataccaaaatgatttacatagagggtattagtacctattagtaccttactacctattagtaaggtaatatgtgtcaaagatttacatagagggtatatgcttactacctgttagtgctaagacattggttctgtcagatgaggattttctgattggcaactaaggaagttatgttcataatttaaagtgaaggggtgggatgggatagagctggatcaatgccccatggtactacagagtgagtgataacttggagaatattgtccccctgctccccacccagctgccagtttgactagcctttcaaatagcattcacttgtcctcaattctcacccaagacaaaacacccatgacttggaacaataaagcaaacatatttccaaaatggccatggcagaacagtgaaaaggtactttggtatatctcatgccacatttcacagatcttctgttctgtgatggtttatggaagtgaagtactttattatgtaaaattcatcctgttttttgtttgtttgtttgtttgttttgttttgtgatactacagatccatttcactatagccaaaggacatgcgtttggggtctggggatccatcagaggattcttctctcttcttctggtcccacaaagcaatcgtgagctttagaaaggaatcctaggaaaagtgaatagtcttccactgacatctgctctttcttatagcttacaatgaatactgcctcttaaagtgtcttcttaaagtggcacaaagagagcacctctgtgagtgcagggtgattgggcacgcagtaggagaagcactcagggttagcaagtgattttcctgacacaaaaccatttgttggcaagatctgtgggagaaacattctggattttgtatttcttgacctttccgtgctttcatttggtaaactttgcaaagcagaagctttatcttaaaagttgttgtggttttgtattaagctcttttgaagtaactgatatgacttattttgctttaagacttaaagtgcaatttttaataagctggtaccatttattaattacttactaatgatcccagcacagtgctttctgtatattatgtctcttcgtctctacaaaaaaccccaggacttataaattattatttttctctaatttgcggatggctaaactgaagcttaaagagattaagtaatttgctgaaaatcacatgacttctaaggaaggttgagattctttctgactccaaagcctgagcattatttcatcactgccttcctttatacattatgtatgttaattcaatgttttcctccctctcaggctacagaactcagatttcatgagagtttagagttctagtctccagagtttttcagtaacccttctctcttttcagtagaaagggagagttgttttaaaaatggataactacttaagaaaggcctttgacaatctctaacgtgtgaaaaattctttttggccactggcttctgatgactcaaattgtcagttgacttgtttgctaacatgttttagcttccatcactcccttccacagatggcatgaagaattggccatagtagataaccatgctacagtagatgccattcatttattgccattcatttatagcaaatagccattctatagcagatgccattcatttattttattttatttttattttttgagacagagcctcactcagttgcccaggctggagtgcagtggcgtgatctcggcttactgcaacctccgcctcccaggttcaagctattctcctgcctcagcctcccaagtagctggtatttataggcacacaccaccacgcctggctaatttttgtatgtttagtagagacggggtttcaccatgttggtcaggctggtctaaaactcctgacctcaggtgatccgcccaccttggcctcccaaaatgttgggattacagtcatgcgtgagccatggcacccgggctgatgccattcatttagagtagtcattctttcatagtagacagccattctgtagtagataccattttctatagtagcactaccccttaccatccgactagaagaagaataagtaagtgattagaaataaggctcctggttatagggtttgttacccaatgaacatgatgacttgattagcgtgccctttcagcccaatgtaggattttctatggactatgattgagagcagacacctacagatttgtttgctttacatatatagctgaatagtcaaaatgctatatccacctcaaatggagtcaggataagcattatgaaaagtcagaattggcagttgctaggtgatgtaatttgagggacttcatggagcataccctccaaaaaactcttactgatgcctgaaatttcacagttatgtcttgattacattggattgagcaacagcccctcctttaaaaaatgcaaattcttctcacacagggaggtagctattatgcccctgacacactgggtgcttattaagcactcgaagcagaacagaggatgtggatggatgaggagatggaaaaagttgtgcagtgaacagtttccctgagagctggcatggcaagaggggggcggtatgcccactgcacaggggcggggccaggtgctggatcctgcacagtgggaacatgctcccctctgccatcttttgttgggaagaggctcacacagcctttccagaagagaattgcaggaccaagcaaggtgaactgggaaagagaaggatctggaagtctaggatggcaagatagattggagagcaatacacagacaacctggggaagagacctcgcctgggtctgaggtgatggggtgggagccctggctctgcatctggctagctttgtaacccagtcccacgtctactgaccccttgacttcctgttcctttgtgtgtgtgtgtgtgtgtgtgtttgtttgtttgtttgtttgtttgttttgagaaggagtctcgctgtgtcacccaggctggagtgcagtggtgcgatcttggttcactgcaacctccgcctcccaggttcaagcgattctcttgcctcagcctcctgagtagctgggactacaggcgtgtgccaccatgcccggctaatttttgtatttttagtagagacggggtttcaccttattggtcaggctggtcttgaactcctgacctcaagatccacccgccttggcctcccaaagtgttgggattacaggcgtgagccaccgcacctggtccctgttccttatctttaaaatgagggcatttgactagggacatctccaagtttccttctagttatgaagaatacatttttttaaaattgtactggaatcttatgagaaacacgagggattattctttttgcttttaagatttatccatgatagagtataagataagccatgggacttgcttctctcccaactcaccatacccaaaagatattaatcttggtaagatcccacaaccaacactatgcttttgcaagagcatccaaagttgtgattttgggttttgttttgatttcttttgttggttttttaatttagcttgtgactaatagaaaaccagaaatactaatctcttacatcaaaggaaggttactggcaacctccttgtactctccagggaggcatggttctcttggacttagcctgggttgtctgcatctgggaaggacttggacaggaaagagctaggcataggagctgaaagggaaccttcttatcttcagactgggaggacacaggttatatcctccatcagaggtgtagaagaaatgatgctcaacaatcagtcacatcctcagaacttccccaggcttgcatccctggaaagctgaagtagtctttggggcttcagagaaggcatcaattgatggatctcagtccatgtgtgtgtgaggctcaaggttacctggcaaggcagtacagggcagtagtaaagagtgagtaaaggatttggggtcagcaaaacctggttttgatcctcgatgctacctctttcaatggacaggttaccaagcctcaactcccatgtctgtagaagagactgtcacaacacttgtctctgagttgtgacggctccacacaatagtccaggcaaggaggtaagcctggtgctcagcattgaccagccatctagaattggtcattgccattattattaaacagtgcagccctatggccagtgaaaaacaacttttaaggcagcaaggcacttgcagcatccaatctggggaaccactcagaaccccggaaaggtactccagcaacacctgacccttctcagattcacttccctttacatagcttgttacgtggtgagctttaactacagtgcgcagctctcatctcttcaagggtgggaggattgcactgcaaatatgtctaaaaaggcacctgtgtcaatatagtttgtgtcatattcaacagggagagcaaaatgaaatgcatctttcacagatctgtagaaaacaatcatcatgggtgcttcctaaactccatccagagagttaaaggcatcaatcgttattattttttcccttcaaaatacatataaagaatttaaaaatacatataatttttgacttcaggaatgtatgtttgtttacaagtaattttattgcaaaatatcaagaatgttctgacctctatgtgaatggatgtacatatatctccccaaagtggtctatgtcaatgtcagataaaaagtcattcatgtatttcagatgagatggaagaggaaagcaatttgccaagtagtgatgacataaaggaatgtgcttatagggtcttcagagggctatccctgcctggagggtttttgagggtaggtaggaggccaggtggttggctcctctgttattgaaaaaaggagattgtctttcagagagcactgaggcctagagcactcttatcacttggaatgcccgtcagggctcacagagagtggagaagcattttatatatcacaagccattgcatgccataacttctccttcttttcttgtcctctttattttcccctaccagcatggctctcagatttattaacagccctttcatgccttctacagccatcaggaagagaaataaagaggtctgggagaatccaatcttctttagcttgtcctttttcactctcttagcttttttgtttgtttgtttctctttccctcccttcctccctccctcccttctctctctctctctctctctctctctctctctctctctcatttttattagactgctctgcatcaggctagagtttctttttcaatttccctcttctttcactgtttttaattgtttcagtgcctttgtttttccctagacttgagcacagtgggaaaggtcagctgtcagaagaggggctgtacacagctgataaggccttcaggagactggattggagtcatttaggcagcattctctccctgaagtcatagaggctacactgttgcagtggaaagaaaaaaagagctcaatgagtagaaaaggcaacttacatgaaatgagcagcttggctatgtgagcactaagcagtgcattacttacccagagcccttttccagaggcaggtgctgcccagtgccagctccagtgactctgggacgttgatggaaatgtgaatctggatgaggcacacatgcaggaggcttggagtaaggactcaactgggaattaggaatctaacatcctggaaatcaaagttgtcccctgttaatatatctgcttcatggttattttacaactaatgaacttatataaaaatcagaaagcctaggttctggtcttgggtatattgctaattactttgggaaagcatgaaactatactagccttgtaaaaagaagtagaaaatgtgtggtttttaaagcacttttcatagataatatctagaattcatcttcctgatatcatttgcaaagtagaagtgaggagcataccccttcttggacatggctatgaaaaccagttaattcctttttatgtaagtaccttgaggtaaacccaaagtcaaagcccttggaactcatccaaatagcctatgcaaaaattcatgatggagtgctgcagagcttttaaagaaatggtggtcatcttctggaatgggaaaaagaatagttgatatggataataccatagcattgcagagttctttttttttttttttttaagagaccaaatcttacgctgtcactcaggctggagtgcagtagtgtgatcatgactcactgcagcctcgaactcctgggctcaaacaacactcctgcctcagcctcccaagtagctgggactatagacacatgccaccgtgcccagataatctttttattttttgtagagatagggtctctttgttgcccaggctggtctggaactcctggcttcaagtgatccttctgagtcaccaggatttcaggcataagccaatatggctcagcaaattcttcatgttttcaaaacaatttttttatacttcacaataacctgatttaaggatacttcctaccataatgtacctgaaaaatatgacatgctaaaatgtgacagaactcctgttttcactgtcaacctggcacatgacaagtgttctcaataaaggtttgctgaatgaatgaataaaattattgagtgagtgggtaacttaaagccttcaagtaacacacagttaactatgtttatttggctctccctggccaaccccagtaatggttgggtacaaagaggaattggggtagataatgttggccataaaggatatgtaatctggttatattggtagttctgctgtcttgccatagaaaagggagccaaagggttttaactagagctctgtcaccttgggagaaccctcgggaaagaaccactgtccaggctagcagccacagaagccctagaagatcacacagtgaattgcttagcttctgctctcactgcagtgccttttacccaaaacaaactcttgttttggtaggagaaacaagaaggttggagttatacccaattctagcttcattctaaattcccttgtcaattattattctaattggatgaccctggacccctaaatctcagctcccctccttgaaaactgtcaataataatacctaaataggttgttgtgaagattctatgaaacattaatacaaagccagagctaaagccctgatacacaataagcttcaaaaatggtagctggcatcatcactatcatcacccccatttcaagggctctgggagtttcctggtatgaaacagtgataatgatgcttactgtttaaggttatagaattgaggagactatttgtaaagggcctcttgcgatgacaggcacgtaatagagaaaaaataagtattggctcctttctctctcctttcttctatgatgtcttcttacttttctactttagccgaggtagtggtacatcattactctttcataaagtgacacaatgtcattgaggaatgctcaaaaggccccagcagatggatgctcatagctggttgaagcagagttaggagggtagcatggaggggaaggaggaatgagcagcactcgggaatgcaagacagatcttttctgccaaacctggatgcactggaggctgccatcctaaagcttttgtgaagtttctgcctgtttctggagttatccatgtaatccttgagagaacacttctgtttgcacaaatcattccatacaacgtaattagctacttataatacagaggacacttgtgatcccaaattcaaacaattgcaaaagcaaaagcagtttattcatggtggtgtacaatgataattgataatgagctagatgactgtgaggtgctatggaatctcaaagactcttctgaattctcaaagggagttcaccttattcataggatgactttaggttagcagaaaataatgactttaaaaagtattataccataacaatgaatacattacttatattgttcatgtaattactagttcttcaaaaaccaaaatgccaaatttacaatgattagaaattaatagctaacaaaaacatcacactaactcgatgccctttatttgccaatgattctagctaatggagagtttttacttgatgtgctttattttttaccttctgacatctgatccatgtagaatgaccagccttcctggttttctaggaaccagctattttagcactaaaagtcctagtgaacttctcatttctaggcaaattgggatggctggttattctacttgaagcacctggtggacctcttttcaggacagcaccatgtttagactaacatctgactgacaactcaaaacgaaaagaatctctggttccagattatttataacttttggatcttgttgatgaagaaaatttttatgaaaaaagaaaatagagttgactacttttctatttatttaaataataacattaacaaattttgtctatccttgccatcattttataagacaggaaattacaaaaccaaaaaagtagaaaggagtagaatgtaaattttacaagggttccagagtgatgtgtttatcactatgttcccagtgcctagcagtgtgtggtgtggcatagatcctacataaatatttgttgaataaatgcacagtgcataaatttagcttttactacaaatgtactacactcttcttatttttctttctttctttcttttttttttttttttgttgtttttgagacggagtctcattctgtcacccaggctggagtgcagtggcgcgatcttggctcacggcaagctccgcctcctgggttcacgccattctcctgcctcatcttccagagtagctgggactgcaggtgcctgccacaacacccagctactttttctgtatttttagtagagacggggtttcaccgtgttagccaggatggtctcgatctcctgacctcgtggtccgcccacctcggcctcccaaagtgctgggattacagacgtgagccgctgcacccggccatttttctaaatgtattatagattgatgaaaactttcccttagaccattgcttggggatcaatagttgaaatctaagtctgtggactgtagagttttttgatagtaagtttttattgtaaattattttaatggcattctgttgtttatcctagtctcatgttcattatagttggtgtggtcaacctcccatgagataatcattcagataagaccaagtttccgggcctgtaaatcagagaatcaggttcatttaacatcctcttagatctcaacttctatcagtagcaagatacatctttgcagatacctacatggagatttcactacatctggcagggatgagccaccggtcctcattttcttaattcctggacaaggtttttgtgtattctaaccaagtattcttgcttttctttgttctgattcattcatctacaaagtgtggtcagaaaccttgaccaactgctgatatatacaaatatcacaacttctctaagtctgggatctcctaccacagttgagatatccaaatcattcacagttttgtcataactcgtggattaaaaaaatcattgataaatcatatccggtatttctgaagaggtttagaattttggtttcatggatagcataggaaatgtaaattatccatcacaaatgtctttacaagttacaaaactaaaccaatttgagtgttcatttcagagaggcttaatactctcagttttgttgtttcttttaatcacaaatcaactaaccatttccctttctgcagctaccttgcacaatccctgagcatatttctgaccttagccctctggtgtcatagctctgattctagctgtttggctttggatggggttgttggggtgttgcagcatctgtaaatggttaaaggagcattagactcaatgtatcaggctcatgcctgtaatcccagcactttggaggctgaggcggcaggatcaggaggatcaggaggatcaggtcaggagatcaagaccatcctggctaatttggtgaaaccccgtctctgctaaaaaaaaaaaatacaaaaaattagccgggcgtggtggcggctgcctgtagtcccaccttctcaggcggctgaggcaggagaatggtgtgaacccaggaggcggagcttgcagtgagccgagatcgcgccactgcactccagcctgggcgacagagcgagactccgtctcaaaaaaaaaaaaaaaaaaagtggatttccttatttatgctctcataattaagataattttagcatttatatcgtgtagtgaatatacacaattcccatgatttttttcctattgttttatgatccgtatttatatcccaaagtatatggttaatacctctaagtttttgctgaaaatctagccttgttgagcagatacaggttcctttagcagctggtgaagggtgcttatactttaaaaaatcagataatgtatgtgaaagtggtttggaatatgtgacatgctatgcaaacgtgtatttttttttttaaagaaatgaatagctcgtctcccacaggcatattattgacaggggtctttgcaaaagatacacaaacctaaataggaagcagcatgatctaatggaaagcatatagtctttggaggttaacattggcttgtattttggatctgctttcaactggaaatattagaaggatttagtcccttctgagccttagttttatcatttgaaaaatgggctagtaaaactttatttcacagggcttttgtgagggataaataagaaatatacaaagtatcctaataaaaagttctcatttcagatgaaatatgagcatgtagatatgctatctctattaataattcatttgttctgtgttgttttgaactcttgtaactttaaatcactaaaacaggttaattcttgtcaaatgctatttacatcgtgtttgtttcattgaagcataatacaggttcaataaatgttaatttcctgttctttgtatgctatagcaaaaataaaaaatcttctgatgcttaaaaagactggtaatagtcggctgggcgtagtggctcacgcatgtaatcccagcactttgggaggccgagacgggcagatcatgaggtcaggagattgagaccatcctggctaacacggtgaaaccccatctctactaaaaatataaaaaaataaaaaattaaaaaaaaaattagcctggtgtggtggcgggtgcctgtagtcctagctactcgggaggctgaggcaggagaatggcatgaacccgggaggcagagcttgcagtgagccaagatcgcgccactgcactcagcctgggctacagagcgagactctgtcaaaaaaaaaaaaaaaaagagactggtaatagcctgagatgaagaaatgacaaaaatgaaataaatactttcttctagttttatgcaccatattagtactataattgaatatgcaatcactaaagattttcttctttatttaggtttcttgaatcaggtcaccgatttttaagtctgcatccattttagagaactctccctccccactccccttcaacatatcccatcctctttcacctatccattcagattctttcatttaattatttcagaccctgggaattagcagtcccttcttgaaagcattggaatggggcagttttaatttttattagtatcagctttctcctcctcactgccatatttacttctttgggaggaaaaggaagtgcatatgtagctataaaagaagacatagcccaggtttctaggatttgcacctccgcattggcaaattttcccagtctgtgtctccaaacagggttttaatcacctgggctcttgtccttggcattgaaagctttaagagtactgcagaaatggtaaattaaccacatttaacaaaatagaaagttttcattgtgtcataaaaagccctattgatcttgttcaggcattgactccaggtccttttaacaagccactctgtctagacttgcaggctagagcccacagtgctaacaaaggaggagctgggctgccctccctccccctgcaggggaaggctaagaggatgggcacagattcaggcttctcaatggggattttcttaaagaactagcatgattttattctgctgtggaaaggaaaagcattaggagacttgtggcagatgtacctgtcacttactccagactccagccttgtttgactctctgtgtctgctgtggaactaccccatcataacagattaacgtgtcttccatatccctcagcttccagcaacatttcctcctgttgcccttaggaaggtaggctgaactctgatgccaacgcacggagcagtgggtctccagaaagagcgtggaaagcaacgatggggcaggaggaggaattggcaactttagaatcactgtgaccaactcaacttcatttcaattcaattccacaggtctttacttaacaaattctgggtaaacaggagattttgaaaaggcaagaaaaattgctgctcacagcgtatggttaaaaagttgacatccataaatcaaataaccaaagaatcattcaagatttattgggcggttagacgttttattggcagcagagatttaacttttcaaaaaatgatgaagtatttcaaacataaaacatgtagaacctatagtagaggatattgcaaacattgctttacccatcactcagattgaacaaatcttaatgttttgccatttttgctttatatctttttgtaaagacttagtcatgttcgaataccttcctggttccatttattctcttcctcctccaaagtaaccactacctgaagttgatggggagattttctgtatacatatttcttattcttgttacatacaaatagagctgtagtatcaaataattagtgatcactatatagctatgtgtatgtatgtgtatatatatataaattagtgggggtcaattttatcagcccctcatcatttatattcattattctctatatattctgggctgaaggaaggacatgttaagtaaaattctttaataccttatacttccctgttcatcacccaagcaaaacttggtaccacctctagatcccactttcctgttttaggatcagaaagcatttggctcctaaaatatctgtaggaagtttcacataatatctgattgtcttgttttctctagatacttaaaggtggggagttttaccaaaaatataatctaattgcagatttattaaggcaggaagtagattacattgtcttctaagatttcttctgatactatggtgataattgttacagagaattctttacttgttttcatcttgggctaaagagatatttgatagaaataaacattttaaagttcatatggtaaaaaattcatacttattgctttgaaatatctaaatatctgtatgagttttcccaaattctgtaaaccttcatgacttctatattattttctaaacatgtatgtgtgaatatagtgagtatctaattttggtagcaattagtgttgatatgtgtgctactgtatataaaaaacatttcagatgctctactttgggctctagattcattgtggatatttttcattattattaattttgtttgtatgaaaattatacaaaaatatacagtgttactagggacacagacctctcctctccagctctgtgtccctcctaacatttttgtccttatgaagtccacagaatgtagtgtgacagcatggcatttgctattccagtataatcgccttagttattgagtacttttgatgattctttttggtcttggccaagggtgaaaggatatgtaagtttgtgagtatgtatatattgtacaattttttttgttcaaaaacttcaaaattctatgtgaaacttatttataggaagtcaattctggttaagttctccaccatcctaattacttatatactctgtgtaacttcaggaaatgtatttttaggaaacactgtaggctagagctggctttgacattattgatatattttcttgtcattgaactcatgtggctccagatgtgcctattatccctccagtcacagtgaaagcaacccaaggaccagtttgatatcctgaatttctcctgatacttttattttggtgcctatttcaatatttgttgagcgctgaggtgacaaccataacatttccctctgatttctgaactgattgtgtaatagacataagagtcaaatcataattgtgtcaaggatccaaatatcagttctattgctggtagagttagagcatgtggcttttactgcagtaaaattgggcttctttataatttttcctttgaattaaactcagctactcagcaacagttagaagagccagaaaactgcaggccttcttccataagggcagagtttactgtggtaaggattactgcatgggactgcctaaaggagaactcacaagccttgtagaaagaaatagagtaaaaggcaggtcacctgggaatagtgactatctaattacgaaatgtagaactagggtatcagacccttactacagcaccaagcagatgaatcactgcaggagaatgaataaaggagacatggtcaaagtgttactccaaaatgatctcttctggggaatggggaggaaatgttctcgtggagtcacgggggcaggaaaatggattcccctctgtaagacggagtgcactatttgtgttcaatgcttgtttgattgactgacccataattaaaatgagaaacgaatactgaaagaagcataattacagttttgcttatatggatctggtggttgacggaaagtaaaatatacagtacattacataaattattgtaagtgggaagacaggcatgtgcagtacaattggcccaggttgtgtatttctttttttattttttatttttttagcaatatccgtcctatcttagaaatgtctcctggatccctatattacataaattattataagtgggaagacaggcagtacaattgtgtgcagtacaattggcaaacaattggctcatgttctgtgtttttttttattttttattttttagcaatatccatcctatcttaggaatgtctcctggctccctcttcacctctctagccatttgtccacccactggacccctggtacaatacaagtataattgtgccactcattagctgaatttcttctctgctaattccccatccccagtgctcaagaatgtagagaaggccccagtctgcatcttgagcctatacatgtgtccattgctctagccaccttgcacttttcaccttctcctaaatactctgtgctcttctaatgaccacaccaatggatatgctgtttcttctaattagcatttcattcctccctttgtaggtaaactattcataactcaagacacattttaagtatgacctcctgtatggaaacttctcttatgcccagggtcagttattccctcttctgtgtgcctatatcacctaccaaacccttactacactggtaattatttgcttgtgcataccttctcaacaacaatgatagctaacacttctatggctgggaactgggccaagaactttattgtattcctgcctcacagcaactctatgaaatatgtactatggttattcccattttgtagattagggaaagaagggttagagaagttaagtaataagctagagttccatagatttagataagtttcagagctggctgccaaacccgcatctgtctgattgaaagcttttctcatcacagttcataatgtaagtccactgttcaaccaggcagagtgccctgttaacatgaatccgttgtcagggcctggcacatagcaggcattcaaaattttttagctttacaatttcttttttttgtaaaatgtcagctaatgatttatacttacaaggttgccatgtgacttaagtgcattcagcactgaacacattacctggtgcatagtaggcacctgtgaatctttactttttaagtgaataaacaaaaatgtaacttttattgtaatgcagttgacagcaattcagtctttaggataccattagctttctagtgatttcagtgaagcgtggttttccaggccattcttctgtggacggaggcagcttccctcaccaggatgctggctgtttattttccaagtgacaagttgatttactattttccttctcatcactttcaagaagcatctgcaggctagtgagtgacccaggcagtgtggaaaagtctatttatttctctgctgcatctttcctacggagagtctgaggataagggttggaaatggcctcaggaggtcagatttcctgtgtattttcttttgtagtgcaggattgctcagggcgacacaatttcccgtctgctggtacactctgcttttaaaatacctgtgtgatgggatgtgtcaggtaaagaattttgttgtttgtccttgggggatggctctgcagcttgatctctcttaatgctttctttggccctaaaatacattgtaagggaaatgagacagggagagccaagagtgcagttcacttgtgcaatcttttgccttttaacacaatcattctgttcctccctaaattctagcaggaaatgtcattaagtgtacaatagaattcactccactaaaagaatttctactttcccctcacttttgcaaatatgatcatctcacagctcagcagataacttggatgtctgctcacagcttcctaagaggctcttagaggtaggtgttcctgttcagtatattggattcttagcaggttggatagtaaggaaacagacttgtagaggaacgaactcatacttgccttgttcttttgccagcaaaatactcaaattgctgttttagctcaatatacctttcagcactgagggtatatgcagcccctccatcccccaggaatgagtagaactgtgcaatcgtggacttattccctagacgtttctttctgcagttgtgtactcttttgccttggagccattacttcttttgtcattactgaggcttctttgcctggaaagcactggccagaattgggtgatctgtgagttcacgacttgagaacctccaacctctgattgcagttgcactggtggagaaggcacaatatagcccctgctgggtttgtcttcacagagagtaaatgagttcacaggctggccacaagaccacaggccatctctttgcctagcaggcaaggcaatagtagcccacgtgtttttgtgcctcattagtttccaggtgggccaggccaggatgggcagccaggttatctttgcatgaatacagactaaagtactgcactgtgctgctgtacgagaccaatttgaaggacaaaggctgcatgctacaatgagaacaatttcgctgtgtctctgaggctcatcatcaggaagctggctcccactcctttctggagctcagcaggtgttcttcacaggaccactggctacagccacttcagaggggtcagcattttaacgggctcttctaagtatctaaaaattccatttctaaggctctctgttggaggtaaagagtgttatcttctcagattggcttttttcagcttgttgttgagaatttggaaagaaagtcaacctactcccctacttgcctgctttgtttcctgctgcctaccagggctcttgtctaccattgtcagtagttttacctttcaacaggttgaacctcatgcagctgcagaatatcagatatagggtgctaggcatctgctttgggaatctgagttcctggcaaagtagtggtatggtgtagtaggaaaagcaatggaatgaaaatcatagcgttacagttttggaaatggcactccgtagtaccttgtatgacccctgtaaactctatgtgtctctatttcctcacattggtgtaatcatagtaaaatgacctcacagaacattgagaggatacaaataatgattaagaaggcatttggaaatccatgacacgtccagatgcatgtaaatacctgcttgcaaatggccctagaatccttctttatcaatgtctgacatgttttcattttcagtcctttcttgactaattctttgtctttttctgccaaattttgcctttggtctttggctttccaatgattgcatttggatcttaagtatccacactttggtttcctcctgtgttctctggcttgctgtgcctctgcctctcttaggttgttctgctaggaacttctgcttacattcttgcccagtgaagtgtaaacctcactatatccaggaactatatcaacatctaggctgaaccagttccaggcaacccctgaaaaagtagttcaaatgtatttctaaaagattatgcaatctcttaaaaatacaggttgaatccttctatccttctcagtaaaattatgcaatggttccccataacttatagaagttcaaattttttgcccttaaagcccagtttgggtttttaagacaccaagccattaggaatggcaggcctaattaaacagttgcatgcattttccccacacttcttagattgcatagtaataaaatataacactgagtattttaatctgctttggaatttctcagagaaatagagtgattattatataaattataagttgggtgtcttttagggggaaagaagtgaagaacagaattaagtaaatgcttattaatactaagtatatatcagtattgaattaatcagccatttgaaagatcagtacttcatatatcttatacaaactgatttaaaatcttgagttatacatatctagattgcatctagtgtttaatcaattggacacttacaaataatggataaatgatttgttgtcatacagagttgagctttgcttttcatgcagtgagaataatacttttcatttttacacttatgcagttgattgtaaactttgggatgatataatttaaatggatctaaacagtccattagctatgtcagtgcctcctctcttgccaagctatagttttatgctaagctgttgtgtactgtattacataatcccctgcattcattttctccacctatttagcttgaataaatacaaggtgactgcattgtctcttcaacctacttctcagtaaaaacaccaagtataaaaaacagatttttgggtgctattttgttttttctaatggaggattcaaaggattgaataaggttagaaatgcatgtttgtcactatttggttttgccccttttagttacccttactgtcaacttagtatggttttcaaggtgataagagagtggttgagtctcagctactggaaggaaattaagatagattggaggtcttagaagaaaaatcatgtcagttgtgcaagtggacaaaacaatgatttcttcaaggtcctcatttttttctccttctcctttctagcccttgatttgctcttttaaagactgggttattgggaggcagagcttgcagtgagtcgaggtcgtgccactgcactccagcctgggggacagagcgagactctgtctcaagaaaaaaagaaaaggactgggttatgcattgctagtgcctcttaccccataacatgtaggggaaaattattccatcacttgaaaatgatatacatttgcttatgtaggatacgattcagagagaagctttcagttgtctattgtttgttgaccaatggaggagatatcccaacatggtaatgctgatcttggtagcctcctctgactcagggaagaggtaaactgagaaaattcttcactggatgaaaagatggggaaggttgtgaatggttacagcaatttctgttaaatatttgcaaaggaaggcacttggccacataaaatcttcttcggtatagttgcatggagattagcataaatatgcatgtgatttgcataggccttttcttcctcacgttggttttagttcttatttatttatggtgatattctcttctctacactgatgccattttttcccctgtggcctcccacataaaagaagtgtttttgctttaaatacagatctaagggctgaaagggaaacatttcttttggtgaatgagtgattcatgtaaggtgagaggaattggtttctggctcaatttattcaaagtttgggatggtttgtcagtcaatgcacagttccatggaatcatctgtggcctttgacaagacaagtaggagcatctggaatatccagagtgatgggcaaagggaagataatgaatatttagactaagaaaagaccagacatgccccaagcccagagtaccacaaactaactgtgatgtctcaggcaactcacttatttctagtcatcaatttcttccttaataaaataagggcattaaatcaggccatctctaaaatcccttatagctctaaaatttattattttgacagactccttgctctaattatataaaaaatattaagcaccatgtagcacattaaataatatctggtgccttgctgttctgtcaaacttttcccctttgaagggtactggatgattaatttaagcttctctttataggcactactttccttgctcatttttctcagttcagtgggcacacaaggtataacttaaatgtttatagaagacacccattaatataccacttgcggtgccaaggacatgcacagtagttggctttgtggacatccatgtctgtagaaaaagagcttagttgtgataacgccatttgatttgtcaccttctactctagatcagggtcacctccaggtctcctgagcagggccttgtccaattgcattttaacaaagacgattcttcagaaatgaggggagagatcatgacaatagacagaacatttggggagtggatagaactacttcaaacacgcagacagtgttgaatttctgctttattatttttggggggctatttctgctaaaatccagtatgagttatgggctaactacttatacatgtgcaagctaccctgtgagcatttataggtgaacaggtctcttttgcttataccaatgtgtgtgcaagcagacatatgcaggtagatacatatgactgggctgctctggaacacacaagagaaacttgatctcttctttaactccctggagtatgaagctgaggctgatgttttaatgatgtcataatgctaagattaatttaacaatatgtagtgggtagaagtcttttcacattataaaatatctcctttttacagctcttactttatgatgaaaaaatattcattttgcctaagaaatttacctggggctgtaatggttaacacagatctgagttgaagtggacttggctttggttaattagcctggagtgtagttccggcagggaaaatataattctctcaaccttattttgtagcctccaatctttagagggaaactgtatacctcaactattgttgccattttcttttagtaatgaggtgcttttgatagcttttgaccaactctggtatgaagtagaccattctaagtaaggctatctggcaagaagacaaatggaaggtcataacactgtgtgtcaaaattatagatcgaatcaacaaataattaaataaaatatatttcaccctcttaccttgacaaatatacctttaaaactagttggaaagccaggctcaaatttagagtttttggattccttggagttctgcattgggaaatagcagcacaaggggaaccagccaacccctagtcctcaacccatggtctactcccttctcttcccacctttggctttgtcctatatcatgaagggtctggtatgaatgcatgtggttgccccagcctaatggagaagccttatccacatctctgcaaatagtctcccacggctactcctcagaccttgcaatatgtatggtttgcctttagaaagatggatcaagggctgggtgcagtggctcacgcctgtaatcctaacactttgggaggccaaggcaggcagatcacaaagtcaagagattgagaccatcctggccaacatggtgaaaccctgtctctactaaaaatacaaaagttagtcgggcgtgttgtcacacacctgtagtcccagctacttgggaggctgaggcaggagaatcgcttgaacccgggaggcggaggttgcagtgagccgagatcacaccactgcactccagcctggtgacagagcaagactcagaaaaaaaaaaaaaaaaaaggaaataaaaagaagaagaagaaaaaagaaagatggatccagggaagaggcctgcacaagccctgaaaaacaggcttaaggctttttgggtgggcaattacagggtcccagtctatgaaatattgtcttgaaagagtatatgggctccagtagaatgcgatcttggccccatggaactctagttctgtggggaaggatagttctgtggggaagaagagaatgccgtcctggccctgtggaactctagttctgtggccataggatagtccaaccagggtcttcaaaacaggataccctagagcagagagtcttgagtttaacagtggtattgctgtcttatcaaaacatatcaaattaattctcttcccctctccttacctgctgtatcacctgctcaggtccaacctcctacttaacaactcagccatgttccagggggcttaggactgtattatagaaaccaaagttagctgagttattgacagatgaaaatcccagccagatctttcggggtaatttatttttagttattggtcaataaaagctacctggagctagagagtcctttgtcagaacagttaattatccattctaaaccagctcttctacaagcatttaaaagcaattcctgaagcaaaagcaactcgagcctcacttgatcattttgcatgaaacctccctttaggtttttcttgagaaaattcgaaggaaaggcagcaatctcttttgcaccatcttgttttgtcttctaccctcgtgtggacacgtcgtttctctgcagtcacccctgctgctagtttccctggtgtttcgatataggacttgcagaagaattgaagggagtgctgtgttggtatcagcacaagaacggggcagtgcccctgcggtgtgttctctttggtatttgcataggtctgactcttgccagacaagtgctgattgctttcctcttttcttttcctatagctcgagaggagaatgtggccactttccgaggctcagagtatctgtgctacgacctgtctcagaacccgatccagagcagcagtgatgaaatcaccctctcctttaagacctggcagcgtaacggcctcatcctgcacacgggcaagtcggctgactatgtcaacctggctctgaaggatggtgcggtctccttggtcattaacctggggtccggggcctttgaggccattgtggagccagtgaatggaaaattcaacgacaacgcctggcatgatgtcaaagtgacacgcaacctccggcaggtaatggctgaggggagagaattcctggaaggctcatcttaggtggctgggtagtaaatttgtgaagcaggtgatgggtgtgaggtggagaggggtggagattcagggatggagatgttaacgtctaactttctcccagtctttgcaatttcacgtggaaaattattaaaatatgtttctccacatacttcaattctctctctgtgcttgttatttaagaaaaaaaaaaacaactcagttgtatagataataaaagttgtaagtactttcattccttttattctgctttcctttgatcattttcttaattacatttgaatcttatcgtattattgttaaattcaattagggactgcattttgtttctgcagcttcgtagattttcctcattctttgaatatatgtttttctttttaattaagttagccattgccacgatgccataattttaattccttccagaaaaagtcttccttttcctcttttaatttactaccctttcccaactatttttttcttttatgttaacctctagctttggaattaattagccgggatctttctgaattcctctgtttctctgttcttgatgcggtggtcctactctattgcccctgtctctccctccgagactcttcagttgactgggaggcctggaaagtggaaggacccaaataaaaaagtcaactttggagcagcctttcctggttctgtccgtgcttgggaactcccatcgcttgccgattctaagcaggcacctccgtcaggtgacaacattctcagaaagccttagccaagtgaagttgttttcaatttcatgactaataataatgataacaataataatacctcatcagctcacatcagtaaaagaaaaccgtttcctataaaaatcaaagtctgtgctgagaccgccttttccaggttgccattttcacttggtttttctatttgcgaatctgttgttaaacccagttggatggcatccaggctttattaaccagaaaacactatactttctgaagtgcttatcaaaaagtgcttaccaaattttcttctgccacatgattgatttaatgtcttctaatgtcaatgtgaaagcgtaagaaatgataggtgtctgcctacgttttctgtttgataaaagtgtaactccttacgaatactaaacaaatggtataggctggcacacatttgaaacacatttccacacttaggtatgtcaaggaagccatcctgttgggagattacatttatctcaggtaaaaatgccaaatgacacaagacttagagtccccaagcatcttgacattcatgaatctgatatttttgaatcattgttctatgtttttcctccaaggccaaagaaccctattgctaatatcttctttcgtcattcctcatccatacttacccaggagagaacgtctcaactgtcaagagaacccaaatcaaatatccatttgctaacacataagggcttgttacatgagagctgcagagactagacctaaaagtgaaatacaaccttttgctagttttgattggcaggtacaaaataacacgctttaggcattaatcagtggaggagagacttttcatgtacttcagagcacaatcaggtcatgattctcaccaatttgtttctctacctctctcccaccacccttccttaccattctggaatgattccaattctcctgtgaaaggctcacttttgtttctactaaaaacacttttctaaaatagtatcaggcacacttaagtcctttaaatggagagaggataaaccaaactgtaattcaaatattgtttgtgctgttttaatcagagcagctagaggaaaactaccctggatgtttttcccgcccctgcccttcatgttctaaggcccaactctgctctgtgcccttgggcaagccatttgacctttctccaccacagtctccatttgcaaaatggtggttacaatcttccgcagccatgtgtggtggctaaatatgcaaagcaccttatgttccagaaggattatgagctcatccatggtctaggtatagacgtgctgtgacgtgcacatgatctacaggctgagctttctgtttcaaaggtgactgcatctgtctggcaccaaggatgcagctaagtgcaattctctgttctagacagggatacagaggccctacagtattgggggtatttcttggcagagggagtattaatcttctgtgagaaagtgaacctaaaattgaacctcattgaaattctgactaaattttgcatccaaatgcaatttattgaaagaggaaaatctctgaaaagcaaagttgattttgcaaatgcaattattttaatgtgaataatataagattattattttgtccattaaaataatatttataacatctatttgagttccctgggatacatttgaatggtgggatcttcctgtctatttcaattaaactataaagagctccataaatatttgacaacaaacttatagcagccttattcatatttttggtaagattgaatggcttttatgacaaaaattcattgagtaaagtttacctggggtttcccggagtacttattaccaaatggagcagaagtctcctcatttcttccttcatgatcatctattcatggttttgcctttaagccaggtcaggaccaaggccaggtattttattgtggcttacaattaaaggaaggaatgtggactacctgtatctattgcaaactataactgggattagggaccaaggtagtgaggaatttgtgtgtttgtatgtggtagtggggtggtaattggtccttgacattgcctgagtccaaggtcatggccataactttcattgctttacctctatgtgttaacttttgttaaatcacaaacacaaaactgaggttaccagtcttccagtcttccagagggtttttctaatcatgtttaacctgccagtcttccctgctatccatacaataaattacataaaagcttgaaaagcattgttcaagaggaattgggggagagagattccaaagcattctggccaagtaaacaaattaatgaccttattgagtaataaagaagattctaattttttttgatacattctattaattctaaactgaaggaaaactgtttctctctggttgcacacatccacaaaaatgaaataggctgtagatgtttaattatctatggaaacctagagtacactacataaggcagactttctatgctaggtttgatctgtaaatgctttaagttttttcctttttgggaggatttcatgatcatttatccacattgtagtcatagtcagatgtgaaaaaagtaaaccccaaaatatttgtatttcagttctttgtatctgtttttctacatgtggaatggtacctgttggggggtctttccttttggaagaggtggaatgggtttgtgttagagggtgggaagggagtgggcggtgtccattcagaaagcccttaggaagtaagtatggtgctaattctaacgggtgaggtgtggtctgagagagatttggaagaagcagggagctgcaatggcatgtagactgcagctccttttctggctgtgccccaggtggcatggttttccatagagtcctggtctcattgtcttccccccactctctttttctgtgtcgggtgccttttttttgagaaactaacacaagatcattcatgcaatgtgtcattttactaaccgactaatgtactaacaccctaacgactcatctttgtttttagtttttttaattaacaatcgttctgttcacaatttttaatttcctttcttcccccttctccgcaaagcactcaggcatcggacacgctatggtaaacaaactacattgtctggtagatatcattcttattgtctctttttttgggtttgccgtgtgttgccccccttttcctctccaacccccccttttatcctctttagactcatttcttcttttaagattttgttacattaaatgcaagcctttctttttcttaaaaaaaaaatggaaggggatgcacttgtcctaaaaatgatatttggttgaattttgtggggaaggtttccttttctctagttttcaattttttcccccaaaaaatgctttttttttttttttttaaatctctatttggctaaatttgttttcttttgttttcttattttacaacttccaagttacatactagggacaacagagatttatagtgagaacttccttctttctgtgccttcctctccctctcactcttcctcttttctttttttctcctttcccactccttagtcccttttctctttcccttttatatggccacggctgccacaggtgatctggggaggaaagtactccacttcctagactctttcttacccttcttttactttactcccctaccgtggccaaaaggatatccaccaattatgttctccatacaaactctgcatggcatgttcctgtctcgtgaattttcctacctgcatcagaatttgtttcctcattttcctcctcattactaacaacctaccaatcatcaacccaatttcagtttcttctcttttatttttccccactcttcattctcctttcatctttcatatatttgggggttgggtttggactttttcttttcttttcttttcttttatttagtaagggaggtggcaggcagagaaaagactaccttttagttttgaatgcttttttttcacttccatcttgttcttcggtttgttcaatgcatgtaagtgtgaagtggattttgattctttccctaatttctccccaccctttcccagttttgtttttcttctgccttctctcttggttccagataatttctgcatgggtgtatcggtgtatggtgtgtgcatgctttgaggccccatcgtttctctctgccctctgctcctttcatggatgttgggtaaaagggtgctatttcttttctgtgggcattattatttttattgttttggttattattcctcatcattcattttattgttgttcttagagttgcctttttggtttgggtcatttcttctcttggaggtggtgatgggagccaagggagggtagggattggtgtcctggggcagtccatggcatgtatcatccatgaccatatcagaatcaagacccttctccttccctccctgaatgcatgtttgtcagcgtggtgtgagccaaaaaatattaataacaataaagataaaagaaaagaaaaaagaaaagaaaagaaaaaaggaaaaataaaaccatcaacaaccaaagaccaacccctaacaaatttcatcatcaaatgtcttctttgctgtttttcactaccaccatgaataacaatcatgtaagaaataaacaatcattttagcaatgaactgagacaagtgatatcgtctgaggatggttccattttctagcctgactgtgtaaagattgcaatgggtagaacaaggtgcccagcttggaaattctaacaaagtcatccatgagtctgcagggaaatactgaaggcttgagacccagggaggcagaccagaaaatggaacttggctgcacataccaaaatcaaatcaaattagaaagtatatctcatgaaaatcttaatgaaagtgatgccacaagtaggggaagccactgggttatgataggatcgtaaggtcattgttgggattttttttgtccctatgtccctccaccaggtgacaatctctgtggatggcattcttaccacgacgggctacactcaagaggactataccatgctgggctcggacgacttcttctatgtaggaggaagcccaagtaccgctgacttgcctggctcccctgtcagcaacaacttcatgggctgccttaaagaggtaaagttcacccaattctatttaatgcaccatgtgattgtttcatttataaacaaatgacatgtctaaatcaatgactggatctgtcctcaaatctatgagatgatagattgcagcagaaacaaccttgaacttggaagtaggtgtcctacgttttcattcccgcttaagctggttgcatgacttggggtttgtcactttagtactgtattagtctgtttgcatgctgctgataaagacatacccaagactgggtaatttataaagaaaagaggtttaattgatttacagttccacatatctggggaggtctcacaatcatggcagaaggcaaggaggagcaagtcacatcttacatggtggcagggaagaaaaacttgtgcagaggaactcctctttaataaaaccatcagatcttatgagacttattcactatcatgagaacagcatgggaaagacctgaccccatgatttaattacctcccactggcttcctcccactggctccctcccacgacatgtgggaattgtgggagctacaattcaagatgaaatttgggtggggacacagccaaaccatgtcaagtaccctgtagttctatttcctcatctaacaaatggaagctcttatcccacagatggctgtgtttataaattaaatgcagtcacacaggtgaaaggccattgaaatcacaaggaactagatgagtgcaaagtttgattttgtgattttgacctggcaaataggaaagctctagctaaaagtggctcaatctgttgttgtgtaccctgtctaaaatataacatatgtattattttaccttcactaagcctggtgttcccaagggtctcatagttgagacggaagaaaattcttataatgtgacattaaggctcagaagactggttttttcctttgcttcttcttcttccctgagagctagtagctgtgaaaaaacagtgggactttgccactacttgtttattaccattgtagctgatgtattgagacctctttctgagagcaaaggagcttcagccaagtgtaagttcaacctctaaggtcaattgttgaggcaaaaagaatcagactaaatttggtagagctctttcagaacactgtggcatcaaagcagtgcactgcacattttaagctaagcttcattgccgaagatatctataccatctccctggggatgttacttgagaagcaaacagtgttccttcttgtagataacaatcccttgtgacatcttatgagtctcctcttggggcatatgttttattcttactatggttatttgaaatttgttgaacatcatttgtatatgagatggcactgtccatgcattcattcatgccactgccctgtgagccttgtccaggcaggaattgtgtctgttaggcatggcacatagtagatgcataataaggatttgtttgtctatttatctgataatcattgagtaccttttttgtgctgtaactaaatttggtggctctttttaagccatgatctccatgctccaaggctttgccttgtaggaagggagatgagatcagtgagtgaataagtatagcataggagtacatgtgttcagtggcacatactaaatgctctaattgagtagaggaaacataaattttaggtggaagtcagttttagagaaggagtgacatttgaggcagtccttgttgtaataaatcatgtgcgaattgagaggaaggggtagaaaagagagacataataaaggagagaaaatccaattgtagctttgtattgttctcagcctgtaggacaaaataagaggagcacccaaagagtgctattatctctctgcaggatgttacctaggcttctgctggcttcagagatttcatcgtcatttctgatggaattatggtaggcatagagcccttcctcactgggatttactcctatttggatagaataaaggtatagactatgcactgtctagtgaaccctgaaagactcttaaacactgttaaatcacactacattggaattgcactctcatcagaaaaagactgcaacattcttgttaccaaggacatggctcaggaatgaatgaggcattggttgctgtggagtgctcattcagttttgtagtgcaacagtcctgagcatggagtctctccaggacaggatttaggtcttgcctttaggattaattttctcctacacacaattatattgagctacctctccattatatacttagagacaatggagcaatttcccaaccatgaatcttctatctattaatcaggaaggatgccctgaaaattttgaaacaagtctcataaaaacacaaaggtgtctctgatgactttatccatgtggaaacaaaagaaaataaaatacacacacacacacacacacacacacacacacatttttgctgcccagatagagagcagaaagcttcaaaagtctgtcagaatcattctgaatagcttaaaaggtaaaggcagttctgaaaaacagtgtcaataatagaaataactataatcagtgatgtcaatatatccttatcttagctagcagcacaaatatgcatttaaattcagaccaagttagaaaaaggaaagttcaaaacactaacggaaatgataggcaaagctagaacttgataaactcctgccccgtctgttttccctgtacagcgtgatagtctttctaagggactcggaagtcttcttatttgtctgagtactttgaacagatcactttgagtctaacgtagtgctggcatattatttctttgcatttaataattacacttcacttttctgtgggcaggtctatggagatacttctcttgttcttggtatttgtttttgataaatcagtaaacagcaaaggctatgttaggattcagctacctgataaaccccactcacccacttaaaccatagaacagtctttaattatttcacaatctcttcttccccttccttttcctcttgctgccttaaaaaaatcttctcttgccatttgtggctttaagttgtcctaaatgaaacaaggtgattttatgtgtaattttcttcaaattagggacatggcaaagggcctatgcaatttctgctccagatcatcaatatttctttgtgtgtggcacaaaataggttttgtctttgggactgtagttacttcacacctaaaagctaagttctggctccgtgattgtgccaaagggactggatattacttgtgtgcgtacttcctaacttcataccagtgtaaaagccacaacaaagcgtccacattgtcgtcaaactatgatggttctctacacaccttagttatcaatatgcagtttgtgtccacttaactatcatgaagtcagcatcttgttccttttcatgttttcacattttagtgtgtctgtctcatgtttgttcttgttgtatccccagctcctagaatggttcttggcacttagtggctctcagtcaatatttgctgagtgaaatcacatgattgtacattaataaatatctttcctaaatgaatgcttttaggtactattgaccacttgactttcctgggatgactaaagaacatcttgacatggcagtggttgaatctttcaagaatcttctctgcctccccctgagctatcagatatgagaaaaagattatattaaaagcctcagcaaggctaagaggaatgattggaagttcctctatgaaaaatgggttagaaaaggctatgagggagacatcatagtataatgaaaagaatactgggcttcagatcagaaaatctgcttaagaatgctagctttatcactggctatataataagaccactgatcttactccagtctcagttttctaacccataacaaggagataataaaacttctgttgcattcttaagaaaaaaatgaaatgatgtacataaaagtgaaatcatacagcattgcaaaatacaatgtttttgcttataataattattaaggattatatattgcattgtataaaatagtttacaaatagaaatgtaagtgtaagtgaatatccattaacacatggaatctctatatttctcatattagcaaatcattgtcaggaaaaaaaaccccatcattctgaggtttgccctacataaattctatcataatgcaaaaatagggataactcatcccacctgccctcaatgatgactttgttttttgcctttggtcatttatttgacactatgttttcctttattaaaatgtgaattccatgagaacagaggtcctatttgcttacaaatatttccccagcacctagagtggaccctgacattaaaaaaaatgcactcaataagtatgtctggaataaataaataaatgaatatgataacctcatggagctctgaaatctggtggagtttagatgagcaatgtgtaagtccagacagctattaaaaagtatcataggctgagtggcttataaacaacagaaatttatttgtcactgttctggaggctggaagtctaagaacagtgtgccagcctggtcaggttctggtgagggccctcttctgggttgcaaattgctgttttcttattgtgttctcacatggaaaaaagaggataagagttctctagggtcccttttataagggcaccaatcccactcatgagggaccttcatgacctgaccttcatgacctcccagaggccccacctcctaaaactgtcacattgtgggttagaatttccataaatgaactttggagaacacaaacattcagtgcatagcaaacaatatatcccccaaacctataatatgccaaggactgtgctaaaatacaaatatgagtcaaacatgtttcctgctttagaggaactcacattagtggggagaggcagacacacgcataaatgcaataaatagcagttaatgcacaacatgaggcattcttagttacaatgtggctgctgaggagaaggacctaatacatcctggggttcagggagcatcccaaggtgaggtgcttgaagccaagtagaagtgagcatggaagcatggggaaagaggtgctccaggatgaggggcagggtgagcaaaggcatggaggtagagcatgttctggtgtctgggtgaagaacttacaaacagcttgctaatttcaaggcccaaattataagactgggagctttggactggtagctgcggttaggtagggaccatttcatagaggcctttatttcatgctatacccttggactttgttctctaggtaacgggggagccattgaaggaccttatgcagcagaacatggtcagattggcatcttacccatcaggccttcattctttgaggagtaatgttaattcatctaccactttcccctgatgtatgtttttgtcctaggaagttgaagatcagggatagaaatggtggtccctcggccgagtgcggtggcttacgcctgtaatcccagaactttgggaggccaaggtgggcggatcacgaggtcgggagattgataccgtcctggctgacacggtgaaaccccatctctactaaaaatacaaaatcaaaattagctgggcgtggtggcgggcacctgtagtcccagctacttgagaggctgaggcaggagaacggtgtgaacccgggaggggcagcttgcagtgagccgagatcgcaccactgcactccagcctgggcgacagagtgagactccgtctcaaaaaaaaaaaaaaaaaaaaaaaaaaaaagaaaaggtggtcccctgagcttcggcattagattggcgcctgcctctctgaattttaacattactgcagacaactgcttccttctgactcccatttcagtttccaaaaaccctccctgagaggacatgcatttctcttttcctctgtccttggcattactgagctgttcaatgacaaatgaaatacaggaaggccaagccaagactgagttacatgagtagggtccccatcaggctactcaagcccatcacagtttcctcccacgtgttggaccttctgtgtagtttgatttggttatttccacaccatcctcttttctcctcaatctgacactcctccattttcccaagtggagaagcgaaagtgccactgagacctctgggacagactggactctctcatctctcttttctcatggcatctctaatggggaggaaggaaaagcaggagaattgggagaatagaacacatatttaaaggaaaaaggattggatagaacatcattgtgcacattacattccacatccctttgtgattattagccatttaaaaccgaatggagttttgcagccagagatagtctctgaacagatgattaatggcttaatctgtaataactttacattttatagaaccctgataggcgtccacatctggtgagccaagctatttaaggctgtgttaattctgttaattgctatacgtttatttgaattgctggcacctgcgggctttgggataatgtgtttgttgttgctttttttcttctttaaaaaaaatactcattttattttaccctgtcttgcttgctgtctcttgttgctatctctcatgctatcacttaatttcttctctggattttcttttgggttgtcctctttcttccttactcattttcctccctcttccccatctccgttccgtttttctctaattcgtttgtttcccaagctgttgttttggtagccttcctgatttctcaggtggtgataatgtctctgtccataagcaggtgaatttaggtcatagctttgggcctaaatattcctttttcctgtcatgaagactactgtgcagcgtagggctagtaaaacccaagtgaggcttttagaatcaacatgagacatgagaagagggtgggcttcagcagcacaagcccagggtttgagtcttgcctagactcattccttgctagttgcatggcttttagcaagccgcatgactgttctgagcctcggtttcttcatctataaagacagagactaatactgatttcatgtatttttatgtagggagcaaatgggattagacaaatggaggtgttttataaaatacaaaacactatacaaaggttaatgaagttgttatttatgttattaattgaaacaaaatcaattagttcaggccaaagaaccacttactgctcttcaccatttctgcaattaaaaacctgcagaagttaggagagtccaatgtagtttaattaaaaaggcctgatactgggttcagttctaatgttaattagaaaattatacaacttctctggatatccttgtcttgatctgtaaaatgaggatagtaatccctgctaatccaaatgcacactactgtagagaccttcttgtaaatgtagcatagaacacacattattgctttgggtagcaaggtaaacatcttgctgtacatctttattccattaaggaagatgtacggaaaagcactctgtgggtttggagataagagcgtcttgacagaatgggagaaccaacacaaaaggtgaccagaagaaataagagttgagcaaggtggaaagaagtgaagatgcaaatcagaggaaatggaggaacgtggcagaagaagaaaacaaaaagcaattacggcatctcaggagctaactattggcttgtcatgggctgagtgatgtcctctgcaaattcatatgttgaagttctaacctttagtttgtgactgtttttgaagatagggctttttaagaagtaattgagatcaaatgaggtcatatggataggccctcaaacaatatgattggtgtcgttataagaaggagtgataaggacatggatatacaaaggaaagaccatgtgaagacagagggagaagatagccatctacaagctaagaacagaggcttcagaagaaaccaaccttgctgaaaccttgaacttggacttctagcctcctggagtgtgagaaaataagtttcggtaaagtcaaccagtctgtggtattttgttatggcagctctagtaaattatagagcttttttatgggttgaccataaaaaaaagatggccatttttggctgggcatggtagttcacgcccataattttagcactttaggaggctgaggtgggaggattgcttgagtccaggagttggagaccagcctggtaaacttaaggagactgtgtgtgtacaaaaaacataaaaaaatttagctgggcatggtggcacacgcctgtggtcccaggtattttggagggaggtgggaggatcacttggacccgggaggttgaggctgcagtgagccaagatggtgccactgcactctagtctgggcaacagagcgagactctgtctcagaaaacaaaactgccattttttgtgtgtgaggacaaaaaaaaaaaaaaaaaagtcaaatattggcaatgtcgggtgattcaatttcagaaagaaatgtttgtaaagaggataaattgaatcttctggaaaagagatgactttctggattacaaggaattgaagtgggcaggaaagagagagagaaagaaagagagaaattggcaatgtcagtcgattagagattcccattcccctggctgtggttgttttctttataggtggactcctaatgcagtttggacccataacatacagaggcacagaggaagaaggagcgaaaccctcagctactggggacagggatacatttgaggcttatttcagtaggaaccaggtgtgaacatttagccaagcgtggctgtaaaaaagtggtatgggcctaaggaagagtgaggagcactgaggtctcaaagatctttggtgtttcggtgctgtgacagacagagagtagttcttcagttagtgccacaataaaattactaaagaaggatttgctgcttacagttgatgggttgttgatgaagaagtagatttatatatatatatatatatatatttggcaactgggtattcattctgccttcatctgatacatgtttcttgatttttattcccctcattctcaatccaatgattcagtggcacctgctccactcccagctccgttagtgagcatgtgatccctaaatcaattagagactcctaattagagactcctattcacctggtcatggtttctttcttcataggtgagctcctaaaccaatttggatccataacatacaggctcagaagttttgtctatatgttgtagggaaacagctctctcctgctttgggctagaacttggagtggtgttaaactaagcttctggccactatcttgccaccatagtgaccaaaaaggaagccaggatagagaaaatcagagccaaaagatgggaagaaactaggccttagtgacatttttgaaggccctggtttaaacagttttcaaattagactaccccttaatttccacttatggttgaataatgtacctctgttgcctaaacctgttgtggctctattttctatcatttgcagcaggaagccctaggtgatgtagcagaattcctcatgttcctattttactcctgttttttgctaacaaaaagataggtccttggacagggaaagacagacaaaagtaggaaatgtaatactggaggatcttagaaatcagataatttgctctgtattaattcaaatttcctgcctcagatgaatgctatcccaggatacagagagaatttgtaaatacaatttttgaaacctagttggtggtttttgaggaacgctagtgaataaagaaggttcctaaagactagacaattgaaaaatgtagataatgcaaacaatgaacttatgagttgaactgaaatctggataacattttggagtgcaatattaacagaatgtatgagcccatagcagagaaaagagtgatcaatataactgccatcactaattaagagcactaagaaaaagctatatcatatcaaccaaattcacatactcattcagtagtattaccgatgattcagaaaagtactatggacctcatctagctaaatagcagcaaagtttttgaagacacattttgtgatattctcattaataagatgagcaatagggtttagatgcaagagctatcaagctattaaaataccaatgggccctgattaagtggatttttttggcctatatgaaagtttttgtaagatggcacaaagctctgtcttatattaaggacttgaagagacataagagaacatggcttgttaactttgtggatggcagggacagaaaatggtagaaattgtgcatctgtgttatctgaggttgaattaatagaggtctgacctgtgcaacaaaggaggtaacagttctgcagtataatttattggttaagaaagcaggctctggagttagagtttctggctgcaaagcctaactctactcccagtagctgtatgatgctggataacatacctaaccttctgttacttattaaatgggaacaataattatacctacttgatagggctgttgtattgagatcatgcatgtaaaatagctgacatgtagaaaatgttcagcaaatgttatttattttttttctgagacagtttttttttttttttctgagacagtgtcttgctctgtcgtccaggctggagtgcagtggtgcaatctcggctcactgcaccctccaccaattctcatgcctcagtctccgaagtagctgggattacaggcatgtgccaccacacccagctaatttttgtatttttagtagagaaggggtttcaccatgttggccaggctcatctcaaactccttcaagcgatccatccacctcggcctcccaaagtgctgggattacaggcataagccactgcgccaggcccagaataagcttttaacatgacaactaattgacagattagaatatctttagagctgagctgtaaaaaaaaaaatacccaaaaaactaaggcattcaagatcctaacaacgttaagaaggcttaactaatagaaccagggtcatttaacctgagaaagtgaagatgcctgtgcccaaggtttgagagtcgtcttcatacatgaaggactgtcctatggaagtggaagaaaatgtggcccatatatccttaagaagagaaactaagtctagtgagtggaagctgggtacttaacataaggaagaactttcagtaagagctgtccaaaactgccttcaaagtaatgagttctccaacactcaaggcatccaagtagagactgggcaaccattttgctgaggttatcgaggggattctggaatcatatgagtggttttgattttatagatagatctatagatagattgattttatatgatagatctatagttctacgatgaatgacctatctgcaaagaaagaataaggctaactgattagctcaggttcatcatgtggaagactttcctcattaatctccaaatcagttggctttacatgtcccacaaacatttattgggttgcccttgtggtaagagttgaggttcccagccactatcatcacctattactcacttacaagaatttatctttactcagtcctttacttgatcatctcgaaaaccgttacaaccacagcaattataatcatagcagcaacaataaagactagcaattattgaacacttaatgtgaacacatgtgaaatgtgtgtctacatggtgctatgtacttcagacttattccctacttatttcctaatttagttctcacaaaaaagcttatgagctggattctatgatcattactaacttgaatttaaagagagcgagtgtctttcccacttacatcattctaagtgttggagttgagatgtaaatactgtcaacatcctgattttgctgccctttctaccaattcagtcataagagttagtgacgaagaaaaggaagctcctctggaaaaggttggtgattctgtgtttaaacttactgtaaggaattgtctctcactaccgcttagagtctctacttcataggaaaggtcatttaatcaggcaaaaatgttctgttgggagactagatacaattacctatttctttcaccttgccattgattgttctgagaggaaggcagtttttgcttgatttcccactttgggcaaattgatattgctcaacctgctaacggaggaatgattttcattatggtacctgagagggaagatgctgctcttagtataaatgccaagcagtgcaatagtttcgtcttgagatgggcagcacattgtttctttttgttccagcctaatattttccatgaagttggagctatttgcctttaatgccttcaaaacacccaaataaggagcagctactatttagacttattatgaattttcagtctgattttgggaatcacttacttagctttgcatttttttttcttttttgctcgtcaagataaattcagtggaactcattgctttctaaaaatgtcacttatttacagcaaatgtaatctaccacaacattcctactgagacaaaatctcttgtgtctttgaaagcctcaaaggagattaaaaaaacactagtccttgtacacatatacctacagggataaagcaatcattgagctaattaattagcttatgttttcaaaaattgttttgcaaatgcagaaacgactattccattagtgttgcggtgcttttgtaaccttgtgttctgttcctcatgtggagagtgtgccacaaatagttcctgcatagatttcaagagagatacaaggacacatttttcacttctcaaatcagtgaagatgcagcttagggcagcaacactgcacaccaattatcaaccaataaaattctcctccttccctctcccttagcttttccctcaccacccaatatcagcagatgttctatctcatactttgtagggaaaatagaaattgttcaggtaatgcttgctaagcttctctctctccaccttaagacttaccttcaaagattctcattgctaccttcttcccctcatcttacagaatgaactttcccctcctctcttgcctcttttgagatttagcccctttaaagattccctctcttaatcttcgatctcccattctcctctgctccatcccttcagctagagacatactcaaaatcacttctttgatactgtctcctgctcaatttacacctaagctcattccccactttcaatgaaaaagttcttgggagaatggtacatatttctgatgtcccctacttcatggttactctttaaccctctacatttgcatgtcagactctgaactctaggatccttagcactttagtggaattgttttcttgttttaccctgcttaagttagaagtactttattatatgctcctatagctctcagttcaaaacttcaatgcattgcaattgttattatagtcctcatcacattgcactttaacatgcactgtgttcatatgtttcctcaatagactgagcttctaagagacaagaacaaagatttatgtagattgcatattccctctgaagttaaacataggtcctgacacatgaatagatgggaaatattcttcaataaattaataagtatttgtgaacatcagtgatagaattattgttccaaagttccaatttctgcttatattcattttgtcaacagcatgccactcatttacttattcatgaatgcagtaaatattcatggaatgcctactctgtcataaaatctgttcaaagagtgggagtgtgtggtgaatgacagcatgtataaagtctatgaccctatggaattcacattacggttgaaggagactaagaataaatgcaaaacagataattcagatactttcagataatgataagtggcatgaaggaaatgaaagagaataatgggtgtattagtccattctcacactgctaataaagatatacctgagactgggtaatttataaaggaaacaggtttcattgactcacaattcagcatggctgaggaggcctcaggaaacttaccatcgtggtggaaggggaagcaaacatgtccttcttaacatggcagcagcaaggagaagtgccaagcaaaggagggaaaaagccccttataaaaccatcagatcttgtgagaacttacttagtatcatgagaacagcataagggtaaccaccgtcatgattcaattacctcccaccgggttcctctcatgacacgtggggattatgggaactacaattcaaggtgagacttgggtggggacacagccaaactgaatcaatgagatagtgagttggtctccaggagcctgagtggtcagggcaggactctttgaggatgcaataattgagacctgagatgaaagtagcactcagttacacacacaaaaccttggggagaggccattccaatccaaggaagctactaggacaaaaaggacctaaagcaaggaaagcttggcacattcaagaaaagtccaggaggcgatggtggccatggctcagtgagagaggtggtgagaggaaagaaatatctagggctggatatgttgcttttctgaaaagatccaggctaggcaatgtcaatttatcaagcttatctctgcctcagagtcttcattttccttttatcccatatctaggttgattttctctttttctttatcctcgaaagtgaggtgtccctctatctttgtaagctcacatgttactgtgctcagtcagcatctccttctctccctttcaacttccgaattactcagttattctcattctttcttgcagtatatatctatatattttttcttttaaaaattgtggtaaaaaaacacatatcccaaaatctactcccttaacacaattttaagggcatgctacagtatttttgactatattcacacggttgtacacagatctctagaacttttctcttgcacctttgatatttgcctatttgtttcttcttctcagagttaaaaacaagtgttagtctatcctttcataaaacccctctcttgacctgcactttattaagctcaggaagataaaaaatgcctctttccaggagacggtagggaaaaagccaaaacaaaatggttataaggtttgaaaaaggaaagataagaaaagcagcattggatgacccataacttctagaagccagggtgggtgcagtgtgctaaatgtgagaagaatggggcgtggttatgtagaattcaataggtttagaacagctcatactgtcattacctattcactcgagttagaaacctcaaagtgagatgtgatctttctttctcattccccttcttcctttttgccctcatttaatcaaacacaaaattcccttggcaatgccctgtatatttctgactcatctctgtcctctgcttcctggtcctttcactactgcctctccctctgcccccatagtacttcgcctatcatggtgtcatgatgagtctttccacctctgttctctctgctttctttccatgctgcattctgccccgttttgctctttgtgccattctttggaaacatccagtgcccagcaaagcatgtcttcttcagcctcccactcaaggccttctgcagtttgtcttcaacttgggtgccacctcctcatagttcctccctaaatttaaccagagtagtcttttcctattactctaaatgtatgttttaagttctttcttctataacttgtttatttggttcttctagccaagaatttctccctttctcttttctgtctgatgcttaccctttcttctagaacctagctcatggtcacctgcttgactgatcactgggttaacagtggtcttttctcacttctgaattccaagcacacttaatataatatagggtgtttcagctcagatttaggaggtagacttccaggttgaaatttttgtttttctacttactacctatgtgccttggacaagttagttagtgtctctgaaactcagtttatttatctataaaactggtatcttaatagcacttacctcagagatttcttatgaggatcaaatgagatgatgcaataaagcctttagctgaatctgtttcgtagtgagtactcaagaaatactagctattttgtcattcagttggtccttacaataccccatagccatttgttagcttttctggcttgcatacaatccctttgaaaacagagtttttgtagttacagcaatgctgtatataatatcaaattattaaagacagtggaaaagaatttatatcccccaaatgaatgtcttgactgactgtaagaaagttgctgtttctccttattacattttgaccacaattgaaatgtggtcaaaggagaccatctgccaaaggagaataattacttcttcacagacataggaaaaaaaactcactcatggataaatatgtgtgcatatgtgaaatatgaatgcagtgatttcacatttttaaaattcctggcaatcaaatgagattgtgatagattatcttttttttttctgagatgaagttttgctcttgttgcccaggctggagagcaatggtgtgatatcagctcactgcaacctctgcctcccaggttcaggtgattctcctgcctctgcctcccgagtagctgggattacaagcgcccgccaccacgcccagctaatttttttgtatatttggtagagacgggatttcaccctgttgaccaggcaggtcttgaacttctgacctcaggtgatgcacccacctcggtctcccaaagtgttgggattacaggcgtgagccaccgcgcctgaccaaattatctttcttagagtaacttttcttcatagatattaatgtaacagttcttatggatgatgtttaaaatgcttaaggaagcaaaacttagctgtaaaattgggtattgcttgatgatcaccagtgtcccattgaggtctaaaatgcttatgaagtttaaattgctttgcagtgtgttatgatctttcaattatctttaaatgattgatttaatgagcttctattattatattttaggtatggtgtttggaatgcaaagtgaactggacagtttctttcctggaagatcttatagttcaggggttgacagcattttctataaagggccaggttagtggcttctcaagtggagacaagtttgaccccaagaaatatttgacaatatctggagactcttttagttgttgaaactagggtggaggagtggttggaggggagtaaagggatattgaagggaagatgctgctggtgtgggcagaggccaagattgttggtgcactgtaggcctacaatgcacaggacagcccttcggtgacaaggaattatccagtcctgggtctcaacagtgccgaagctgagactctctggaccagacagtaagtagttttggtttaatgagccatatggtctctatcacgactatcaaactgtcattgagcatgcgagcagtcatagatactgtataaacaaataagtgtgtctgtgttctagtaaaactttatttagaagagcaggaagtgaattgaattggccccagagggttagtttgctgactcttgctatagttaaatggcaggcaaaacttgataattataatgcaacatattaaactctatctatctatctgtctgtctgtctgtctgtctgtctgtctatctatctacctacctacctagatctatctgtctacctagatagatagatcagtcaaagttttcacaggtttacaatgaagccccagataagagcacttagcctgatctgagatattagagatggtctcctgaaagagaaagaacatgaacaaaagttaaaaaaaaattttaagagtgaggagttagacaaaaacagtaattccatagagagagaatagcgtcagtaaagtcacaaaaatgcaaaatagcatgataagcatagagaactaataataagctaaaggaagtagaagtggcggtaatggtagtagtagtagtagtagtaatagtattgttcccggaaagggatcctgatccagaccccaatagagagttcttggaccaagaaaaaattcagggtgagtccataaagtgaaagcaaatttttaagagagtaaaggaatgggaataaaagaatggctactccgtaggcagagcagccctgacggctgctggttggctattttatggttgtttcttgatgatatgctaaacaagaggtatatatttattaaatacctgctaaagaccaggctctgtgctaccgtgctacacaggtagtttgattattacaggtctgaggcctgtttgtccggatgattttagttcacacccatagtgacacacgggtctcttcttgcttcattgctttttccctttttctgggaaagggaagaaagggagggcgattcctggaactgaggattcctctcctttttagaccatatagggtgtcttttaacatgctaataactataattagtgtataatgagcagtgaggatgaccagaggtcacttttgtcaccatcttggttttggtgggttttggctggcgggatttttttaaattttatgtatttatttattttttattatactgtaagttctggtttacatgtgcagaacgtacagttttgttacttgggtatacgcatatcctggtggtttgctgcacccatcaacccgtcacctacattaggtatttctcctaatgttatccctcccctagccccccaccccctgacaggccccagtgtgtgatgttcctctccctgtgtccatgtgttctcattgttcaactccctcttatgagtgagaacatgcggtgtctggttttctgattttgtgatagtttggtgagaatgatggtttccagcttcagccatgtccctgcaaaggacatgaactcatccttttttatggccgcatagtattccatggtgtatatgtgccataatttcttaatccagtctatcactgatggacatctgcgttggttccaagtccttgctattgtgaatagtgccgcaataaacatacgtgtgcatgtgtctttatcgtagaatgatttatagtcctttgggtatattggccggcttctttaccacattctgttttatcagcaaggtctttgtgacctgtatcttgtgccaacctcctttctcatcctgtgacttagaatgcctaacctgggaatgcagcccagtaggtctcagccttgttttacccagcccctattcaatatggagtttctgtagttcaaatgcctctgacagcaatagcagttaacttttattgagtgtttaccatgtgtcaggaactctaagtattttacgtgtgctaacacatttcataaacatagagctcagtgttgctggagtaatgtaaaataaggtttaagatgtgtgcatgcaccagggctagggccttatttttaggtggatataactgggtatgagaagaccaacaaggaggtaatgagtaagatttattaactgattggatgttccaggtaagggcaggaagaagccagaagtttctggtttggcaacattaattgaatgtaggtatgctggaggagaggcaggcctaatggggaaagtgctgtttttgatgggttgagtgggaagtacctgtgttaactgcagaacaaggtcaagtcaaatagctggagttgtaactgtaattagaatataagcaatagagttaaattaattgaaattgatgagatcagttaagaaaccacatcaaaaggaagaacaatgtattttaaagaagacttctaagagtaactaatatttaaaagaaggcttaaaagggaaaattagtgaggtaggagaagaactagagaaaacgttgtcatcgaagctaagaaagtaggaagtttccaggtatatggcatagtcagcagaggtcagtgccaaagagaggaccaatacgttgagaactgaaagtgccctcatagctgagaatttagacattgtaggtaatcattttgttttgcttttgaatgacagtgataatcattttcaaattcagagagaaaaaaaggcagtggaagtggaaaagctaaagatataagaaaactaaatgttgaaacaatatcccagtgaataatttcaaacttttaaaaatgtatttattaaataaagtacatataagaaatgttgctattgggtactatgctcagtatctgggtgatgggatcaattgtaccccaaacatcagcatcacacaatatatcaacctgcacatggaccctctgaaactaaaagttaaaagtataaaaataagtaaataaagtcaaacatgtgaaaaaaagaaatatttcataggctttttttcagttgctctaaatttttaaaaatacgtttatgcattttcctataatttgtgttttgcatttatattctccttttctctaattgattagctctatcattagatttaactgatacttagagtttgattggctcaccatctatttatcataatacattgaaaagtcacagttgaaaactataaaacctcaaggatgtatttatgtgtttagcaaatggaacacaaacctcatagatttgtaactttgagacaccaaagaatattgggagacacttatcaattcagttgagttcaattcagtttaaggcatttgttgaatgctatgcatttttaacagtgatatgacaggatttttctttcctttcaaagcagcttgccatcttatctgtctgtatgtttattgcataaagaatttacagcagataaagatgtagttggtgcaaaaaatatacagaacttgaaagatctaatcataaagaaatataacaaaatgctatatcatatagcagagtcagtgatacaaagcaatttgtactaaagactttgggagggagagaccaacatgaactagaatattgtgagcatctccatctaatgtttctgcctaaatgctgttcttctctagacagaactcaaccaaattactcttaacagaagaacaaatgcaagtgatgaagaaccaagggacaagcaaaggcatcaatatattgtttgctatttgaggaccaactgtatttatttatctttgtatctccagggccaggcactatggctaccatgtattaagtacatgcagtcagtgctgaattgattacttctggtcattagattagcacagctgagctgaggtagcttggaccatgtgctatgtggatgcttccctattaatgatgctaatgacaaagagaatcaggtccaagagacagtgagttgggagtacgccacctatagaggactaggagagaaaatatttttgaaagagaagactaaatgctagatgcactattaatgggaattggtcacgcccacaggactcttccctctagcataacataccgatatataaaaacatgcttgctgtgtgaccgaatgagccaatcctggcttaacatagacaaacaaaaaagaagttgccaatgccttcttcagttcagtatctcatgaaagaaatgcaaggtgaagagaaagcttaaatgaaaaaaataaagtgaaatctgtaagcctggttctcatttctaagggtttattatactggagatttcatgaaaatagtattgagaatgactactctgtgatttttgctagcttttagtccctataggcagaaaagcatttctaaaagagatttgaaaattgtggactctgataacactgctagttgtcatgtttttctctaatgaacagcttatcagtaaatgtgctcagtggttaattaccacattagagtttattggcatcaaatgtagtagaatgccgattatccttatgcaaatttggatttactgcaggttaaatcctgtgacctgaaatctaagtcacctgtcataaattaataggtccaggtactaggcctgctgggattggcagtgacaaaagaccccatgagttgggggaatgaatcaaacctgcatgggcaagattcattctttggaatgtctcacaaagcctggtgcagccaattgtgctgcagaggctgtgtggtgtttttgtgttgttttgattttgtttcattttacagggcagccaggcagtccaagcaatggttcaagccactattgatgccagcggtgtcatccatgaggtggcactggcacttggaggttataggagtcaggtggagctatatatggttccaaaacacatgtcaagtttggggtgtgggtacgaaaataaagacagattcccagatgtctccgtcagttcaggctgccctaacagaataccatagactgggtggcttaaacaacaaacatttatttctcatggttctggaggctggaaagccgaagatcaaggcctgcttcttggtctgcagatggccttctttttgtatcctcacatggtggaaagcagagatcatctctcttgtttctcttctcctaagggcgctaatcccactcatgagggctcctactcatgatctaattagaaccaaaggtcccacctccaaataccatcatgttggagatcagggcttccgtatatgaatttggggaaaatgtgaacattcagtccatggcaccttccgtaggaagtcttgtcatggcccaatctaagcaaactaaagttcacagttatctcaggttttttgaggggagtggaacgtaagacagcatatccaagaccatcatccaaaaacctatgcctatagtgggcccatgtgacagagcagatatggctgccacccagtggccacatggcagcccatagctcatgagtgctctctgggtttgcagaccgaactgcctatcagaaactgggacagaagcagctattatgcctcctgtccctgtcaggactgggtcaggaatgagggcattagggcttttgtgtgtctctcagattaaactctgctcacttgaggttaaaacaaggcagaagctggcctgagataatcaaagcctctttcaaatctatttgcttataaaggcaaggtgtttttggtgtctacaaacttctaacacatttgtaggcactgattattctgcaaataatgggggacctttctgaagccctggatccctggccaatgcaccctactccaagcacattgaaatttttaacaaaatttttaataaaattgagagatccttggcatctcaagaacaggaaaatcattacttcttcaaatgaatcattggtgctcataagggaaaagtctttcatgcctagggcatgtatccagataattttggtggggaataacatttcttaccacattgtgagtgtttatgtggctggggcaaaagaagttgtggtttcggtgctgatccattagcagtgagtgtggtaggtgaaagttccttaattgttccccagagtaaaaacatcccagtatttatagactattaggggagagggggttggagaggcaggtgacttttcagccctacactgatgacttttatgtcttccaggtcacattaaaatgttttgcttgaattagaataaaagtagtcctttttgtccactctaaattcagtgtcttggttgaaagtatccacagaaaacattcctcagtcttcataatttcccatttacaatagagaagcaaggctctctgtacttaagaatagtacaagctattttagatgtcagatgtagtctaagaatgattgagtcaacaaaggagcatgaagacagtgatgagttctccacacagcaggtgctcagtgtagggtgataaagaactagaatggcagctaagtaggtggcaccagactctgaagaagcacttagtcattgtctagaatgtgccagaccaagtgcagttttaaagctctctctggtctccttgtcctgtgaacagacataaggcctaaataagaggcagaattgggaggctttttctttgcacctcaccttccttaccacctggccttctaggcattggagacagaagagaatctcccacatgcaaatcagcccccaggtcatcttatagcaacaaaagcctgggcaagaattaataaagaaatgagtggaatctaaaagtctctaaacataaagaaatacctgtaagatgtctcttctgagagcccattatatagaaaggagtcaaaggaagaagagaagccaagtgcatggatccaggagagtaactggtccagtgcatttctgtttaccatacctttattcctctaaattttttcagcagttctggagtagctccattagatccttgatgagttaattttgccctagatcaatttcaaagcttaaggatacagtgagaagagaaggtttgaaataccttagggaaattacaggatcaaataaattttattattatgccagctcagacagattggtagtgttgggaaagattctagtgtcacaggaaacaactatcctgaagtttctatggcgtcttctgggccatattttaaaatttgactattcaggcatacctcattttattgctctttaccttcttgcacttttgagttattgaattttcttttttcaaatggaagttttgccgccaccttgcatcaagcattttccaacagcgtgtgctgacttcatgtctctgtgttgcattttggtaattcttgaaacttattattatatttgtcaatggtaatctatgattagttatcttcgatgttactattgtaattgttttggggtgccatcacccatgcccatgtagaatgttcatagataaatgttgcatgggttctgactgttccaccaaccagctgttcctccagccttctccctcccttcaggtttccctattctctttgatacaataatattgacattaggccaattaatagccctactgtggcctccaagtgctcaagtagaaagaaagagttgcacatttctcgctttaaatcaaaagctaaaaattaataagtttagtgagaaaggcatatctaaagttaagataggctgaaagctaggccttttaggcctagctgtaaaggcctaaaagttagccaagctgtaaaggcaaaagaaaagttcttgaaggaaattaaaagtgggcacatgaatgataagaaagtaaaacagatattgctgatatgcagaaagttttactgctctaggtggaagatcaaaccagccacacatttccttaatccagagcctaatccagagcaatgccctaatgcttgagttttatgaaggctgagagaggtgaggaagctgcagaagaaaggtttgaaattagtaaaggttagttcaaaaaagccatctccataacataatagtgcaaattgaagcagcaagtgctgatatagaacctgcagcaagttatccagaagatctaggtaagatcattgatgaagatggctacactaaccaacatattttcaatgtagataaaaagccttctattggataagaaaccatctaggactttcatagctggagagggaaagtcagtgcctggctttagaggacaggctaaactctcttttttgaatctaatatagctggtgactttaagttgaaaccaatgctcatttgccattctgaaaatcctagggccctaagaattatgctgaatctactctgcctgtactctgtaagttgaacaacaaagtctggatgagagcccatctgtttacagcatggtttactgaatatttcaagccaatttttgagacctactactcagaaaacaaagtattttatgtaaaaatattactgttcatcgacaatgcacttagttaccaaagagctttgataaaaatgttcactaagattaatatttttatgcctgctaacacaacatcattctgcagctcaaggagtaatttagacttttaagccttattatttaagaaatacagtttgtaaggctatagcttccatagatagtgatttctctgatggatcacaaagccttttagaaaggattcaccattctagatgccattatgaacatttgtgattaatgaggaaaggtcaaaatatcaacattaacaggaatttggaagaagttgattccagctctcatggatgactttgaggtttggaagaagttgatcacaaccctcatggatgactttgaggagttcaagacttcagtggaggaagtaactgcagatgtggtgaaaataggaaaaaaaaaaaccctggaaggagagcttaggatatgactaaattgatgcaatctcatgataaaacttgtatggatgaggagttgcttcttatggatttgcaataaaagagcagtttcttgagatggaatccactcttggtaaagatgctgtggacaatgttgaaacgacaacaaaggacttagaatattacataacttaattggtaaaggaatgataaggtttgagaagattgactccaattttgtaagaagttcagctgaaggtaaaatgctgtcaaacagcattacatgctacaaagaaatcttttgtgaaaggaagagtcaatcaatgtggcaaacttcgttgttgttttattttaggaaattgcacagccaccccaacattcagtaaccactagcctgatcagtggttatcaaaactgaggcagaccctacaccagcaaaaagattacatctcactgaaggctgtcaacttagatgactgttagcattttttttaacaataaagtgattttaattaaggtttgtacattgtgtttttagacataatgctattacacacttaataggctacagtatagtgtaaacataatttttgtatgcaccaggaaatgaaaaaacatttgtgtaactcactttattgtgatagtctctttattgcagtggtctgtcactgaacccacaatattaatatttttgagatatatctgtatgtgtttatgtccttaagcaatatatattacactttgagtgttcaaaatttatataaatggtatcatactgtgcatatctgtacagcttactttttaaacataatgttttgtctatgttgataagatttatctatgttgatttcattcattcatattaactgttacttcatgctccatacttttttttttttttgtagagacagggtttcactgtgttgcccaggctagtcttgaactcccgggctcaagcaattgactcagcttccctaagtgattggagctaaaattatctcccaccacacccagctactccagtatattttcatccacagttgtgccagagtttatctagtacatatacctagaagtgcagtttcctgctaggtcataagctggatgtttataactttactaggtattgccaaattgctttccaaagtgatgtacaaattcacactcccaccagcagaatataaatattccagtttccttgcatccttgacagtttttggtattgccaataaatcaaataatgtagtataaaccaactcaatatagtgtaagccagatttaccctgtaaaacatatgcctaaagttcccattttaaggtccttgtttctactgagaatccagaggcctcaaaggtgcatatattgcacattacctccctcatttcctattctactaagccccagtgagtggccttccctgcaggtgtcagcttggagctggtctcttctttattagcaccaagttgctgtcttttaaatttagaactgttgtagttcttctagtcctgcagaatttcattactctggcctcaattgctcacatgtaccatctttcaaaaatgtcaggatagatgagaagatcacagggccatactctccttcagacgataaagcaaaacacaaccaaaccctcaaagcagatatgattactgcagcaacaggaaataaaggcacaaaaattgttataaatgattgttttcatagaaaaaaagtattaccaaaatacattcattttttacccactgtaggcttccctctttggaggcattgattagtagatacgaaatccttatcttctctctagagtttgaaatgtataattaacaatggagtctgccagatcaacaattctcatcacagaatgtcctgtgttttagtctttgtggaccatatggttgatctaccttatcattgttattagtgtggacccttttttgtgttagtctttttcttacattttctacaatagttaaacaaaatatttatttttgttgttatatgattttaaaaaccttatattattcagcttagcctgaaagcccaactgtgcaacagaaaatggctcttctcttaattaattaatttcaatttgatgaattaactttaataacatgctaatgtatagaaagctactaaatttttcagaataagtgtattgaaatttctcttccaagagtgatgccagctttgcttcctttatttgtgagtgggaagtgaggtttaatgctacaatggccttctagaaaccctgaagcagtagtttgacaaggatggaaacgttgagatcattgaattattgagcttgaataaacttctgagcattcattgattaatttatcaaataaccatgtattaaacacttccatatgtcaggcactgtgctaagtgttggagataaaatgatgatcagggagaagatatccttctcctggttcaaatccgttgtctagttttcatcagcttttgagtcaatataatgtttaaggacatgagattctacagccaaatagaaggatttctattgctctttggttttgacatttaacttgaaaagtaacactaataatgactaatctataatctaagattatataagtatatgtataattacatataattacatattttatattgtgtatatatgcatatacatggatggaactggaggccattatccttaccaaaccaacacaggaacagaaaaccaaatactgcatattcttatttataagtgggagctaaatgatgagaacacatggacacatagaaggaaacacacactggggcctgtaggaagacagagggtgggaagagggagaggatcatcaaaaataactaatgagtgctaggcttaatacttggtgatgaaataatctgtacaacaaatccccatgacacaagtttacctacgtaacaaacctgcacttgtacccctgaagttaaaagttaaataaagaaaagaagcaccttttctatttattactgaaaaaatacatattgtaaaccttaaaaaataagagacgacaggttcttgagcagaaactgtgattcagaattttggattggctgcacttgaaatactaacataaagactggttttgccagtggaatctgagtttggaatttgactcctttttttcctgctactcccttccccagcttgtacatgaatgcagtcttctagctcatttaaattagttctttaacttatagcaactgaaagtagagtggtttgattttatcaactggaacaaacaactcaacagtttttgtagtttttgtctgttgctgtccctctccttttcagatgtcattaagtgactttcctgggcttaagagtctaccctgaggacctcaatactctggtttctgcccaagttgtctggtctacctcctgaactagcatgtctacaatctgaggaaatgcaccctaaattgataccctgatattttcagtgggctatggattggcaggaagagaccataaacacacactttatttaatttctgagttaattatccagggataaaagtattatcagaaacatggtggctacacaggaaagcaacagatgtagtattcactaaaacagcttcatttggtacccagagtccttcatagcagcaagcagctgatagagacactccatttgggggttgagtccttccaaatctttctggaaagctcaattctttctatgacacagtcttatgtgcttggggcttatgtcacattctaaaataattgacattgacaatcgatgcatgcccatttaaaggattgtttttgaacactggaatctgtcagttcttaatgcaaatgtagcatagcaaggccacatcttcttctggagcgggagttagaatccacgtgcagatgttctggacaaatggctttgcttccagatttgcaaaatgttcttgaaaacccttatccctataggcacagataccataagagaaaaaatagaaataagtaggaatcgggattgggatttgcttgaatctttacagcaagaccctctccatattttcagttttcaaaatcagtgaaatacttcagatcagtggtttgtaaattgctctgtggagacctcagattctttgataatgccagaggaggaaacataagtatttttcgtttgttaggacctcaatcattcctggataatgaattttcagaggggaatggacttggtttattttatagactgtttgagcctaaaggaaaatgactacacctcccaaagcagatgactaattttcagaaattgttttttggaaaagtgggtctcctttttaatttcccattcgcaccccatgtatgttctcttatcagtgaaggagatgagaagccactctggggaaaagacacgtagaagatcaagaaagctcttttcctcattgcgtgattgatactcggttttgttttttttgttgttgttgctgttgttttatgggagtcttgctctgttgtcaggctggagtccagtggcacaacctcggcccactgcaacctctgcctcccgggttcaagcaattctcctgcctcagcctctccagtagcagcgattacaggcgagcgccaccatgcccggctaatttttgtatttttagtagagatgcggtttcaccatgttggccaggatgatctcgatctcttgaccttgtgatccacctgcctcggcctcccaaagtgctgggattacaggcgtgagccaccacacctggccgattgatacttttttgttggttcattccagtgctgaaaattgggctggatttgccaaaacaaatctgaaactggctttctatgcctgtggattctgttcctattgtctgtccattcactgttctgtttagttcatggattaagactgtcagcatcacgaagtatcagcagtaggatgtttggtgcagggaagatgtgagcacctgcatatcttccctgcaccaaacatctgatactttttttttttgaggaaataaaagccccaaggaaccaagtacgacactttgacagtcattgggctttttgagcctgggccttgttaaggcagctgcctgtaccgttgtggaatcacttcagctactgtctagtcctcagtgctacagcctcagggcattgattttagctaataatagtggtcaacattaattgagcatttactatatgctaaacagtgtcctaagtgcttacttgtaggaactaattcagtcctcgcagtaactctaggagacagatactacactgtcattgtggatgggatggggtttgggtggggaattggggtggggcttgttggggaaagaatctaaagcacaaagatagctttcccaaggccatgctgctgatttgggtttggaactgggattaaaatccacattctcatgggttccaagcccatggttatagtcagtcattatgttccacttcctcactagctcttcatcaagtattatcagaaagcaaggaattatttttcagactagcagaaatttactagtgacttagtaatatgtcagaatgtcatggtagaaaatcattccagagctttgctgtttagtacagtagccacaatccacatctggctgctgagcacttgaaatgtgcctggtctgaattgaggtgtgttttacgtttaaaatcacactgtatattgaagacttaataccaaaaaaagtgaaagatcttagaaaaagtttcttatgttgattatatgttgaaatgataaaattttggatatattaggttaagtaaaatgtattattaaaactaacatcactggcttctttttacttttaaaaaatgtagccactagaaaatttataattacatatgccacttattttatattgctattggacattattctagagaattaaaaatgtgcaaattatccacagccatttcctcatacctgtgacactcagtcattcatccgaattagcttgtggtcagtttgaggcagtttgtctaacgtttgagttacgagatcagagcaagaggtgctggtccattttagacgtgctttatttagtttgtagaaaaacacactgaaccatcctattccgctacagagtgccccagcttcacaaagcagaatatggaagggtagactagtgaaaataagtaaatacagataaataggttatgacatgtagttgagattcagataagtggagcaagattccgcagattgcactgtattagtgacagtgagtgtattctaagagaggagaggatctttatgtgtggtaaaagtagctggggaccaagttgttgagaattttgtatgtcaggaaaaggaatgcatttggagtgacaaacttttgtcactttccaaagactccttttagaattctttattgatcaatagaatattttgtcgtgacttacttcataatttatgatatgttaaaatttccaaattttctgtttattttatgttagttacatcttagattgatgattccctggtggaatttggaaagacatcttaatcacaccagcagtatttatgtaaaccatttttaaggatggtttacttcttagttaactctaaaggaaggataatgtcatctattgaataaagattctcacttttctacttggagatcatattgtcttcttaaatctttgtcccttaggctttgataatggactacatctcatctgggggcctctcttctctgactgtattaaccatacttatcttggagttgaaagaccttggaaggaagccaggatctaacagtcagggtctatggatctttggcaagtattacaggcaggccctggatgtgtggagtaacagaggcctctaacgagggggcacaatagggttggcttatgtggacattacattctgaaattggcacatgaggttaaaaaatgcttataatcaaatttggcctggataaggcttttaaactactcctaaattagacgcttgaaagctccaaagccaggatttagcattgttgattttgctttgtatttcttctgagacacccctttccaggagacacggaagtcaggtctacttggaatgaggaaaagggttatgtggtaaatagaaaattctcagtccaggcacaatggctcacacctgtaatcccagcattttgggaggctgaggcaggagggtcactcaaggtcaggagttcaagaccagctgggcaacatagtgagtccccatttctacaaaattagctgggcatggtggaatacacctgtagtcccagctacttaggaggctgaggcaggagggtccattgagcccacaagttcgaggctgcagtgacccatgattgtatcactatacttcagtttgggagacagagcaagaccttgtctcaaaaacaacaacaaaatatcctactccctctcattttttccccaagagtattgaaagctgaatttgtgtaagttatacataaatatcatgcaacttcattgtactgcttattttcctaataagttaattgacttgtattatgctttacatattttgggcttgttacttgtttgtgcctaatgtatgaaaggcagctagaacctatctttctaaactgaagagctctaaatctggttagggaaatagacaagtaaatcaagggttataatgcaaattaagaagtactttaacaaggcctttcctcagtgctttaggaccacagaggaggagccattaaagtgatctgggcatgagtaaaggctgtatgtgacatcctagcctaagctaccatcatttctcattgcattggtgcaacaactttctaaatgctttctctgtttctgtttttgcccctggatctccctctctcccaagtctatagctccctagcagctgcagtattcctcttaaaaatgtaagaggcacatatgctcctatctactcaaaaccctccagtggctttccatcttgctcagaatcagagctcaagttctaaaaggcctataagaccttgtacaatctggcccttgctgcctctctatcctcatctccaatgtgcacctcctcattcaccctgatgcagccacaccaatctccttgatgttctttgaacatgctgttcacatgactgctcaagacttttgtccttactgtagtctgtctgcttggaattgtcattactcaaatgtctgtatggcttgttctctcatgtttccaaagctctgaagaaatgtcacttttttttttttttttttttgagatggagcttcactcttgttgcccaggatggagtgcaatggcatgatctcagcccaccacaacctccacctcctgggttcaagcgattctcctgccttagcctcttgagtagctgggattacaggcatgcaccaccatgtcagctaatgtttttctttcttttttttttttttttgtatttagtaaagcctgggtttcacagtgttaggctgatctcgaactcctgacctcaggtgatccacccacctcggcctcccaaagtgctgggattacaggcgtgtgccaccgcacccggccatgtcacagttttataggcctttcctgactaccctgtacaaataaaaacaagaataagcctccaccctatcctagcactccttcttccgtttagcttgtccatcaccatctaacatgccgtaaattcacttctttatttgccccatccccttagattttaaagttcatgaaagtaaaactgcatctgtgtcatctactttggaacagttcctggcacttagtattttaattcaatacatgtttgttgaatgaataacttacttttctctctggcatggcttccacatttatttgcctaatgagtggatcgataaatgaatgatgactatattctcttggcactagcagaatctgttatttcccaatgtaccatttctctgaaataactttacagttctttattggaacaaaagactttatcaggacttgtcaggagctcttggattctgccaagacagcatctcactcacagatggaaattgccattaattgtctgctttgatggtggagcacaacattggaaaagaagacgcctcctggaaagcaggttttgccattggtgagagagaataagagtgaattgggctggccacagcctccctcatattgagaaacccaattggtaatactcagctagcatacagattagtaatgtgtgagtgtctgcatgtgtgtgcatgcttccgtgtttatatattaccagtgtatgtgcgtacctttgtatatatgagtaaaaatatatatgaagtaaaaaatcaaaatctaataactcaaaatccaaagacttgaacaccccaagggaacactgaagtctcagcagaacccttgatgcttgggaaagtagaaatatagggaaggtttgcataattccctgtgttcacttctagctcactgaatgtgactttctgctgagcctaagcatacagcaatgaataacaacaatagtaacaacatgaggggtccctgctttcatagagcttgcattctagtaagtggggcaaaaagcaagcaaagaaatctaagttatatatggtggtataaatgctatgaggagaggaaataaagcacaatgagggagaagatgatggagtgcattttagaaatgggaattgatagaatctgggatttgcttgacaaaaagttgaaggagaagcagatgcaaagacctgagattcaggtgcttgttgaattcaagggacatgaaaaagaacaaattagggaaggtcaagttatataaagcctttaagccatggtaagaagtttggattttattctggttacaatgaaaaagccatcaagcgctatttagcaagggagtgactggtctgaattaggaaaacccccctggctgttctatggagggtggagtatggtgtgtgctagaagagacagaagatacatagatggctgttactgcaacccagggaggaaacatagcaatgtggattagagtagaagtgatgggaattgtaagtagatgagtgtgggatatattttggaggtagagtcaacaggatttattgatgaattgtacattgagtatgcgaggtgagtaactgaggataactttattagtcaagataagctaggctgtgttgtggcaacaaactgttccaaaatctcagaggcttaacacaaaagaggtttatttctcagtaatttgtatatccctgtgttttggctggtggctttgctttgtttattattgttcttactctaggacatgggatggcagggtaaccactaactggaacattgctggttgacattgaaaagggataaataaaatttaaagggtttcaccctgggagtgattaagcatttggcctcgacatgacacataacacttctgctcaaactaattggccagaagtaatcatatggctccatcctgcacaaggggccgataaatacaatcctgtcttgtgccaggagacaaaggactagagcctactcagacagcaacaccaatgactctatagtatcttcctggtttgaataactgttaatggcattatccaagtgcagatatttgaaaggaatgagctggggggatgtgaaatccatatttcttttttagccttttttagtttaaaagcctattgagtggagatgtcaagaagacacttggagatatgattcttaagatcggagaaaatctaggggtagagaaataaatttgagcatccacaacatgaatatgacacttaaagtatcaggacttataggtacctgttgagaaccctcaagttctatctttggattcctataaagaaggaattcctatagagaaggaatccaaagacagaacatgagggctctcaacaggtagagatcttacagagagaaaaccaacaaaggaaataaaaagagagaggttctcatggtagatagaaacacaagagagtattgaatcttaaaaggcctcaagaagtaagtattgcaagaaaaagggaatgctgagaggtcaaggaaaatgagatttaattattggatctggcaagctattgaccattttactggtttggtataaagaagaggctaatttaaagggggctgagaagagaatggtaagtgtggaattgatgaaaatggtcatagacaacttttggaagagttttgctgtaatcatagcagtaaagtggggtcagtagtgaaaagggacatggtgtcaagaagataggtggtcaggaaagggagcaggtttgtgggccagatgatggttttgtcttttgaaatatgctgacctgataaaaaggtattcaaatgaaaagcattcagatattagttggagatataagtcagacatagagaaaaaccagtgccagcataaacatggaggagccctcttcatagagaaaagagaacagggaacacagatgggctctgataggaaaagtatagagaaaaaagattgagcgctcacattaataaaatcaggagaaaaaagcagattatgtcctagaaatcaaggaaagaaagtttaaatacctttgcaagaggtttttcttcactttctatgttcctggaaatatgtagtctatattctgtactctctggccaaatttgaaggggatagtactgtagctgattaaatatataatctaagaactgtggaataaagataggattaaaggttttttaaatctcaaatcagtggggttgatgctctttgtgtttctgttctttttgttattgttttctcttgttattttgaaatttctctaaaaactacttaaaagtatagttagtgccatactcatcgttgtatttttcttcttttttacctcctcctcctccttcatcaccatcttcactaatgattatcactagcaaaataatcatcaccatcagacttcattaaattaactattttggtattttaataattcagagctatttttcataatttggttagaactactgaggggcattcattttagtataatagaacatttttatagcacttcttgttatttgagtacttattaaatgcttactttaaacatgggcataatttctgccctaagtccttttcagttaaatttcctaggaaagatacaagagttccaggatggaaaagaagtgctcagagggaatacaagagattaagaccacaaatatatggtatcactagaataatttggcagaggtttatttctatttaggttagttggctataataaacatatgtagataaatagtataggaatatagtacagggtaaaatggtgactcaatatcttaatatcaaatgaaaaatgggctgcttcctccttctaggctggaataatgtactattattgacaccccttctctggagtataatttggcttagttctggtggtctgttgagtggcttggtctcactctctttctctctctctctctctctcaacctctctcccctctcccccttcctcctctttctctctgcccttccttctggctgtccatccttctctccctcctccgctcctccccactatctctcacttctccaactcagttctttctatcagtgtcttgacatctaactagttaccctagagacctcaaagcaattattctttccttaaacattctttcaaaacccagtcgttccttaggcatattgacttgaatcatgtctatctttgccattgctaccttcttagttctaatattcatcattattttctgggttacctccatggcatcctaacttgtgcctgcctcttttgttttattccactccaatgatccctcctattcacatgcctctcctccaaccttctcccatcttagttattgtgcttaagaaaattatggatcatagaccaagtataggatagcagtgtgaggaagtagattgaaggagggagacataggagttggagttagaactagttcggaagttagattgtacttgtcaatgagagacttaatccagattccatctctctaggacagaatagaccatttctatctacatggagtatcccttacatgatatccatatttctctcttaacatcattgtacacatatgtttacatgtgtaacacttctactaaattgtaagctccttaaggtcagagaccatgtcctaacattcagtaagctctccatggttgtttgttgagtaaacaaataaaatatggtcttaaatagaaccagtgtcagaaggaatagggtggagaaaatgaatataaaaaagattggatatggaattaaatggacttagtaaaatattaattctgggacaatgaagagagaaggttcagatatatctacacaaatttgagcttaggtgaccattaacagaaataaggaagttgggaggaggaaccgatgagtttgcttttaggcaggttgattttaaagttctgtagagaattttaattttaggtggatgaattgttccagcagacaattcagatttgaagcctgaagctttggagggagttttggtctagaagtaaagatgtgttagtgagtgaaattaccaagacaccgcagtgaaaacaggaaagagagccttcatcagatgcgtgggggaagcctctttttaagaaatttggaaaaggagctgacagaaaatgagtctgaaaatgagaggcagaaatgagtcatcaaagagttacttggaaagtgtacagtcaggaaacccaggaaaagaggatgttgaggaaggagtgagagaaatgccagctattgcacagatattgcatattatgagaatggaggcctatataaatttgagtagtagaacatcagtaatattattttagaattatttgctcttgggttaaatatgttttctcttaggaagcaactaagttaaaacacgatatttagagtgctgcagagacaaggttgtaaaaattctctcctatatcatcggtggttgaataaaattcctttattggtttttcttggaactgtaccctctagccaaacagcccagtggaatccagtgatagaagccaaagaaataaaagctaagtgtctcaatttatcctgttgtcactttcagctttctctgctcattattagataccaagataagcaatagatttaggttttttgatggaattctagtggatgccttggctctctttgtcctggatctagggacactctagtcagattctcaaattttttcttttttcttttttgcacattcatggcttgaataagggtaagagagcccgggatagatgctaacaatctttcagattgttatctgaaatagatatcttgagatatgctgttagtattttcttcaaggcatgccatgttgttagcattttcttcaaggcagcccatgattaggccagaggaggaggatgccgctattcacttctaacctccatccttgaattatggtaaatacagaagatgcttgctggtcagaagagagttgactcattatgtcaggtagtaaaccaaaaattttctccctttatgatgaaagaaaacgcagataaaagcatgaccaataaacaagccataagaatggggaaaacagtgatgacacggggttagtgctatagaagttcccagaaaggtgtttgaaaactctgggcctataaatttaattatgtactattatttactaatattatatactaatatttactttgtttggaggtagaaacgctttactatccacttgtctttagtgtgaacactttcttaggaagcattaatgaaacacctaatactacctgcttccatggcagtccaaaattaagctctaaagattgaggagtcagaggtaaaggtcggtaggtttttctgtggtcttgacttcttctcaagatatctatttgatttccagtaataggaagtggctcccaattacatctattcccagggtccctccctattctcttgtcatcttgatttcagtttggcctgattagatggtactaagttttctatatggtaatttatattacaagaaaaattggtaaatggtgggatactgcttcaaatctgcagcaatataggtaggtgtctttggtgaggttttgtttgcaattataggattccctagatggggactctttcatgaaaaatcataacagcaagtggttgaataaaggttatttctagactgttttctccagactaattagagtagtacaagggccaaccatacagcctcatagtttcaagggtgctttgggagtcagatggacttgagtttaaatcttgcctctgccacataaaagctttgtgagcttggacaagtcatttacttctctcagcctcagttttctcatctgtaaaatgagataattatggcatcttatagaattgttgcgataatttcagatagtctaaatataaagcatttggcaggccaggcgcagtggctcacgcctgtaatcccagcactttgggaggccgaggtgggtggatcatgtgaggtcatgagttcaagacgagcctggccaacatagtgaaatcccgtctctactaataatacaaatattagctgagtgtgtggtggcacacgtctgcagtcccagctactcaggaggctgaggcaggagaattccttgaactcaggaggtgggggttgcagtgagccgagatcatgccactgcattccagcccaggcaacagagcgagactccatctcaaaaacaaaacaaaacaaaacaaacaaacaaaaataaagaaataaagcatttggcacagttcttggcacttagtatctagccttcattattagtcttagatggaaaactggatgcctcaatagacctggccaggacagcattcccacagtctccatcaagtcagcaagctttatcagctttatctctgatatttctttctagacagttcctctcctttttcatcattaccactactgctgtagacctgggcactaccttctcttagttggattttttggtaatacttatacacggttgccatgtagttctcataaaacttgttttgttttgttttgttttttcccccactgctcaaatacctgctctagatccctggtcctcagctttgtacttaagactatgatttggtatgagccagttttatcaatttaatcatctattttttattttcttcacgcatttctccccaaacacacatatcatccccaagccaataataattcctttcaaagtactttttgtacttttggtcttatgtatgtcatgttgcaatagcttttcaagttgattttcgtgtgtgtgtgtgtgtgtgtgtgtgtgtgtgtgtgtgtgtgtgtgtgtgtgtgtgttctcttgctttcttttagttcattccctatgtgaccaccagattaatcttttatataataccaacctgacctcgtcactcttctgaaccagagcgatttcctagtgcctttaggatcaagttaaaacttctacatcagctggatgcaggaggtcttctggggcatttttcagcctcaactcaactgtcactcccactatactgtgcaattcaactatattgattgctcttgagactacacatatgccaagatttctcactctcatttcttgccatccgtgctatttcttttaccttcctatttcaaaacctggctaatgccactcatttatcaggtctcaccttagtactccatcctttcaaaggcatttctgattgccccttccctctgcccacagcttgaattaagagctcatccctgatttcatggtagtttggaaatatctttttagaaacctttatcatgcaaattgctcattttgattttctgactgtctcctcttctaaaagaaggcttacttgcagtattttttaatctttgtatttccatagagcatgacactcaataaatatatgagtgtgtgaaaaactgaataaatgtgtgtatgtctgtttcttttaatagagtaagttattttagggaagggccaatgactcttttctgcttgtaggctccacgtttcctagcatggtcctttgtatataatagttgatcaataagtagtgtctgaataatgatatacatgtctatcttccccagatcattctaagtttttcagcaaaaagattgtgtcataagaattagatagcctccagcacaacgaattacaaatacttcatactctaatgcacatgtttaatttttgcttggagttgaacttaagttatggtgccttatgagagagtcaggcagcttctctgtactacataagcatgtactcgatgaagcttggggtcaaaaacctggaaactaagtttagttggaaatttaaatgctggagactggatgcatcctaggagtggattactagtattgatactcctagacaattttctattcttatttggttctttctccataaacctgaccagtccatgtatagcaagcctcaaaggatgcaagccttgttctggtgttttttattgcaagtcaaagtctatcaggagctgaggaatgagcagcagtgggagggtgtattaatttcctgtggttgctgtaacaaattatcacaaatttggtagcttaaaaatagtaattttattttctcataattctggaggtcataagtcagtttcactgggctaaaataaaggtgttaacagggctgcatgtcctcttaaatgtcaaggagagaatctgttgcttgactcttcccatttctgatagctgcccatattccttggcttgtggcccttaatctctatctccatattcacatcatctctctgtctgtatgtgtgatcttcctttgccttcatcttataaggattcaagtgcttgcatttagggtccacctggagaatacaggatagtctcacctcaagatccctaacttaatcacatctgtaaagactcctttccaaataaaataatatttacagtttccatggattaggatatatctttggggaacattattcagcctactacagagatacctttctctttttgtagattcaaagtgcttgatcttctaagaacattgtttgcttacagacatatttcaggagtaaatgacttccaaactgatggtccgttgaaaaaaagcctggggctgctgtcaggaaaggtctaatttaggtcagcctaatgccactgaacagatgtatatggcaacattcccaactcccattaggaaaataagccattaattaatacttattgaggagctgataagtaactggaagagctggtctgagttctggacaaggaatcagtgacaatcagtttccactgtctggctgttgtgggtagattgtggtccatctctgtaggataaagtgtgcacagttggcttggcactcactcttctgtgtccagcagtagctcttgccatctgtcttatcaagagaataaaaatgggtctaagttgtcactgggagattactgagtatcagtggacactatgagctcgagtgggcaaccccatgcaaggttagagcagggacttcaccaatgtttgaattagggaacttcagtacctaaaattgggatgcagatgtttcttgacttcttcatgtcttttccacctctttcatataatctaagggggatatggaccttggaggagtcttcctcaaggctttggcaggtgctcctaaacatgcttcatccatgcctacttgagtgtaatctgctatcttaagccacaggcaggagagatcaatttttctagtaacttcttttataatccagctagctgaagaagtgtgatcaaagaatcttaaaagtgtgatcttgaagaatcttagtttctcttctgttgtagagagaggatagtaatagttgctaagcctataggctctgaagccagacttatctctatttccatgctggctccactacttaatagctgtgtgagcttaggtagataataaaatctcagattcccagttttctcaattgtaaaatgaggataatagtaaccaatatatgcaaggtgccaggagatattctaagcatgttacatgtatttaaccttcttattctcacatcaaccctatgaggtaaatgtactattgttatcctacttcaaagatgggaaaactgaggtacagagagattaagtaacctgtctagatcacacagtaacaagtcgcagaacaagaatttcaactcagagtatatgcttcaactcagaatatacttcaactcagcatatttgctgttaactatattttatgctgcttcttgtgcctcagattgtgaggatcaaatagggtggccatctattccaggtcaccttggaaagttctgggtaatatctcctgtccaggtgaattattaatagtgcctccttcttttattctcaaaggtattgtcacatcttggtttgaatatatttcacatttggattaaatagtctttacatgtgaaacactaagaacaatgaccaacccataggaagctctctgttaatattagctatcactgtttctactactgccatcaccaccactgtcaccatcacccacattcatcccaagtctgggacccttagggttaggggattaacccaagttctgcaaaggcatgtcatgggagccactgttcccagttcccacacccgtagcagacattgctcgttgatcacagtacaacagtcttccttacttagtgtcatagacaaccattcgtgatagatcacgtttgagatgtgaaattaaaattatttatcacacctagttttatttaatctcagaatacaaaatcccagcgtatggagaatctgaatttagtctgagcttgtggttttatatgaaaacttatttgattcctagaagtgataatgaatttgggacctctttagacatcctatgtcccttttctccaatatttctttctacctatttctctattatttctacctcttcttttatataaatataaaagaaatttaattcatcagtttcctattctctgcctataattttatatgttataataaaagactattgaaatactaccaaagtggacacaatataaataaggcaacggagtgagtcatcataggaattacagttggcacccaagatcaaaggcttagaaaatctatctttaaatgtgatttgtgtaactggtagtgaaattcatttcaggttgattttgcatggcataagggacatctagtggtgatctaggtctctgcagatttactaaaggtaatgcaaactcataggtaaaagtattagggcctatataccatcaccttgaaagggagtcccaagaaaggaggggaccttttgttgcatgactacttttaagctagcaaagtgtaaagaaaccttttttggaaaaaaattaattcgagtaccagcatttctgtctatattattgtcagtttgcacccaactcttatttgctgcctcctgtaccaggttggaaatcattctgttatcagctacctgccaacctgacatattcttcctatcactttccccacctcttttgctgattgcagaggggctctttggagcactttgaaaagccacctgattaaagccttcattaggctagaagcagaagtgcttcacaggccaggcaagaaatactttgtaattgcttctgacgggcagatctcctttggcggttgttgagccatcaggaagccgtacagcactggtccacgtgtattttgtataaattagtgggcttgacattacaagaggttgcccctatacgcagtcatcttcttagccccagagttctggaacttacccattagcctgcacctctttatagaacccgtcttacgcatggttctgaactaactgcttctgtcacctggattgcttacaatacctgcttgcctcatgtgctactattgtttccaaccaactatgctagacttcttaaaggttctatttcattgaatgcttttacagtattttctatgactcttttgtctttgagcctctcagattagctttttctacaaaagctgtttggcatgcctattgtcatctattttctttcagagtagctgctaacagccagaagctgctagttatggccaaaggcctcattgttggagagtcgttcttgttctttgactctaggtagagaggatgaaggctctgagatactgtctcaaaacattcatgtgttttctatgacaagtcaaagctacattgtcatattagaggtgtccagtagccccttagcgtgcctcagagtgggaggtagtgttggcaccgaactttgtcagccagtctcttagaggatcttactggagtttgtgattgagcttttacttcttctgttagtgttctgctgagacatatacactaatgatagctgccactctggggtgcagaactttccatatagattgccttaaaaataaaagcaaattttctatgcatacatgccggggaaaactctactaaatattcagtggttccaagaaatgccttttaaccatttgtaatactttagctttctaccttttcatctcattacttattttcaggcagaatagatatagaggcttctttctgcattatagtcttcacagacttaaaggcatcaggaagtagcccttgtgattttccttgctcttcttcttcccatttttccacctcctcctgtaagcacgtactttgtgtcaggcattgagagatacagagagaaaaggcataggtttctccccttgagaggctcctggtctactggaagaaacagacaattccagcacaatgtgatagatacaatgatagcagttagaacatgaagccatgggggcggagaggaagaaatcagctgtgggtgggaatggagtgggtagaaatattgaagaaggtttctaaaaagaggtgatgcctaaactgtgcttcaagtggcgaatagtagttatccaggtagagaatccaggcaagatttatccctggaatgataaattggaggacctgctgaacttttgtcaaggctggtaacaatgaagtgaggactagatcaggaagaggtttttatataatgcttcaaagtttgcatttaattctgaagttgataaagaaccatcgaacaattttaagcagagaatgacatgttattcccagacatgttaatagtgagacgattagagtcatttctagtcctcggaataaaaataacagtagtttcctagtggttcagcaaggtatgttttaaatttcgtcatctttttaatcaaactgcttaaggcttcctttctactctaatagttacctttttcccctaattgcataatgtatatatttttagagcttttcataatcaggtaccacctattcacctcatcttaattcctctgctttgtgacatgtaacttttactctactggagttggtgccctcatcaaatattctaaaacagaaggaaatgtaggcattctctgggtaggtttgtttagtgcctaagaaaatgcaggaaatgagagtgtgtatttattgagcttctactatgtgccacacactttgctaaatacagggaatgcattggttatcacatcagaaacacacaacccatgtgtttatgacgcttagtttagaggatcgaaacagtgccatccctagcaaccagagggcacagaagtacagtttcaatcaagtttatggtcataggtccttgtacattaattgacatgacaaatatatctcactccaattttgatatgaaaaaatattccccccttaattgtccttcaactttctctgtgcatgttgttggcagcaattgtgtctcatggtctatcctccatggtctagagctaaagatacagtggttatttagtacatttacatgggattttgtttctaatattctaatatagctaatcaattcatattaacttggcttttgcgttagaggataagaaaagtggagaataggttcatctcaatttctggctctcagtgactggtagttaacctcctggagcactaccttgagaggattctgaggcttcatctgggttgagtggaagtagaatagaaatatgtctattgatgatgaatgccatctgctgggaaaggagggtagaggcacatatttgccaacatggctctaagaaatgggagagctgctatccagttgtgtctgaaaagattaactggcagctagaaacttttaaaactacccattgactagttctatctcggagaactacaccccctacttgccagttcatgtcttatgtctctgcctgggtctgtctatgtcaagttcttatttgttaacttagtagaagcttagtggactctgtgaaaatgataaagcttgaaagagcaagcctgtgatagactgtgatagactgagcctttatagtatccttaatgctctagaaacttgattgactggaaactttttctttttctttctttctttctttttttttgagatggagtctcactctgtcacccaggctggaatgcagtggcacaatctctgccacctgggttcaagcgattctcctgcttcagcctcccgagtagctgggattacaggcatccaccaccatgcctggctaatttttgtacttttagtagggacggggtttcaccatcttggccagcctggtcttgaactcctgaccttgttatccacctgcctcggcctcccaaagtgttgggattacaggcgtgagccactgcgcccggcctggaaattttttctataagatacacaaatacattgcagcctgttcctgatcagccatttaagtggaataaaagtcctaagaaagttcttcttgagaagaataaaattgagacctccactctgaacaggcatggagcattcaataaggcaaagggtcagaaatcttgcttaacttcttactgttcacatctgtaactgggcataaacctataggatcattttcctttcacaaagaatccatcaaataaatacttgttaaagcctacgcttaacttgagcaccggtagtaatgactcgcattatcagcggggcttttgggcttgcactcatggctctgtgattcatgagggcagaaaaactgactggcttacagctgtctctctttttctggctggcctgcctgcatgcctagataactgaatggcttttttcagaatgaggtatggtctaaggattttgctacttcaacgtcagtttcctggatcttttcttctactccagcttgccatatgtcccttttatattttcttggccactctcttacaaatagggccatagatcagagatggtggccccatctggtgaaatctagctttcagatacgctttgtttgacccatagagtgttggatcacatagaatttttaaaaattaattaactgtcaacattgtactattgatttcaactttatctggagtctttttaacttttattttgagctctagaacttggacattttctggctcctgccttgcaagtctgaacctcagttccagttttctatttttggtgcttagtgtttttgtctttggcagatcctgaccactgttaacaaaatataaagcatgaaaatggtggcatccatgcgatgcagcagttgggactatgagccccaggttggatgtcagctgtatctcagcaggtggagttagtttactgacccctgttagcaagaccagagatgcagatgtgactctggtcatgccagatattaggtttttcagactttgggatctaagaggaccatctgctgccacatttgtgcttggacttcactgttagagtttgatcaatggcatcctgtgatgaaaaatgatgttcatgaatatgaatctaaatctgagcaagtgtttggtgtgtgtgcatctcataaatgtcacattaggcaattaagtatatacaatttataaataagtatatgtaatttataaatacatatatgaagttcataaataaataatatataacttataaataaatatataaagttatgattttatagtttattaaatccagagtttttcttttgttatagccctgcctcttaggcttgacaattggcttagaagttatcctcaagagagaatctttctttttcttttcttattttttttgagatggagtctcagtctgtcacccaggctggagtgtagtggtgcgatatcagctcactgcaacctccacctccggagttcaagtgattctcccactgcaggatcccgagtagctgggattacaggcataccgcaccatacctgctaatttctgtatttttagtagagatggggtttcaccatgttggccatgctggtcttgaactcctggcctcaagtgatccacctgacttggcctcccaaagttctgggattacaggcgaaagcccctttgcccagcctgaatctttccttcttaatgactccatgctatactgtctgttgatttattctggcttttctcagtaaataacaaaattaatagtgatcgccatcacttattgagtgcttatcaagggtcagaaactatgtgaagtacttttatatgtgggaccatcatctcctttatttcttacagtcctatgtggtaagatattatctacattctacagtataagaacataggctgagacaagttaaatatcgtgcccaatgtaacacagttggtaaggtgtccaaaccctggttagggtgtctccaaaggccataatcatgaccatggcactaaactgctacttcaatctaacatctaatttaataaagatatgaacatttgttaagcacctatatagttaggagcaatttcagatgttaaaaggtgtaattcatatttcttgctcataaggtgttcgaaatctattgaaaagacaagacttgtgctgtacaaagataacaaagttgagagagttttaagtgatgagtgagtggagtggacagtttagcggagggagaaatcacagcaggcccaagtcatcagctgcctgagggagagaagggaagtggggcagagacagtgggatgtgtgattccgtggagaccccagaagcaagattctttcacaacacttcttagtcattcttttaccctgagtaggaacgttatgcaataataagattagcccagaagttttatctagaagctgtatcatcctggaagctgaagagaataagttcatttcattattatctattgtcaaaggattaaatttggaagggagataagtatatatttatttttttgcttgttgtgagtaaatgactttgcagttaggtatacagttgaaaagctttattgagatttgtagtcaactctgctccactcatggtaccccaatactggcttctccaccattccatttctccaacttcagaaaatgtccacagcgtccttactttccaacattctccactgatgtggagtggatcattggtgctcaggcctcaagtcacaaacctgtgagtgacatggtcttatccgctgacctggtgttttttattgaagttgtcctctatgcagatagtttaaaaacaagagaaaagaaagaccaggtggtaaacctcctattccttgtcaggagaaatagtgccaagaagccatctgggcactccagggcacatgcccacatcccctcattctttctagttcccttgctggagtgcatagggatggggcatttacaacagaacacgtggaaacacattctcagaaagttgagaacagagtggcctgggataagatggcagagggagagaagaaaatacttctctgagtggggactgtctctaattcttagtttattctcatgcacctgccttctaactcaaataccttggaagaatttgaagtaataagtgcatcatgtagggttagaatactctctctttttccaatcaagtgggttgggcaagagggcagacagcttcctcattggtaggtaataaaaggattctgatttatcagattgtgggatcaccaagtaccagagtagccagggaaattctcaaatggatttgaaaatcctagggaaggagcaccatttagagaggctggagagaagagaaaggcactgcagcctaggaaacccagtgaacaagaatgcagaagcaataacacctgggttcatacagaaacctttgaggtgacccctaagcggggaggtatagacatccattagaaatggattgtgcaggaggggaagggctttgcacatcaagatggacttgggtgtggtttttgtgcgtgactaaggggtttctgctttgtgtgtaggcatggggtacaggagggcctagaaattgccctctctggagcatatccttaccccagtgcagtcagagagataagggctcaagttctgtttatgcatttaatagcctacatgatcttgggcaagtatgtatccctgctgaactccatgtctgtaaaatggggctaatgctacctatttcatttgcttattgtgtatgatataaaacagtgtttgcaaagtacctggcacatggtaggctcttttcttatattgttccggctctcagcttgctttactcctggtattgctcctgtgtgtctctgtattaaagatcatggaggaatataagtatatttttttcctgagagactttgtcttaactttgagattctgtcctcagctgttttactgtctggtctcctaagcatgagtcacgtgtccaaacagcagtctttacaagcccatgggtgggatagtaagaccagcttgtcactgtttgtgactctgcttctgtacctcccagtctgtgtgacatcttcccccatggggagccgtttctactttgtctttaattgctcctcaccgaggcgacttgtcagccaaggctgctttctgtcatttgatgccacatctcttcctatttcagccagccatttggggacattcatttagttgacagtctgattttacagagaacattgtaccagacaataatttgccttgtaagggggtccagcagggtttcctgcctccatgctgacccagggtgccagtacacttctgcgtggctgtggctgtggttctgcacagagcaggtggggaaggtgaagatattaacaatggagagtcccagttgagcatcactgggctacaagtcccttgccctcctgtccttttcctcttggtagataaaccttcacagaacctcaattcaggaccctatccatttccaacagaaccccaacaccatgggagatgaagatataggattatttcttcctaggtttgtgtgccggtttagaattgtctgtgtcctactatgtctaacatcccacttgatcttgacaacagccctgtgagctgggaaagagggacagtttgtggaacagatatcgaggctcttacctttggaataaataaaatgggactcagaagggttattcagctgtcagtgagagtggtgttggctttttattcacaacagtgaaaactccatataaatagacaggtaatttcagggccatggagtagatagagcactcaccctcaaagagcctttgagagaagtctggttatctctgtctggccagtttctggcccttgcttctcttacctatgtcttcagaaatcttcattccggctattcaccttctctcccagtctcagttaggtacccttctcacagaagagttcctcttcactgctcttgtatcttgttaaaaggcttttttttccctcctttttattctgtccccagcctgctgtagcaatgcctgatctctctttctatttattgttccatggagccaaacctccttctgtccctttgggatgacctattgttatacattaataattaacctttactaggaactctagtcacaggcatttaacccaaatgcagaaaaagccaaagtttgtttatgacaaagagttctcacatgctaaggtataatagtgaaggttagaaaggagaagctgacactcattaaacttttatgatttcttttctggtttactcacttgagtgattgcctgaggatcctgcaatatttccctttgcacatggtcagcccagtttagctaaaatgaaaaattcagcttttgaattgtgaagttgagcatgcatgactttccatgtaatgttaaagataagcctcacaggtgctgctagtggggcctggttctgagcatatggaccctggggcccaaatgcctaggttcaagtcctgctctgccacttatcagctgtgtgcctgtgggccggttccctaactgctctctgtgtctgtttctgcatctgtaaaataaggcaatgattacaggtatctcaaatgggtgttgtctgtatctaatgggatggagaggtgttaaatccttaccatggtgcctggtggtaggtgcttaataagtgttagtatcattattttcaatgttattgactatggttaggtccacggtcaaggttacataatagtgagtcattttcaatgcttcgccatagttatatatcactcttgtaatatccattagaatgcaaacagctttgcttgattctctcctggtgatgagagatgggaactaattctacatttaaatattggggattatatgatatgtgctggagtgacccatccaattaactttgtctcacagatatggacagatgaggcttattttagaaattagccattgttgttttggagatgataatgcaaccttttcagggctgtggaaatagcgaaatgagattaacaataaccctccaaatagctgcgacttttgtgcccttatgatattgcattcctaagtgcttcacatgttttaaatcattttattattacaaaataaatagtttgtttattcctatgttcccaatttcaggagaggaaacagactcagaaaatttactttgccaaagtcacatagcttgtaagtagtaaatgtggaattcaaacctaaatctgggtcctgacttagaatttgaataaggtaatataaagaaaataggaaaatagttgggacgctcaatactcagatccttgtctatttcccttccattgttttctgcttattaagtttttatggatacgacattgctcagagatcagagcgccaaaaaccattccagggtactgtatcaaatttcagttcaaataagagtaaaacttttttgaaattctaatttcatggagaaagattaatttctgcttttagatggattatacctggtttagaaagtcataacagatttttttcccataggttattggggttcaggtggtgtttggttacatgaataagttcttaagtggttatttgtgcgattttggtgcactcatcacccaagcagtatacactgcaccctatttgtagtcttttattcctcaccctcatcacacccttcccctcaagtccccaaagtccatgtatcattcttatgcctttgcgtcttcatagcttagctcccacatatcagtgagaacatacaatgttcggttttccattcctgagttacttcacttagaataatagtttccagtcttatccaggtcactgcaaatgccattaattcattcctttttatggctgagtagtattcatatatatatatcacattttcttgatccacttgttgattgatgaacgtttgggttggttccacaattttgcaattggaaattgtgctgctatacacatgcctgtgcaagtatctttttcttataatgacttcttttcctctgggtagatacccagtagtgggattgctggatcaaatggtagttctacttttagttctttaagggatctccacactgttttccatagtggctgttagacagtcataacagatttttttaactgccatcctcacgttctccacctacctacccactctgcaggacagtggccatggctttgcagaagtgtacactaaccttgggtagggcatggaggcagaaagctctgctggacccccttgcaaggtgaattagtatctggttcagtattctttgtaaaatcagactctcaactaaatcaatgtccttgactgactggctgaaatagggcttcagggtgtctcattctaccactgtacagagggcacatgcaatgtgcaaaaaataaaaacaaaaacagacctctgtccccaccagcttttaacacttactcttttctttcaagtaatatatccacatggttgaaaaaaagtctaacactgtaagagggcacagtgaaaagtaagtcaccctcccactccagaatattaatcccgcaaatatactccccaatgacaattttatagttccaaagagactttatgcttactggagcatatatacatataatgcccccacgcccccacacttttacacaatgataacataatgcaccctctatcctgttccttgacaatttcacttaacaatgtgacctggagagcttccacatcaaaaccaaaagcaataccttgtttgcaaggcctgcctaatattccattataacgctgtgccatctgctattgatggtcatttaggttgtttctggtattttactaagggtgcttcagtaaatcactttgtatgaagtatgtgaatccatgcaactcgatctctcttgatttttatttgcaagcttatgttgtataactttctgacaacacaagaaattggccaggagacaaaagaaattctgtagaaatatagaggcttttttggagcttgtgtgcacatcagatgtttcttcagatacctttttggttcctgtgtctcattgtttctcatgttgttttgggctatgtcctgaagcctctttttgggtcatttttccaggtgcccagtgagtgatggatggatactgtttgcaagattgattcacatggcacttttgtttggcttttgacaggttgtttataagaataatgacatccgtctggagctgtctcgcctggcccggattgcggacaccaagatgaaaatctatggcgaagttgtgtttaagtgtgagaatgtggccacactggaccccatcaactttgagaccccagaggcttacatcagcttgcccaagtggaacactaaacgtatgggctccatctcctttgacttccgcaccacagagcccaatggcctgatcctcttcactcatggaaagccccaagagaggaaggatgctcggagccagaagaatacaaaagtagacttctttgccgtggaactcctcgatggcaacctgtacttgctgcttgacatgggctctggcaccatcaaagtgaaagccactcagaagaaagccaatgatggggaatggtaccatgtggacattcagcgagatggcagatcaggtaggaagaggcaggatgtgtgactgagactagacgaaagctgtagcttctcagtttgttttttggctttatgtttcttaattttcacccttgcatgcttgttgattcttttgctactctctttaatggctgttgtaaaattatgtttctgaaaagatacctgtctcatagatggctcacattctccgcttatctctcttgtcactcactgcgcaattgtctcagtgatagctctacgatcctggagctaaggatggttttacaagtagcatttccactgctaccagagcaactctcatgtcactggtgtgatccgcccccattgccccattctttgcttctctttttcctcatcaccatggaaaccgattgtgacatcacagatgctgcattatgtgattattttgtaggataaacttcactgtgcaagaatttatgcaacaatacacccttcagtaattggcaagagtcatgttgcatggagaaattatgacaagaaaggaaaaggcaaattgatttttcctgaagatacattcaatttaaagccttcctttggtgtaaaagcctatatttcactctttgttcagacctcactaactctctcttcctcttcataaccttttacattttgtttaaatggctttgtttctgcagctgcagatcaaacaagctagccccaggcagtacatagctactatggaatagtaacaaagtgggggtgggggtggggcaaaatagtcaggggtttttgaatgcctggacagtctgcctagctttctatggaccatgtggcaatgaaggtcacattctgtgctatcagaaagggcattttcccaagagcagtaattagagcatttgccatttcagactcatttcctgattctccatttaggtaggatgtactcaagaagggtcttggcttcatgtgccatatttatagagattcactttcctgatgaacattaaaaagtctctatttggatattttctttctaggtacatttggccagtaagagagagcaataagttccccaaaaggctgaaactgggagtgactgagctttggtgggttggcttttctgcataattccaaagctaggctgacggcagagatagcaatattgcccttaggaagagctggatgggttctttgcagagggcagatgggtggcagattgcagccctggctattttattgcccagtaggaatctttactggttgtctgaaatctgatcagaaccaagagccttcaaattaaatgtgctcgttaagcaagaatgaatagtgtctacccttttacacagaaaaacacccaaaaaattaatttctttggaggctaaatcccgccacaccccccatacttcttcttcttcttttctttctccttctctgcttttcagtaaaatgacagcaagagcagagtcagaaagctgttccagaattataaagaaaacactgctgttggtttttaagagcatgtgtttgggatctctgaggttaggtcacggtggacgggttttgtgtctgactaacctagaccttggcacagcataaaagttaccttacccgtgtctcaggcaggctaaaacacacaaaattgccatttgttcatttctgtctgttcctaatacaaatttttctttcaaacaattttgaacaaaggggaacagtttttgttgtttaaaccaccagtggacccaacttcaacaaatatgtttgaatttcagaagtcttaaatttcatacctgggagctaaagcactggctaattcttttctcttttttttttttttttttttttttgagacagagtttctctcttgctgcccaggctggagtgcaatggcgcagtctcggctcactgcaaactctaccttccaggttcaagtgattctcctgccttacctcccaagtagctgggattacaggcaccctccaccaagcccagctaatttttgtctatttagtagagacagggtttcaccatgttggccaggccaatctcgaactcctgacctcagatgatcaacccatctcggcctcccaaagtgctgggattacaggagtaagccactgtgccaggcctggccagttttttgaactactgatgaatttgatcaaagcctattaaaaacttactgagtaaacaaacaattgtcccatgaaagcagtataatctaaaattttaatacagtctgttaaactttcattttttcatgagaatgttttctggtaacttgttttagattataaatctatactaaaggatagttataaaaacaagtgtatctaaatgtggtgcctccttccctgataatcttgaagaataatataacaaacagtgatctagaaaaacttttatgatcactcctcacttgggcaagtcagtcttagaacttgttaagtgcattcaaaactgttatggtcacacattcagagaacagattttcctcaggttgtatttaaggctctaaaatttaaattgattctagtattgtctttacttggcaatagatgtctccccattttagttggtgatcagattagccctgtggacctgtgaggggtaaagaaagaaaactatgcaacagagaaaatagtaagagatagagacctcaacttcctcctttgtaagatagagaaaataataactcctacctcccaatattgttttgaggatcaagtccaaaaatgcacataaaatagttaaaatggtagccaggacattattgttgttatataagtgtttgaaagattgaaaaacaaaaggcaaagcatatttctctaggagtaaacttctaggagggagtagtgaagcagattgttaaattccccttaatatcctttctatgcttctactcttgtgttgactttgcactttatttattgtttttaactttagttaattaattaattaaatttcttgagagctagtctcactctgccacccagcttggagtgcagtggcacgatctcagctctctgcaatccccacctcccgggtccaaggaattctcctgcctcaacctctcgagtagctgggattacaggtgcctgccaccacacctggctaatttttgtatttttagtaaagatggggtttcaccatgttggccaggttggtcttgaactcctgacctcaagtgatctgcccgcctcagcctcccaaagtgctgggattacaggcgtgagccaccacacccagccgactttgtactttaaagtgtatgtttcattcttgatcacgtctgatcttcgcagcccttcaggttatatacccttcataactgaagaaactgagaatcagacagaggtgaaggctgactgatggatggcatgacccatttatcttgataccaataaagcacatcaagaataataaatacctattttaaaatttctgacaggaagtttagatatcacctagtccatttccttaattttccagttcgggaaattgagccataaagtggttcagggattggcctagggtcataaagacatttaggactagaatccctgctctcaaggtcccaggttagcttgtggggtttcatcttctacaatctcatttgatgctgtccaaactccaaccccttcctgggtctgcttagctctctgacttgatctcctgctcaccccctcttgccttctctattctagccacacatctgcctacctcagggcctttgtaggtgccatcccctctgcctggcatgctctctctcctggactttgcatggctgaatccttctcaacattctggtttcagcttcacttttacctgcctagagagaccttcagtgactctacattttaaagtagaatgcatgagtaactagcacaccacccattttactctcttcatagcaactgcccttagctaatttatttcatttattgggttacttattgtattagtctgttctcatgctgctaataaagacaaacccaagactggataatttataaaggaaagatgtttaattgactcactattcagcatggctggggaggcctcaggacacttacaatcatggtggaaggagaagcaaacacgtccttcttcatatggcagcaggagagagagaagtgcagtgccagccagagaaatgccagatacttataaaaccatcagatcttgtgagaactcactcactatcatgagaacaacatggaggtaatgtccccataattcaattcacttcccaccaggtctgtcccacaacatgcagggattatgggaatggcaattcaagataagatttgggtgggaacacagccaaaccatatcatttattttttgtccctctgttctggaacatctgctcaatgagaggagagacatgcctatcaagttcatctcagtgcctagaactataccagagacagaataggtcttccatacacatttattaaatgattaaataaggaataatgtttcagttaaaatgtgtcacagggaatgctcaaaatattcactggcagggctggtagtgaatgcccaatctagagagtaccagtgcatggagagagagacagaagaggaagttccatcttttgggggttggtgagcccttgaagaaaactcaggcaaacatatggaggcctcattctgtctcagtcactcttaaaagcactttgcatatattcactcatttaatcacaccaacctatgaggtggggacagttattttcccattttacaaatgaggaaactgaggcacaggaaggtgaagtcacttcttcacggttatacagctcatacatattagagctggaatttaaatacaggcaggaactgtgctgctctcaacctgtatggtctcagccaagagggttaagtagagaaaagatacactagatgttaggtcactgagatttttctgggtcttcctaagggccagcttgacttagctggcagagattggaaccaaacggcctacattgtcttttccattgtcttgtaacatctaattctcttgcttacattgttctctcctggccagccaatggctgggctcagcactcacctgttaggtttcttacatttggttaagcaactggcagactcacctgagatctgtcttcccaccccaggtactatatcagtgaacagcaggcgcacgccattcaccgccagtggggagagcgagatcctggacctggaaggagacatgtacctgggagggctgccggagaaccgtgctggccttattctccccaccgagctgtggactgccatgctcaactatggctacgtgggctgcatccgcgacctattcattgatgggcgcagcaagaacattcgacagctggcagagatgcagaatgctgcgggtgtcaagtcctcctgttcacggatgagtgccaagcagtgtgacagctacccctgcaagaataatgctgtgtgcaaggacggctggaaccgcttcatctgcgactgcaccggcaccggatactggggaagaacctgcgaaaggggtgagtcggcctagaggatggcaagtgagggcctgagtggggctgatgtgttacagttggatccctgggcagcccaagccttcgcacctacctgcactttctttcttccaagagtttttgggtttactgatttccagattgcaccctttctagttctgaatgcttgggtttgtttggctaagactgagttgcagaaagggaagctttataataaatattactgtgattatgatactttttgattaaatattttctatttagagagggtaaataattctcttttgggactccagggggcctagccaactggctgttttattcattcatttgacttgtgattctttagtgctttctacaagctaactcctgggttaggctttagaaatacaatgttgaacaagacaggtacatcgctgtttttatggagcttgctgcctagtggaatatttagccattaaataactgattacaaacatggtgagttttataagaggcagagtgatgtattagttaagaacataaactctggggccagactgggtgagaaatctggccctcatgcagtgatgggaatttcatcatggtagtcaatatctttgaaacttgacttcctcatttgtaaaatagaaatcaggtacctacctcacaagatactgatgatgattaaatgagttaataggttctcgagcatttaatgttagtgattattatagtcataattattctcatcaacatcattaaagagaaggtatagagaagcttgggaggcccttggaaggagacctaacataccatacaggttcactgtatagtgagcaaccctgacagttgaggacctgaacaaagtccagaatggactggatgctttgttcccttctgaaaaatgtccagaatagaattggggaactgttggggtggggaggaggggcatgagaggggaccaaagagatgagggctgaccctgtagactgggccagaatgctgggaggattcccttttcgttcaccacttcagtatctgacatttgcacccgatttacagtttaagtaaagggcatagataaaggcaagaagagggacaacatcaacacaaggagattccagtcaagctatttgcagattgcagcttggtctatttttttatatgccaagcacacagaatcaagctgaatatccgcaggctgtcaacttctatattcaatgaaaggataatttgcatcaggatcaagtttttgctaagggtatagctctagggctttgagaatgctgtacctgtatagttcttgccctcaagaagattatcatttatttagctgaggagttgagacatctatataataagctgtaataagatgatgtaagacagtagcatgttagtggacagaaaagaaggacatggagattcagagacagaagaacgttttgaggagagacctgcagggtctcatctctacagaccagtggccagtggcctatcagaagataggtgatgtggatggatcctgggccaggtctagaacaagggctgaatgaccagttttcaaggcctgtttttttgtaaggccaactgtggggccaactgtgttactagctaaggtatatttcaagagaactacaaaccctttttacagtcagatcagaaatagaatacaggacatgaggacaaaggaagaaaagagagctttcttggagcatatggaattaaaattaaaattcactgaattttcaagtcagcaaccaccagaacaggagctatgataaggaaatactcatctgggacaggaataggccacaaggggctggtcagtctgtcaggtgcctgggctctttccaagtatgtttgtagggtaacctaccctggtgctggttggggaagatagaaaggtcatttttgtctctgagatgcgtgagacagttttggtgtttgccaaagtgttgcagatcttctgttgtctatgaagacagtataaaggtcatctcagacatctcacttcttcttgggtctcctcttaactcaagcaagggccttgtgattgtcagaggcaggacacagtgactgtagccagctgtacaaggtgtctctgagctcacccatttcaagggtgaatcaacgggagttggtccaaaacttgccaagaacagtgaaagtcactgcaccttttacattgtcacttctgactagtcattaaaaggcagctgattggggatatatgagggacaattattcttggtgcagtgcagccaagagtcatccattctggccaaatgagaagaagcttagcaaatttaagatatttgatctatacatcgctcaaatcccagacggttcaactgattgttttgttcccctactaattgttttttgcccctggattgttcctgacaccatgttcagaatgaatcagtggagtgtaaaaattataggactcttctctgctagcaaagaaaagttgagattcccaatgacattgtttttctttatggaaactgattccttagtggagactcttttgagtatcttttgttcatttttcctgcaggaagttgacatatattgaagccctagtgtgttccaggcactatgtttgaggttggaaatgcaacaaacaaaaaatccaaaacagaaacaccaacttgacacggcctttacttgtgaacaaggggtgtatagtcctcccaggaagcaaaggaaaatgtgagaaatgtttaacatgtggttaatgttatggcagatgtctatagggaaacagtaggacaaacaggcaagaatggccacttctatatggaaggagtgatggcccagagaaggggatccaagctttcttggattttagatttcctatttctaactttaggcatccactctaggcacttctgaagaagaatgaagaaaatgtattgggtattctctctatacaggaatggaatacttttcggattaaggagccctgccccattcaccataacaacatcaacacaatcactcagtttgccattctctctctaatttttattatgtagaagcattctagaatcaagtctaagtctagaatggatcatttgtactaaatgtgttaagcctaagacaattcttaaggctgtgtgtcccagtagctcaaactgtgttctctactggaacttccttgggggtgagtccattggtataactgggcccacacatgaatgggagtgttagaaagaagcacttgtgtatatacactgaagaaagcatagatggaatgctgaaaactggagttttcatggcccaggtcagacactagacactacatcaaaatagaccaatgacccaagcaaagtcagcaacagataaatctaagagacaattcctggatcaaagtcatcagccaagtataagagagtcagagaataaggcctgggaagtagaaagtgtgtatatgatactaagattaatttgcatgtgtatgtttctcttacagtaaaattggataactcctgcttctaccctcataagagtgcttcttctgcctgtgaagatgagctactctaaatcttgatgtctaaaaataggcttgattgatattgtatttagatttttttcagcataatctgttgctattctaagatgtagctgtctctacctatcccaactgtttagctctaattatttttgttggctattcatagtgatgtgagagacgtctccatgacctaaacagcaaaggcctgttttaactacttaattctaatcagataggttgaaattctttagtatcatagaataccacctaccatccagtgaagtcctgttggacagaggaaacagtctagctggtctttagcctgctctggagttagtcctacttaaggagctatgatcacttgacctgggacaacatcttatctttgctggtatagccaaactgtctagttcaattggtgagcatcaagttccagcaaggcaaagccaagggtttgatttatttgtacatcatggagcttaaattttagaccattgctgaatctatgctcttccctgaatggctttttctaaacatatcctggcattcatttggcaagaaagtaaataaagctcagcacaagttcatcccaatgtcaagaaaaataacctacagtacaacatttatctgacatatgcaccagctgaacacgaagaatacaagtatttttacttctctccagtgactcttgttccagtgggaaaggcatgcaggcagcagctgctgctcctctccattcggggcctccctttttaggcaacctcctatgtgatcctgggtagcagcagcagcagcaaaagcaaatgattctgcctggaaagggtgagataccaatcttcgatgaggctggattgtgtcattgaaatgctacatatatgccacatggaaatcatgtcataagaaaatagtagggttggcagaggccaggagtggtggctcatgcctgtaatcccagcactttgggaggctgaggtgggtgggtcacctgaggtcaggagttcaagaccagcctgtccaacatggcaaaaccccgtctctactaaaaatacaaaaattagctgggcttggtggtgcatgcctgcaatcccagctactcaggaggctgaggcatgagaatcacttgaatctgggaggtggaggttgcagtgagccaagatcatgcagttgcactccagcctgggtgacagagtgactccgtctcaagaaaaagaaaagaaaatagtgaaaatagtagggttggcagataccgttagtgttacctgcacctcattcctgttttggtaaatgaggaattggaagccctgagaagttaagtcaacatcagtttagcttggaattgctatagaatggttagaatttatgattcctgattcctaatgcatcaggctttccattacattgagcagcctttccttcatatatactgttatatacatatactagatggttattaaatgtgggagggctccagggtttctgttttaggtctcttcttggcctgcacggttcccttggtgctcttattctttgccacgatattaaaggtcatctatatgttagtgacttccaaattgaggtctcttgcctagaactctccctgaaatctcagattcttatgtccctagttgtctacttgacatctccatttggatatctgatagattaacttaagctacttaattaatagctacttaatacatagctacttaattctaatcagataggttgaaattcttgaatatactggaagagcacctgccaccctgtgaagtcctgttggacttaatcgtatcatggaacagcttaatcatatcattgaaaagcagaaatcttgaggtcttccttcctgccccagacttcttttactttcagtttttccccttcttggtaaatggcatccctactgtccttgggcattttcttttatttttgtcctatgatattcaatctatctcagcaagtctcatccatttctcttataaacccatcctgcatctgtccactctctcttccatctctatcattttagatcaaaccatacttatcacttctttggacaactatatagcatgtagtatatgattatgaaaaatccaaattcattttgtgtcttctttagaatattaaagttaaattattaaaatttctatattctcaacacagtctatcttaaatagctttagtttcagtggcttttggtccagaaaactgtaggaaatgaagctatgatgcttctttggaattaacttcagcattaacatagagattccataaacaggtatttagctcttttctgtgtcaggctttgtgagctgatgaggatatacatttatattaagagaagacacactttctgtcctccacgagctcacagcacagcagaggggatagagacataatctgcaaactctaatgcaatctaccagtgtcaatgattcaggaaataatcacaggaaagaaaaagataacaattagaaagcaagatatgacgcacattttataccattttataattagttctggattcactgaggtcttgctcagactatctcactggtgtgggaataagagaaacctgggcttccaaggtcaaatataataatggtggttgctttcactggtctcagtgctattgaggaggggaatctgcgttatggctgtgccctcatccctcgtaggtttccagatcctttatttaaatgtctgacctggagatggatcctctgacctttcttttctgcaagaataaaatgaggcagttgggtttcacgctctctcaggcccttttcaactctaaaactctgattctcaaatgtcatcagcttggcaatgctttctcttatcccaaggagagagagaaaggtgaatgaagggcagcaatgtgagtccttgttccttacaatccgcagaactgtctggattaggactcggtttagttatatcagcactgcaatcaaattttcatctccctgattcattcatccaagaaaatgaataccttggtgtactgagtacacttcaggtccatcagacctgagttttaattgatggattaacgaatcgaaccttagatttctaaagagcattaaaaggctgtttcctctttggtccattgtttactctttttgatagataatgacatgtatctgagaaaggggcttcccaagaaatgtgcaattcatttacataaatcaaactgtctccttttttttttgtttgtttttttgcttttctgttgttgcttaagtcatacaaatgtatccctggtgacagccaccagcagagcacagattcagcctctttttttttttaacttccggttctgcaagtttccctttccacaagcacagggttttatgattgcagaaagcttttccatagtacatgaaccctagctgagagttattccaccaggtgagagtctgagctacctctgatcacagctggtcctgttactctaaaaaagagtatcaggattgtagattccggttattctagagtcttgaaggtttcgaggtctaagaaggacaggctggggactttggagatcttttaagaatcgacacctgcattcaacctgagaatgtgagggtcagcactttggtgcagtgtgtgacagctgcttatgaaccaacggcacacctgctgctggctgcagtgctgtcaaatgcagggactcggtggccatttacattgccactgtgtatctttattactgtgtgtgctcaaagcagcttaactgccagcagacatctgcccataataatgcaataattgaaatgctgctaaattatgagaaacaagtgctttgaaacacaacacaaggggattgttgcaggcttttctagcatctctggcttcatgtttcttttcacagagagatgaatccttcttcactacagtttggattaagaagaaaggaaagttaaaagacctactatttattgaaaaaaatgatgtgccttctctatgtttggttcttaatatatactgagtcatttaaccctcacatccactctgcagactgcatattattatcctcactttctacgtgaagaaattaagggccacccaattcattctgaatacctactgagtgctacgtgccagggactgtgttgagcacttgggacacaaaggcattgactgtggttctcataaatgtgctattatattctggtatctgagcaattgggacatgagtgtggggagaaatatcatggaaggcatcacagactggtgccactagagctgaggcttggtggagaatcaaagatctccccggcagaccaggcaggggaaaaaaaattccaggcagaaggaacagatgtataaaggtgacttcaataaacagtaagttttccatgtgggtggcatgtagggcttaaagagtgaggaggagggatttgaggggaagttttcgaagatgcagctgtaggggtgacagggccagccagccatgaaacactttgctctcccaacaagtttaggcattatcttataggaagcataccacgtttaacaatgggataaccaggtcagatcactgaggcagaagataaattgaatacagaagacaggagaccaacaggtcagcatataatagtccagtttgcattggtattaattcaggaatgagagataagagccctccctgaagaaacaagagtggaggtcgagttttcgaacatatctgataaataaaaaaggggcaatgtcaataggacttagttagtaatcaattacacacagctaaagaatagctgaaattgaattagagcaagggtttggccatggaagccttttgcttcttcctttcttctgagccatcttgaatcagtgggagattcttaggaggagtggggaggactgtggtgaccattaagcagatgtagctgagagtcaaacctacacctgctttggtcccactcggaacatatgtatttaccttctcaccttctctctgtgcctccgtttcaatatttgccatgacaatattggcagtgggtgtttaactggcttattgtgaggctccattgtagaatcaaagtgtataatgtgctcacatagataacaaagttaatattcccctttcagaatctggagtttagcaatgcaagaattgaaaaaatgatctggctggtgtttttactccatttttttttttcttgtgtggtggaaatgacccaggtcttatttctgtgtttaaggcatatgatacaggttagagtttaaaattgagaaggttggaccataagagaacataccaaagcatgcctttcttcatactttaaatggtgtatttggaattaaaatgtgactcttttgtaatcccgggttttaaagaattgcattaaaatgatctgttatgactgtagtgatctcaaccaagctttggcatatgtttggtagaaacaatgagttgtagtttgtctctctttgtcttgtaaaactggccatatttgaaattaagctaaaagattttttttccttggagatagaaaaatcatattttgaacttctccctattctggtctctcatttgggatttatagtgatgacacccgatactgagtattacgtatgtgtctgtgcctagagcacatgtgtatagttttcctctagcttctgagaagttttctgttttatcatgggttctgttttaatcccaccaaggactgttaagaggaaaaagcagcaaacatgtagtaatcaagaatagaagtcccaaacttaaaacctaaaacttgactgacccaacaaaaaccaggcagagtataaagagttgtgtaattacttatcttgccagtagaatagatgctcagatactatctagcaaaaccacccacccccaattttagatgaagaaactgaggcctccaggtgggaaatgagtggtcaatagaatagaatagaatgttcttagtccctcgttttggttcctatttattggctttttcaaagaaatatacatgcatctgtgcatctgtgcatatttgtgaagatatacttttatgtctcatgatcttctaggcagtagtcatgccgttatagcaaagccatttggtaaatctccagtaatttgttctaactgataaattttatttgaaatgttggcaactgatttagagggaggaaatgtggagggaagagatgtatatatttctcttctctttctgtttcatcacttatcccatcttaccccaacaaataacccagcccaacagagaggatactggggtgacaagtacatctggaacttgaggctggacccttcaatatgagtggctcttgaaagacccccttctgtgggctactggacagctatttttctgccaggtagatgcagtctttcttggagaagatcatttcatgcttcttagcatgtttaacctttatagcaagacactcttatcaaaatgacaaaccccaacagagccttctaagaggccagtaaatcagaagcctcatgaaatctgtgcgattagcatgttccccctctttgtttctgcagggtaagaaagccctgtgcatttcagatttcaatcttctctgcaggccccttgtttgaaacctcctgctgtggctcactggtatttaaatactgttttcattcagtcacctggggccacatactgacatcagctaaggctggcacattgtttatctccatcagcaatgttgtaaagaaaagataactgctctgatgtttgtttagttgaattctccccatcctggaaagcatcctttctgggtctgaagatagcagctgattcctaatgtcatcattcctgtagtagctcactgttgctcagcaggatctcatctccagccagttagttgtctctgatctctttgtcccatggctcagtctgtaatgaaactttcacaagcaacctagcatcttcagccactataaggtggagcctccttctgtggaaatccacaaagtcaaggctatattgagagtagaggtagaaggagaaaaaaatgatgaataacagttctgttgtctgtatagatgataaaatatttattagggattgtggggggtgactcttttatcggagtttacacatccatattttcaagttggaaaggacctctgaggtttttgagtctaactcaatatctgatgcatatatacccctggacaaaattcctaaattgctgtgtagagtctataggaatatgtactcttatctacatatgatgtactaaatgcttagcagtggttagcttatttaatctttgcaataactacataagatatgtgctattttcattcttaatttatatctgaggaattggggttaaggataggttaagtaacttgctcaaggtcacccaagaatacgttgaggtgatctctgggtcttccactcctgagtcctctcttctgtgatcgatatactttactactctcagtaacaaggattctcacctcttcatgaagcagccattccatttttggatattactaagtagtctaaaaatcttcctttcactacaactgaagtcccttttttgaaacactctttttattttattttgttcctttttttattatactttaagttctgggatacatgtgcagaacgtgcagtttttttacataggtatacatgtgccatggtggtttgctgcacccatcaacccatcacttacattaggtatttctcctaatgctgtcccttccctagacccccaccccctaacaggcccagtgtgtgatgttcccctccctgtgtccatgtgttctcatttttcaactcccacttatgagtgagaacatgtggtatttggttttctgttcttgtaaacactcttttttaattgtgataaaatacacataacataacatttaccattttagcttttttttttttttttttttgagagaaggcctggctcttttgcccaagctgaagtgcagtgatgcaatctcagctcactgcaactcctgctccctgggctcaagccatcctgccaacctcagcctcttaagtagctgggaccacaggcatgtaccatcacacccggctaatttttgtattttttgtagacatggattttcaccatgttgtccaggctggtctcgaacttgtgagctcaaacagtctgcccacctcggcctcccaacgtgctgggattacaggcgtgagtcatcacacctggcctcattttagccatttttatgtgtataatacggtggcataaagcacattcacattgctgtgcaaccatagccatcatccatcttcagaatctttcttttggccttggttcaggctttgggagctatacaggatttattcactaaaaaaaaaaaaaaaaaaaccttcactaggtgcttatcatgccatggatcctagagatgtccagaacaggtcaagctaaaacccttctctacaatagaccttcagttattcaaagacaactatcaggttttccactgaaatgttgtcagtcattctcaggataaacatcactagtttcattaaccagttctcacctattgtggttttaagttccttgctgagttaatccagcagtcattgagagaagtgggggaaggtgggagagggttctgtgttctgaaaggaatgatggcttccagtacttcacaggggtctttgtgaagcaggccatgcccttccaaggagaaagcatgtattgttaatgcagtaactcacatgaatatcagagatagtgacacatatggactatgggtttgtgtagttggcaggattcactggtacatttatggtggtggtggggtgagtgcttttgttagtttcttatcctgtaaaaatgctttgggccaggcacggtggctcacgcctgtaattccagcactgtgggaggccagggcaggtggatcacctgaggtcgggagttcaagaccagcctgaccaacatggggaaaccccatctctcctgaaaattagccaggcatggtggtgcttgcctgtaatcccagctacttgggaggctgagataggagaatcacctaaacccaggaggcagaggttgtggtgagccaagatcgcgccattgtactgcagcctgggcaacaagagcgaaaactccgtctcaaaaaaaaatgctgtgggcccacttcaggtaacatcacatttaccacctcgtcttattcctcaaaatagtcctagattgagtgtgttaagtcacatatctcaaaagcaaagctaaatttatttttgaccataggaacatcttagggtaccactagacaaggaaatcatgattttgacgagtgtcagctgacacaaaatcattgaatgctacagctgggcagggccttaaaaaatcaactattccagtgcttataatttgcaaagaaataactgagattcaaagtgattatataacttgcccaaagttacagaggtagtaagtagccacgctgggacttatcactcagtattttgaatccttgatgagatctgtctattctaaagcaatttcagaggtgctcttgctttgtacctttgggctggtcctttgtagctgagagtaagatgctcctgctgtgtgggtcagaagatttcttcacaagctcagtgggtccttgtgattttttttaacatgtaatcgtccctttatttattgcaaataagcttggcaatttatttagttagcaacttatggtctggaaaatctcattatccaaaccttacattatcaacacatctgtttaaaaagagatgcttaaagaagtggtctaaatatgcagattcctgatcatcttgaagaagggaactactaaaagggcaacctgggagggagtagacaattgtagtgaggccatgaaagccactgacattcacacataagggagtataaaaagggaattcacatttattgagtacctgcatgtgccaggtataatttggtccttaaataagatgaaccaggtttggagtcagacaaaactggatttgtgggggcggtggggaggtgcacagtggctcatgcctgtaatcccagtgctttgggagatagaggtgggcggatcacgaggtcatgagttcgagaccagcctggccaacatagtgaaaaccccgtctctactaaaaataccaaaaaaattagccaggcatggtggcaggtgcctgtaatcccacttctcaggaggctgaggcaggagaatcgcatgaacccaggaggcggaggttgcagtgagctgagactgcaccactgcactccagcctgggcaacagagggagactccatctcaaaaacaaacaaacaaacaacaacaaaaagctggatttgaatcccagttccattgctcactattatgtgatcttggatgtgtttttaacccctttttagcctcagttttctgatccatcaaaaagccattctggggttgttatgatgcttcaataacataattgtgtaaaaatcttggcaaaatgcctataattttgtaagtgttcagtacatggaggagtattattattcttctctcttttaatttttagagcagatcttataaagtttgtggtatcattcagatttttagatacttaaaccaaggatcagaaaactaaaataaatttccatagtcgcaatgttagcaaatactaaaggtaggaatttttcacccagtctatcagattttctattattctttgccattcatttaaacaggaggccttagaggtgggattaggtactgtgggagggagagagagctgtaagaaatgagatggctttttttgttcctcttccaaccttgtcagttctctgctttaggactttccaaggggcaaacatgagaaatacattgggatggaagctgtccatttggagtaaattcaggattgagaaaagcagtcaggatcttccacatcttttcattcacactgtttgttcctaggtggtggagaagaactgtaaagtttcatggggctggtccagaagagcatgaaatgagtacagctcaaaacttttggctcatcataatttatccagggctgcaaaataccctaactcatacctgcatatttacccacatgtacaaacacacacacatgcacatgcacacacatgcacatgaatgcacagacacaaattcttcggccataaacctggacctctctaatttttgctttgctcatctctccttctctagacggggagccatcggctatgtatccccagtgccaaggaaaaggagctcaatctgtgtttgtggaggaacaaatgaaagaatgaatgcaaagcaaaatgaatgggattatttctaaagttaactatagttagaattctggtttattatctgacaaatttgaaggaacttagtacctgctagacatctaaactgcccaccctcacccccaataacaagttaggattttcgtagttggagatgtgcctagagaaaaataatgagaagctcccctaggctggggcctagcctcttgggcctgtagcaactattcctgtaactcagtattagctatagagcggcaagattcagtgttgcttaaagtggacaggtgggcaggcatggaatgaatgaatctggaatagagcgagaagcaggcttatgcatctgaggcaggcatttctaccatctaaaacaatggggtgactttgcagctctccttggtgaaaagagcacttcgtggatgatacccttttgttccccctcactccctttttattcacccctctcctgtcctgcttaccttttctttttcctgtttcctcttctttatcccccctattcttcattatttttttccctgataaaccccacacagtcctttcttcatttctatttatcgtttaagcttgatgcagcaataatgtctattgtttaaagggcttttccctcccagagggatgagattgacccttatttattcagaatgacttgactcagggctgttataaaatgtgggctgcacaaaactgcaaggtggctggtgcctaccagctacctagataagtggtatctggttgaaggggaggacaggcccctaaggcctctttgagcacattgtctaacctggaagtcatctccttttgaaccacaataaatgagaaatggtcttagcaagacaaaacaatgactataaaaccaggtggctaaaatatggctgaggaatgcagaagagtgcactggtatatcaatctctaattggggaaatgatttggctgcagcacaaaggagcccctctctgtctaacattgggtttgccccttgagctttctgcaggcggagattgatggtggtggcgtgatggtcaaggaatgtgtcctcagatgaggctgagcagaattatttctttgtaaattttctttttcccctttcttcctccctcccttcagatatctcactttctcacctttctttcaccttccttcttttcttgcctgtgatcctttcaaaccactttagtttttttcttatgtggagaacatggttgacccattcaatttcttttcactacagagtagcgttcctgggggctttgatgggacaattgatataatgaatcttgactttggtaggactgttattctgtcttcataaaatgctactcaataaaccagtctctagattatagctctgttaggagtgtttatcactgttgaaaagaagccttataaaaattgtcatctgtgggttattgctaacattatagattatgaatctccatttaaaaaaataaacactgatttttataattctaaaattaatatatatttactgtagaaaatttggcacatggaagtttattaattcaacttattctttggccgacattaactgagtacctgaatacaaaacctgtggtggttctacaaaacgcatttcatgataaacaaaaataaatataattgagcataactgtaccaagcagaaatggttattattaacatatctgtatgctttattctattattttgggaatgtgtatatatatatgtgtgtgtgtgtgtgtgtgtctctgtgtgtgtgtgtgtgtattctattcttgaatatatactatttgtgaatacatatattctattctatatatatattatttgggagatatatgtgtatatatataacatgttaatgtaattttataagtaattattctaatttttccagttcctgttttttttcaaaaattatctcgtagttgcataat[450 bp omitted]cactatacccactctagtggaagggactgcaaagtcacaagcaaaggctgtgggtatataattcagaaacaggggaggtgcaactaattatgaacaataaaacagtctactatagtagactacctgatattttgttatcactaatgtccataggttgatccaagaagactagttttttatcctttctgttaacctctaatgtgccccaatattgataaatgccatgagacctttttccaaacacataggcttcagaagacatcagagtcttctccactgcccattttctgtttggtggttctaatgtatcttcccattgatacttcaactcatcatatctctaggagttttatttcttgcttcacagaagtctcttagaccaggtaagaaactagctctgattttaatgcagagaatgcttatgaccattattttagatgggcttaaaacaatgaagcctgagacctaaaagggccagttccagaaaatcattagcttcaaaatctagacatgagagaaaggttagatggtttgaggatggttctacaaaatataatggagggaggccagaaaaggttagtgggataaggttctcagacacttggattctctaggagcagtaaggaatgaatttagttttttgctttttggaaaatttagaattactgaaatttgctcaagtctgggattctttttctacttgaggttttctcagggctttgaagaatatgcactgcatagggttttggtattcaggcttcattatttttggttccattctttgtaacacctggggtcctggttctctgctgatgggcctcttaattttgtttattttgtgtctgaacctcagattttagtttgtatttattttttgaaataataatctggttactgaattagacaccaagctcatggaaagcttggaccatgcctgctgcactattttctgcctcatgcctgggatatagaacgtgctcaacacattgttgttgacggtgataggttcagggcacaggtatcctgtatcctcagtctttgcatccaaaacttgacaaatccttttctcacccatatattctccctctcatgcaaaccttcttactttagacttatattttgtgtttaacagtcaaacatttcctctaggatgcctagtctatgtagccatttcaaagataattttctaaggaagaaatgcgaccatccaagcaaagtgtactaatgtcaaggaatcagtgagtgctagaaaagccaattcagagtggtcagaggtaacaaggagactaactaaattgattagctttaataacttgtattgtctcccagagagaaaatattcctggccagaattttgtcaggagcttgttgctctaagtcaactatattgcatgaggactcagagagtaagtgtgcaggaaaggagaaatttatttgggaagattttgtagtggaagggatactatgtaaggctaatattacagaatgttagcagaaagccatctgttaccactgtggtttactaccattcagagagtatttattgagaccgtattatatgacatgcactatgataagaagaaggggtacaaaggctagccttcaaggagctcaaggtcaccctaagaataacaggtggctgcctccaggaagatggattgaacatgaagtctattgaacaaagaccctgctcttactgttgcatgaatgaccttgtttaagatgcaagattgactgtagatggcagaggagggggaaagagaataggcctaaatctcagtcagaatagaacttcaatttctccactctcgaatgcagtgagcatagtaagacttttctctactgaggcaaagaaactttggctacagttgaatcagggatttagtgtgaaaaacatgtaggtttaaaagagccaaacacacgtatctgcatctgaaacacacacacacacacacacacacacacacacacacacacacacacacccttttcatcttactaattcctatatttcccattacttgagagataacataatgaattttggatgcaagatgaaaagaaagtcattttatccaaagggatgttatttcaaagacatacatagatgagcactcctgcatatcatgctattcttcacaatgtcattttaaatgatatttactcaaatattagttagtgatgactaactgccagataccatgctagtccttgagaggtacaatggtgggcaaaatgtgatgcatctttggcctcatggagtttatagtctagtgacaggagaaagacatttaccaagtaatcaacaactaaacatgcaatttcaaacttttgaacttgagaagtatggagagccagccctagttgaggggtgatcagggaaacagctccagagggaatgatgcttgacttgacatttgaagaataagaaggtgttaccagacaaagatggatgcagtcttctaggcagaaggttgttacaaagcccaataggtaaaaagaagtatggcaagttagagttcaaggaacagagggtaagtcaggttggagcacagaaggtggaagtggggaggagagggaagaggagacagggcttggtcatgtcatcacctactggtagagtatgatactgatttagaatttatcctaaaagtaatggcagacccttgaacagctataagcaggagaataacatgaccagatttgcttttttaaaggtcatcttggctgtaggacagtgagtggattggagaagcataagaatagatgttaaaatactagttctccaggaaagagttgacagtggactaaatttggactagggcattgaccagggatgtgaagggaagtcggtgaatttgagatatttatagaagatcctatatttgtagcacttgagatgtcaaagaaaaacaaatcaggacttagtaagaagagatttttattcaaaacaattcttgtaagagaaagaaaaggacaattgcaaaacggagaatgctataacaataaagtttgcaaacatctcaatatcaaacagaaacaaaaatgtttttctttcatagggtaaaggaggaggctagcagagataagcagaatctttggggtgggaggaagctggacaaacaaggggaaataacccctggagtctgacaggacagagggtcttgctgtcaccagctgattcccaggagaagctggtaagcaggtacatgttccccttttatgtgtgtgctcagactttgggacaagcagtgttcaggaacctgtagaaatgactgaagtttggttaaggcaaaacagaaggatgagcaattgtgaacactaggttagagaatgtaattcaccatgacctaaaagatgacttcaaagggatcaagcaggagaggtagaatcttctcagtggatcagtcaattcttatcctcttctctctaggggacagttgatatctttaattcatattaggggtttgttttaggggtttcaaagtcttctcacatccttgagttcatttaccttcacaaattcagagaagtctgttagaattgaaagacctaagttagaagtcagttttctagtcttgttattttacatatgaggaaaacacagtctagagagggaaatgtatctaagacatccccattagatggaaaactgtgaccagcacccaggacttccaacatccagtctgggaatgattcctcctttatatggccgtttcctatctgagaattctcatgacattctcatgacacttcagtgtagcactgtagattcctcccatggagcaaactaaggtgctttccacccaccctatcccctatacagctacacacatagatatttactacacacatacacatagatccatgtatcttattctgaaagctgccagatgtcaatttgaaatttaatttaattggttccttgagttttcggttccccatcatcctgctccacctttcgcttagcgtggccatcctggagttcaagatgtagttaaaaggcaagatggtgtgatggatagactgtaggttttggtggcaggcagaattggtttgaaagcctaatagctacatcatcgaagtgaaattatttaagttttctgagccttatatttttttcactcatagggctggataattgtaattgtctcacttgattcttgcaactattaggtgagggtataataatattagccaccattttattgggcatgtactatgtgccagacattgcacaacatgcttaaaggacattgccccatttaatccttatgccataacctgatgaggtgggtaatattaaccctactttaaaatgcttaagagttcccaactctaatagtaataaggactattattcccacaatcatttatttacacttttattcattcacttattattatgaagtgcctattctgtttcaggcattcttctgggtactagggatacagagaataaaaaactgacaaagcttcttgcccccatgcaactaacaatctagtgaggagaaataaaaaataagcagaatacagtaaaatatatgtagcttattagataaatgttcaggacaaaaataaaatagagcaaggggatggagaagagccaggatattgctgtgtgtagtgtagggaggtcatggatgtgaccatcgattgaaaatatattttatcatttcagaaaagacttcctggtagattacatgaactgttaagttaatttgctttttgggaaaatttagcacttggtatatcctctcattcttccctttccccttcctccttcccttcctctcttaatgcctcacacatttgtgatattggctgtgttagttgctgagaatgtaaagaggaatgtttcttttatctgcttgtctacctaccgttcttcctacttaatcccctatttgttccacaaaggattaagacacatacaaacaaataggaatggtccagccttctaattcctctgctcgggctgtgcccatctgctgggggtgatttgggatttggaagctgaactgtcctattggtacccaaaggtaccagtaggggtccaaacacagttcccaagtgcactataggaaatccggatagagttggccctaaggcaccttaccctgcaccccaagatgaacactaaaaatctgttcagctcattaaggggcctcccagcagggtggctccagtctgtgatctttgcagagcaaagtgatgggtgccctcattactgatgtagtaggctcttgacccgtgagctgcagctgcacacagacagctctgctgcccaacacactctcatcccagtcctcaggtggaggagggatagagtttactgggaaatggcaaaaaagggggggaggggtagaaatgggaacattttcaaattaatttcagaaatccagtcttagctctaaacgacagctgtgagtttaatcactgaaactctctttctattcaagagcagcatgtgtctcctgaggagggggagcattatcaagcagttaagtcgttggaagctgcttaggggctggtaggcagtctgcagggaaggggaggatggcttcgcttttggcagtgacctgggtatagtaggtactgcttacctgctatcatctcatgctatctccagcagtccctgaggattgctctgctctgtctatcactgcgcggggtgggaggtaacatcttgtacaacggaagccaatggggccaagaaaacccatgcctcagcatcgggctaaaaaagttaatggatttcttgattttaagggttggggattcaggagggaattttcctttccatctgttaccaccacagcagtaacagcaactgcaactacaacacactccaccaactacaagagctaatgcttatggagcacttcctaactccctaaacattcacgtcttcgttcatttatgatttactgagcatcgactatgtgccatacattgtgctaagcactgggaatagagcaggagctaaggcaggtatcatccttccccttaaggagccagcagtttagtggaaaagactaaatgggcatctgatgaactcaaacctggtccccaaagatgtcagctcacccgttcgaggaatgagtctcagccttggtccgtcacttccagcctaggtgggggaatgtcagctgatatgaaagctttaccctcccctcccatttacctctcagaccccaccctcaggacagtggtatctgtccgtggctcccatctgtgtgttgctgcccatcacttcagaggaaccagaagcacctgccagagagctttatgtcatcagccatgggaacttcttccatgctgtttgttgcactggcctattttagggaaaactctacgcatgaagagggaagctgaaaagacacagggcaaaaagaaatattccccaccccattctttttccccactatgattttcttcttctttgtcttttgttttatctattttatgattttgcttttcattttaacactgtggtgaggggtgggggggtgctttaaaaccagagccacaagcaaacaggaattagatcagggaaataagaaggcagatggaagaatgatttttgagtaaagcccaggcccagtggaatctgccttgaccatgtggtgctcgtgtgggcccacagaaaaaaacccagaacattgcagtagcaaagtgaaagctctgtggactgtgaatgcagattagaattaaaagatgtgcttaccacactgtctctgtctctgtcccagagcctgcctgtgaacgccaagcctccactctcttccccagatcctattctccgtcataagttctccatcacacattctcacctcttccatttgagtctggattaacacagtagatgctgctcttttttgtcatttttcctctaccatgaccaagaatagtagtttaggcaaataaagatactttcttcctacatatcaagaagttccaagcgaggcagcccagagctggtaacagcccaacaatgccgctatggaatatagtccatattttgctccaccacacatagcatgttggctgcgatcctcaggtttgttaccttatggttacaatatggttcccacacatccaggcatcataacctctttacaggctggaggaagaagaaagcacaaagaactttggttgccctccacagagccttgggtactctttcacagacaactctttatatcttgttttattttttgagacggagtttcattgttgatgcggctggagtaaaatggcgcgatcttggctcactgaaacctccgcctcccgggttcaagcgattctcctgcttcagcctcctgagtagctgggattacaggtgcctgccaccatgcctgggtatttttgtattttttagtagagatggggtttcgctatgttggccaggctgctctcgaacccctgacctcaggtgatccaaagtgttgggattgcaggtgtgagccaccacatccagccatctccttgtatcttatgttcccatcccaaaaccaatcactggaggaagggatacaattaccaggcctggtgtggaccaatcatgcttcatcttctgatcttctgtgggtgtggtaggggcctactttctctcagaacaagggctttctaaccctaccttaacaaaccaggcttctgtggtcagagcagaaggggaagcaatgtagttgataagcaatgagcaatgggtgccacttgcctttgaggtcctccttttgcctaggttgggtgccctggcatctcttaagttgggggtggatgtgagagagttatctctttatgccaatattaataattttgatgttcaaaagaagcccacatgcagtttctgacattatgttccacttttaaactctcagagccctagtctctgaattagaattctagttttagaagtttttctgggcttgcttttctattagaaaccatttggttttgtggccttgtttgaaggcaccattgctcactggttaaactgactccatttgcctgaatgattatcgcctgatgtcttgaggcttacagacccagagaaacctttattcttttctcgtaacagttaataataaagcacttgttcccttgtctccttttttttttctgccacagtatttctcaacctactatctttccatcttttgtcagctagtagtaaaattcttctaaaagacacccaagttcaccactgtcctcactttcaacatatagtagagcactttaatttgcaatttttttcttctcttttcttttcttttttttttttttacacattagccattaaccctgcaccactgccctccacatctttgtcttctacatgaaacttctgtaaaaaatgtctgttaacacctagtgttcttctcctggataatgaggaccaaagaataacccaagttctctttgcatgttggcttgcaggaaacttagagttgaaatacacagctcaatcttataaaatcttatgccctaattatcagtgataattttcttctctgagacagtatcttatatctgaatttatattttttctggttatgacttttttttcttttggttagctctgatattttaatttaatatgttttcagtaaacatataaaatcttttgtcaaataaaacaatgtatttaaaagaaaatagctctgtgcagtgggctttgctgttcttattttacatgttaggatattggggaaactaaaagtcagaggtggccaagatgttttcctattaggtacctactctggctgattggcaaatttcaccctggcatgttaggtagagaaaccttgagaatctgcatccctcactgggatagagatgtagttatcaattagcagtgactgttgtaggtttcatggaaagaggagaagtgtgatatctttcaaggacacaattttcctccagaaaatccaggaatcctcattttatatccatgctgaaggctcctagagtagcattcctcctcttccctccctctccctctttttttgctgtaacaacacgtggggagatatgatggaagcgaagaacgaagtggactcttcagctcaatggaaaggcatcaacacttcatttgatttggaagccaaagaagcaaactatgaaaacctcaccagcattgcaagggagtgatagaaatatataactcacaaatcattatagcttctcaacgtctcagtttttaaatttttactgtgtatttttttgttttgaatcactttattgaggtatgactggcatacaaaaagcagaacctatttaatgcatacaacttgatgagtttgagaaaagtacgtactcatgaaaagcatatgttcatgaaagcatcaccacatatctatcacgtcccacccttttatttattattatttttgcaataagaacacttaagatatactctcttagcatatttctaagtatactgtacggtattgttaaccaaaggccactatcgtgtacagtggatctctaggacttattcatcttgtataaccaaaacttggtacccttggactcagctttttttctgaatgataggttagatgctaatttgcctgcggtgcctacagaagttatcagtgacataggggaagataatcttccccagcctttctcccctgtctagtgttcaaattgtaaaattttcttgaactggactaaatgccttaaaaccctggaatgttggtgtctttgaacccttactttgagctctatggagacctagattgtccctggaggtagtgcagcctcatttcaacaaatcaggttgtcaaaatggctaattgtttcctcgcattactctccctgagaattacctttcttagctggcttcccacggaaactaatggtatttggcaactgtctacttccaaatcttcctctagaatattgcaagaatgtctgaaagcacaacatttttggacaggccaagatgccatgggagaaaacacacacacaagcctacgtgctttctccaaaacttggctctgaagacagtcatatggcagtcacaccacaatccaatgaattgttttacctcaggttttggaagtttcactgctcccaatagcttgcattaagccctaaataataataatgaggaaattctattaagaactatttcagaagctagagaatgtaatgattataaataagaaagggaataagccatatcaattgctgcatgtatattgtataaatagcttgttttgcttaagcattagttaagcaacattaaatttaaagagtgtttctattagccaaaggtatgtagtgtgtgatatagaatgattcttggaactttgaccagattttctgtctgggatgggagaaaatctggccagagtgtgtcttgtaggttgatcacaaattcctaatgttcatcaagagtggaattttgacggtataatgaaagcctattttaactatgtaatactattcttattccattatgtaggtaatgaaagtttgtatgtaaataaaagtttaagcttctctttataataatttatcacaggaactgcctgcaaatagattctaacgataagaatgttcttcttttagctataaatccttagttttctacttcttgcaaataaacagcttagttaaataaactcaagacaccatcattaaacaattcaataattaaggtctaatactccttttattattaatcataatcacttttttatttgaattgagctttacttagtttattgcctctattattgtctgagaggagcactcttatattgtctgctttatgcaggcaagtgtggttttaagatgagcttgggtcaaacatcaaagcaaaaaagatttgactataaatcctagcttcctcattaaccagcttggtcacctatcacaaatgattatagcctctcaaagcctcagtttttatttttttgaaaaatatgtaagatactactttatctactttgttcatagtagttattgctgacatgggacaagatgatctttatgctctatttggtgtttgaattatagaatgcttcatgaattggattaattaatgtaaagtttttgaatgttggtgtttgtttaatcagtattctataatactgccaatctcttactccttgctatccacatatcttcctgggtgatctctttcgcttgcacagagtcaacttttgtctgcctggataactccaaattctattccttttgtgcagaatttcccatgagcattaggcacacatagctcattgcttgcctgacatttctaactggatatttcataatcaactctaaatctacatgcccaaaagataactcttatcacatatcagggtatcaaaactagatatctgggagccatccttagctgaacatagtttcttaagaccaaggcacaaaatatttgtgtagaggagacatggggcaaaggagagaagaaaagcaagaacgaggttgtaaagaaccttgtatgccgagtaggaaatgttcatctttattccgaaggcaatggagggatccttcattgaaagccttctgagcaagggtgtaacatggtcagatttaagtcttattaagattgttctaggatcatctaggggatacagtgaagagaactttactgaattcaggcaaggcaaagagaaagctattgcagtcaacctagcattcaaagagaacactccattgtggacaataaaatcctggttgtttaggtctaaactttggccttggaagggctttttatataatctagtaaattttcctttaccaacaaagtaacagatactccagaagtttttaagcttgcccaaagtgactcagctggcagatggcaagtaccaggctgatatcctgcaggttttttgtttgtttgtttgaaatggaggagtctcactctgccacctaggctggagtgcagtgacgcgatctcagttcactgcagcctccgcctcccgggttcaaggaattctcctgcctgtctcctgagtagctgggattacagcatacctggctattttttgtgtttctagtagaggcggggtttcgccatgttggccaggctggtcttgaattcctgacctaaggcgatccacccgcctcggccttccaaagtgctgggattacaggtgtgagccatgtctcccggcctgatatcctgcagttttgagatacagttttgtgtgtttgccttggagaaaaagagaatttcagttgcccacgattcatacatttttatgtggcagcttccttgaaagggaacaaacgttgaagggattcatttggcaacattattcccattttatagatgtgggtttttaggcttgaggaggttgtgacttttctaaagtcatgtaattaattagtggcgaaggtgttatttaatgacagcatctctcaatatccacttccacacctttttttaatgacgctgcactaaggcaagtgcctcctctgggatagtttctgctctgttcactgctataactgcacagaggcctgcagtttgaatgaagatacacacagagataactgaagtttcaactaggaaagggcaactggggcatgtaggggcaagtgtcaactaggaaagggcaactgggtcaccttaccatgatgacttcttcatggtttcagcctggacagcaaccttgcagagtcagaatcctgatcagcagttttgaccagcacatcaagagtggctttacctcccaggcattgatccagcattagtcaagctacaagacactgatgtagaaaaccataatgtcagtttactaatgtagaataagaaataaaatctcagaagacctgagctctcctgtcagcatgacttgcacttgtacttttcctttttgtagagaagctaaattataatcagaaagttgttttggtgagcttggaatcagaaaataggagtttaagtcatctgttcaacatgcagctttcctcagctgtgatagctttttcctgctgtccagtcttcatgtggagcctggtcaatagcaccagaattctaagtctgctggccaaggtgctgcctcctgcagagagagaaagcccatcaaagttgacttcagtgactcccccttcactcacccctcatcttccacggccaaccaactccctttttgattgacacatcatttctttacatacattaatgccttccatattaccacagagagtttgttagactggaaatcattttatttctttgatctacttcatctttctctgcattgagcctttgcgtactaatttatagctattttctcacaggatagtctatttccattatatctatattttctagtggtcctttgcgtttgcctcttttccagactgtatagggcatggtgccaggcacagtttatttgttttattctatatgctgatagtatcatcttttccatctttagatgttttatctcattcagagtgagaggggcacttggtcagtcctttttgcatctcaatagttgatcctcttttgattaaaaaatatttaatttctaataatgtgtgttagagtgaaaataacaggaattattaggcccagtcaagactaacagttcttgactcatagttccaaatcacagttccaagatttccttaacctttctgatcctcacttccctcccaaaaaagtaagaatggctataattacctacctcatggaaattataaggcttcagcaagattaaatgtactcatttatttaacatgcatagtaagaactataaatgttaatttattcttacttacattaggatactgacttatgaaacagagattaaacacattctgcaaaaggactggtattgacaggctttgattctaatagctcaaaagataggccatggcttgctagagaaaatgaaaggatactcaaggctcattagattaaaaggctgctaatgttctctaagctgtaagtagatttttgcccacatttatgaaggttgatttctaatcagattagaaatggcataggctggtggcgtcatctcagagctgccacagcattctcaggagactcagccatatcatgttgggttgctctaagaacacacagagacctttatgctttttcacaaaagcatactctttccctggagtgtgtaactctatgtgttgacctttagtgggataagttcttacaatggagctattctgggtacaaaacatcactactctgtgagatttaggaagataacactgtttgctgattttacaagcccactcgagtgtcttgatgtgtcaaaatgggagtccctgaacacggaggaaattcacaacatcctaagcaattgtaacagatgaccttatctaatgagaactggggaagtcctctccttttagggaaagtgaaaaatgtgaactaaataggactttctgtaggagagatgcctaaccacccatgggcatgctcacttctacttgtgcagagagtttgcacaaccccatctcatttggtcctcacatcttctttgtattcattcactcagctaggaaggggaatggaagaacacattctccaagagtagtgcctttgcaacatatttttcaagtaaagtgttgacacaatttttgttaagactatgatgaaaagacaattgagaaagaattgtgaaagccagatcttgacatatgcataaaagtacatggatgcctggctctgggctgattaatgatctgtggttgttaaaatctagttatgcctccacttgggaggagtaggtaagctcccagggcaggtatgaacctcaccattttagagaggaagaaatctcagtgtcaggatgttaagttagttgccaagacctcaaaactcataaatagcagagccaggaccagggttgaaagtctggtgtttcacattctgccacacctctctggccagtgttgttcgtgaacttcgggactaagactccagctcaaatcctatgcggatgtaggtcaatttcttaacctctctaagcctcagttttctcatccttgatgtggggatcataaatttacttcttacgaagatgaaatgaaataatatatgtaagcagtgtgttcaataattgttagttcctttgcccttcctattttctcaccaaggaaatcaggtgcaataagctttagtgatctgctaaggctagataactggtaaatagtgaaagaagagtgaggagtcaacagatgattctgcttcttatttcacgtgctttagtggtatttacagagccctggtgcaagagtttctctttgtacttagagaagttgattttctttttcctaatttcttcttatttgaactaagaaccctctacttctctccatcccatctgtattttttctgatgagttctgtagaatatgatattgcattcaagcttcatcatacttttggtagcgcctttgcttgctacatgataactgtcattttagctgcaatttttcaaaaatctcctaaaacactcttctcacacaatcggcctctcttaactaacttgtagacaattttgcccttctgctcaagatcttttctgcctcctttagatttcctccctatccatttctgtctcttctccctatgccttgatctaaagcttttgtgcattatgggactttctccgaatccattttgtagtcattcactcatgtaggataaatgcattttttaaagcactttcattttcattttacatgaaagagaacacttgggtactggtgaaatgcttaggtcagcaatccttttgggaagatacacatgaggggtattatgtatctcgtctttccctctttcaacattttctaattcaattctatataataaatatttactgagtatctactctctgctgggtattgtgctaggttcaggggatatataactgaatcagacagaacccctttctttacagagcatatatgatgatgtcatctcaaggggagcccaggatttcaggtcacctatgtataaagtgagaaataaaggctggctaggagtcagccatgggaaggggatagaataagttgaacattcatggtaaagagaatactgtattcaagatcctaaagcataatatgttggaaaacagaaaatacagtatggccagaaggcagaactcaaaggagaatgagagccagcggatgcggtaggaaatgtggggaagggtagataaagaagttagggggtttattctcaagacaatgagaaattattgaaagagctaaatgaggaattggtataatatgaaatttaaaaaaattatcctaattgcagtggtcagatgggacaggaggcaggcagcaagtggagaaacagaagacacacagtaaaggagccaacctagactcagtggtaacagagatagcgataagtgaacagatgagaaagatctgggtttagaaatggcaggacatgctgatgattgagctatagaggaagaggaaaagaggggagtcaaatacctgtctatgcactgttcataggagatttaatctagtcaactgttttgagctaaaatgtgaaaatacaaatgccatggccagagcaaccataactattaattagcagcaacccttggcaccttcacccaaagcaatcactatgctgggaatatcagactctgcagtagaaccaaatccaggacatccgtgtacagcctactcacatcacagcatctaactgtgttcacataaaaggcagtgtgaggcataacgacccaactcagaaatgccttttttttctggatgttcttttcctcacaaaacatcaaataagagagtctggccacattctgatgatttctcttagaaacttagagaaggggagaacaataatttcctaaggaagtgaaccaattgaattgtcagatgggctgagcagtgacttcttcctggctctactgtgggcctcctgatggatggacatgggccctgtggtaaagagatggttctagaaatgcacagaaactatcgattccaagttgacaaatgagaaacaaatccaatctcaccagccaatcgggactcatcattttgccaaaacaatgcccatagattgcctaccactattattaagaaaagcttttatgctcatttcaccttcagtgcccttgatccaaggtctcagatttatcctagtttcattttcagtgaagtattgatttgataaaagaaacgagtcctgctgctgattgcttagacacttgttagtttcacctgcatatgtaaggtggagttggctgtagttcaagcaatagaaagaagaggtactattttaacaacagttttcaaatctgaagctgatgttctggaaaaattagagccatcggtttattttattgtttcatttataatctcagtgtgcatgtatcttaattctttgggaatagagaaatggcttcagagaggctggctgaatggggaggcagaaacatccaactctgtccctctgggcttctatctccctggggttcctttcacttttcctccaactttgtttctttaggccctggagctaatgcaggaattgccaaaaacatacctatgtggcacacaggtcctgcatgttcttgttctagtaagtggtgtgaatgtgctgtctctagaattatcttgtcctgtctcatcaagaaaatcccctgcagatgtgaaaccctcaagcaattttctctatctgaagatcaggctgcattatttatttatagttccttcagcctccaaaagccctggctgaccctcagtctttgagaacagcacctctgtaaacagatgaaagggattccctgtctggaatgtcatggaaggttccatgaatctagcttccgctaataccaaccattctagaggataaagcccaccactgcaaaagtgtgatccagcctcacacactgccttgcaaatattcttcaggccaactgatgggtgaaggccaggtttgagaacagcacctttgtagcccatgaagtttcttgacacatttagcctcaaacacttgcagagcagatatagtcgatatatcctgggttcatgaatgacaaaacttttcttcatgctgaaaggccaatcataggaacctcaagtttggaggaagtcgcaaacgtaggagagtaggtgatcttgttatgcttaatatctagtgtgatgctggaggaaagacagccaaattggaaagttggggtgagataggatgtgtcttttccatatgtttaaaggatagtatgctgacaagatattattaaggctacaataaggcaattgaggaagctgtatgtcaataaggtcttgagatactcagagagattagacaaagcagagtaatattttcacctgcttaccctcctcttcccccaaaccataccaatgaacaacatgggccccagccctaaattcacaatctctgatgtaagagcctgactaagcatactggcattaaacataaggatgtttgtgtaggcaaaaacccccaaacaattattttagttatctcaccatgttttcatgtctgtttatgaagactcaggcttcctaggctctctgagggccagaggtctcagagctcaggaggtaactagcattggcccttcctttagtttctctttgatagcttattacttaaggaccccaggggaacagtttcccagaattctaccatgacaatttcacaatattgaaaatatattaaactgacattaacactgacatgcataattcctaccaaagcggggaggccgttttgtcatgcggcttaggtggaggagagatagtaagagctgttaggctctctgaagcctcttagataaaagaagtccttagctttgactataataccagctatgctcaagcctttttccccccactatattctttacaatttcacagttaatctctgcattatggttctctgtagccagaagacattgcagacagggaattgagaggatgcttgagttaatctgcagggtctaaggtggtaaaggcaattcagctaccctcatagcatccccgatgttccgaagaaaggaagcagagcatatgttttacatggggataaattctctttatagctaattaattacaaattgccccccagtgtggtgatgtgcacttggggatagattaactcaggggaggagtccagctgctaattcttttttttctccctccctgtccctccttgtgctcccctcctccttgctccctatttcttggaggctgtgtctcctatcgctctgtttgtacagctagcgctaatctaaaatcacagttattagatcacattaagctcctcaaagtgggtgaagcatctgtgagtgtctcattaagtcctggacacacatagtcttgccacccctctctaattaagagattcccactcttccagcactgctgactgcttcctaaagaaagtgtgcctgccctggaggggacggaagggggaaggagtgaggtaaagtaagggtgagtcttctccatagaccgtgaccttgcccagcagtgtggcctgctggaggagcagcagtagcacctgggagcttgttagaaatgcaaaatctgagccccatctcagacctattcaattgcattttgtagtttaataagacctccaggtgattcatgtacacggcaaagcatgagaagcactgaaccaggaaatggatagaggagtggatcccaggatgcaaactggcagaatcccagttgttaggagatcacgccacaggcagaattcatctcagcagaaaccgaagtcaccaatggcaagtgttcgtgtatttgtgacattccttgggaattgtgtttgtccttgcacttgcgattttgccttttaaaagagcattttggggccaggcgcggtggctcatgcctgtaatcccagcactttgggaggccccgaggcaggcagatggcttgaggccaggagtttgaaaccagcctgggcaacagggtgaaaccctgtttggtttcatctctactaaaaatacaaagattagctgggtatggtggcacatgcccatagtccagccactcgggaggctgaggcaccagaatcacttgaacccaggaggcggaggttgcagtgagctgagatggcaccactgcccaccagcctgagcacagagtgagattctgtcttttaaaaaagtattttgaaagagtaaaaggagaataataatgtcattggacacatttagaacctatgtatgccaagcattgggagtagaatgcaaggcaaacatggctcttaagaaattcacagggaaggaagattctgaaataatctctctgttcagggctctatggggattcttaaatattgggcttatatgtcttggaagaagagacattaaagtgagattttaagtaagaaaaagtataggcgtgggaagggtgtagcaggcagaagaagcagtgtggatagaggcccagggataggaagagccttgccctcagggctagttcagattggctgcaatgtggggcctgaccagagagagatggtgcttggctgcaagggtgggccagggtcatttcacgcagggggttgtaagcctggtcattaggagctttattctaaggacatcaggaagctgatgaatttttaacagagaattctgagcaggagatgtcaatgaatgtcctgattgtcatccaggtgccagctgcattgactcagcattggcccacgcacactgcaggctgagggtgtggtgtacacactctgctgcttccctggtgacagcattccaccgactctgcccttagatacagtgaccccagatgtcaattcagaaaccacacacccacgttacacagtctgtaagtgaccagccactcaggtgaaacaggagacttgagtgatggcagcaaaatgaattgcctccaaattcaactgaatatgaaaacatggatgggttctcatttcccttcaacaaggaagttccatgtctcaagcactcttttagttactagggatagatacaacagtgagcaaaacagaaaaaaaaaattctgtatttctggagcttacatttggggttagcggctgggtgacttgtatcgatttccatcattatgtccttaatttcacagacgctgaaactgctctggtttttggctatttagagattgcactctcttcctttgtggcttaagctggtgtcacctttacagtaagatatgttacctgaaagagcttttaagaaaattaaatctattttctcctgcccctgtggattagaggaaaacttcctattgcccagtagcattttttttatgctctcagtgaataatgatgataatggcagctgagatttgaatggtaacttgggtctaagtactgcatgtgatacatttagtcagtccccacaaacctgattagaaaggaattacctccagcattttacagaagaggaaatggaagcttagagcagtgggtaacttacccaggttgaaattggcagagctgaggtccaaatcagagaaattcagcatcgatggtgcaatagactctaggaagtggcctcatatatggtctagtcaatagaagaagccagaaaacgcttttcagagaatgagatctagtcttgtcaccttcttcacttaccaccttttcttggcttcccaaggctcaaagaataatatgtaggaactgctaaaagataaactggggcacattcaaattttaaggagtttatttgagcattcagcaattcatgaatcaggcaacatgagacttgggctgttcagagctccatgacaagggtgtgaggggaaaccttataaggtgtttacagaagcacaggaaagaaaatgtttgattggttaaaatggaagtttgtagttcgaggttaggcgttagtttcggattgttaagctcgagttttgcttttctaggctatgactctactctgagttgggttttggtttgcttaggtaggaacccaccacactggagctgactcagcctaatggtctcccagttaattattttaacactatggtggggttacaaggctctgtaccagttggcctccgtttctttgttcagccccagtcctgggtactccccaccccacaccgttctcctcactcccagccacacaggccttctttcagtccttaatatttcccctgtttctttctaccacacaggctttgcacattctcttctcaatgcctaggatatgtcttcttcacatattttctcaaacacaaatgcagatctcagtttcaaggtaatttgctcttggaagcagtccctaacttctctaactacatcaaatcccactcttcagttagttccacctttcaattgcaattaacaaaattgtaattttatatttagtagtgcagtggttttcaaagtgcgactgccacaccagtggcatcagtatcacctggcaacctgttagaagtagaaattttcccactccactctagacctactgaaccagaaactctggaggtgggtggggcccagcaatctgagttttaccaagttgtcctactgattttaatgcactgtgaactcgataaccaccatttcagtatacactttttttttttttttgagacagagtctcactgtgttgccctgtatccacacctttttataatatgcttttggaggttttcccatcaagaggtggaatatatttctctacttatttaaaatacctgactttggacttatgttgtctagtaaaaggcagcaaagttacattgtgccagttccaagcctagatgtcaagaggctctatgctcttccatttactctcatggaatgcccaggctaaagtgaagtggcacgatcatagctcactgtcacccccgggctaaattctcccacctcagacttccaagtagctgggactatgggtgtgcaccaccatgcctggctagtttttgtatttttttttttttttttttagaaatggggtcttgctatgtcgcccagactgttttcaaactcctagcctcaagcaattctcccaccttggcctcccaaagtggtgggattacaggtgtgagccactgagcccagtctagcgcatgcctttaatggatgccattcttccctcataggctgttggttctatcaggacagagactgagttgttgttgattctctcttgatacccttacttgctattcagtacatgttaggtatccaattaatagttgtttagtcaataaatgagtgagcacacttgacttttgtaatgtctttttaaagaggtattattttacagataaaaaacacctgaggctttgggagttctattgactgctaggtgtgagttatgttgggtcttgtgaatttacaagtttcttctttggagaaaatagcaaccgtagcagctctaggtgcaaaacatctttgatgaagagattccattggtatttcatggataggctgaggaaaggtacttagtagcagtcccctaccaacctgaaataaacctgttttgcttccttccttactcaagcatttctcaagtatactatagctgatcttggcattaccaaaatgaatactatcctcagaaagcttaaattatctgtatgtttacctatctgctgtgtgtatgtagatttcctatagatacacatttttctaaaaaatgctaggcaggcagtgacatatgcaagagaataataatcaaattagtaccaaatacttccagttgaaaaacatagattatgtatttacatgatggttttggacatggaaagtatgagagatatttctcacaaggctgcttatagcaagtaaaataccattagggtagtctctttttcattgaattattcatccagagtcattgagggcttccctagacaatgtttatgtattttgtgtggaaagtataatatccaagaaaaaccattttcatattttttaacacttttaaatggttcactagccgggtgcggtggctcatgtctgtaatcctagcactttaggaggctgaggtgggcagatcacctgaggtcaagagtttgagactagcctggtaaacgtggcaaaaccctatctctactaaagatacaaaaattagtcgggcatggtggcatgcacctgtaatcccaactactcaggaggctgaggcaggagaatcacttaaaccagggaggtggaggctgcagtgagccaagatcgtgccactgtacttggctctgtacaagatcagcctgggtgacagagcctgggtggctctgatcgcccaagctcagcctgggtgacagactgggattctgtctcaaaaaaaaaaaaaaaaaaaaggttcactgtaaaatgaaagttttgttgtacttgctttttaaaatcacatattccattctccctcacccttgctccaacttttaaaaattgactttgtttaaaaaacaaaaaacagctgtacttggcagctggtttggaaacagcattgaagaactgaggaatttgcacaattaacagctatacatagatactggttctaggatgaaaatgtttaacggtgtgccaccaactctgttccgtgtaatagactgattaaaatcttatttacatttcttccaagttcttacaaatcctatatttctccttaattttcatttggtgggttattagatttggttgaagggaaagcgaatgctgtttaagtgtttaacaggctgttttctctactcagctgatgactgttatatttcacatttactctgaatttgaaaactagctttgcaatctcagcagaacttgttactctcatctgaatgtgccttgcctccaccttaaaacaaacctgaatcttaagactgatggttcagattttcataacaatgattaaaataggattctgggtggagcacagtgcctcacgcctttaatcctggcactttgggaggccgaggggggcagactgcctgagctcaggaactagagaccagcctaggtaacatggttaaaccccatctctactaaaatacaaaagaaattagccgaatgtggcaatgtgcacctgtagtcccagctactcaggaggctgaggcaggagaattgcttgaacttgggaggcagaggttgcagtgagttgagatcgccactgcactccagcctgggcgacagagagagattccatctcttaaaaaaaaaaaaaggattctgcatgacaaattaattagcaatcatgtacctcccatgtgctaggcagagcccagtgttaggaaaggctaggcctcaggaaaggcatagtgtctgtcttcaaggtatggagtctgtctatgctagtcctcaggaaaggcatggtgtatctgtcttcaaaacactgaaactctgcatttcccaaaggaggatggctaaaggatgagattcacataatgacattgtgaatgcagtgtggtatcctgggtcggctcctgaaacagaaacaagacatgagtggaaaaactgtgaataaaaaatgtgaataaattctggggtttggttaatggtaatatgccattgttaatttcttagttttgacaaatgtaccattgttgtgtaagaggttaatatttggcaaaattgggtgaagggcatatgggagcttacattagattcataacttttagatttgtaacttttctataaacctaaacttccaaaataaaatgtttatttttaaataaaagcactaggattctagtaaagacttactggaaagctcctgggttatttatgggaaataattattttcaggaaagcaccccattcttgccctccctccctgcagccttagaggatgtgtgaagaattaactggtcactgggagaatgaagttatcttttgtggataagggctgtgcaaaatgaacatagccttgtgaagtgggaattagggccacatctggagaattggtacctgctcaccactttataattgtgtggcttcgggtcagttaatgtatctgagcctcaggttttttaatctgtacaatgaacgtattgttttgcttatgcagacaatgggactactctaatagcgaatttaaaataatgttgtaaaagtgctgtaatcactgtgctctaaaaatgtaagaaaggtacttaaaccttccagccatggccaacatgactaatgacagctgagtggtacttctaggtacttcccagacttgagccttcaacaacctgaactccattgctttattgaagatggagagacaaagctttcctatgaaaaaaatggccaaatgtgtgttttatcctcctctggtggatagtccaagcattgcagcctcttattggacttgagcattatctgcaagagcagttccagacagctcttatgtattgcagtcgctctgctccctgcattccaccttcagggcagctccatccgtttttctttcttatggtgcctcaaatggccttacaacaacagcgtactattaaatgtatcattttttgagaatgcgctaatgcttttccccttatacctctagggtttactttgtcattctgtccttttatggtttatttcaacatacttagcataaagcctagagtggtgggatgcaatatcttaccttagctgaattgtggcctggatcatcagtgtccttcgcaaagaagtatagctgtagattctccctggaggaaaaacccatttaatatttagtttcatctcctttcattttgttcttggtgtaccagaaaagcagcaatgctggctcaggaaagagggacttttcagcaattcatttacctccctagttttgaccttcctcagctggatgtaggaaaaaaagatgttctcatcctgacttcacccacaccacaaatgtacatttagtacctcatcctccggaccagatgttaggcactttaggttcaaagggttgctgcccacaagagttactaactgggaagactgaggcaatgcattaaaaaagctcacactctgcctcatgtaatcaatgccatctggtggtatttccgcttgttggtaataggtagtgataacaacaagaatgataacaacgacaaacattaagtcagctctgtgaaccagcctctaaccaggtgcattatatacgatatctcttttgatatgtccaacaatactagaaggtaatactctttaagatatttttgcaaatgaggacactggggcttgatgaagttaaataacttacccagatataaccattgtaagcagaggagtaaatattttgattacataaatatatcgctgagttctgtcattcagtcttttctcatgacttttcctcatttgtgtcacacatcactcatcagtcttggcatatcatttttcctctggagattctgaaattggcctcgcattgcttcttagccctgactctaagcagccatgatttcttgattagggttggcatagaagataaatcctattttccattcagcgaataaatgtttgttgaaagaaaaaaggcaaaaaattcctggctgaggtgtttaaggaaaagcttaacagaaggagtagaaatttgtctcagccttggaagaaaggtgtagggcctggtaagcaaagtttattatgatagtagcttgattattgagtgcttactttctgtcagcttttgactatagccactgtcaatccatttaaagccacagcatttctagatgatatgtcctattagtatgcccactttacagaagagaaacagaagcacagagagttaagtagcttgtgcaaaatcacatagtctgttcaaggcaaagccaggacccagagcctgcagtcttttttttttttttttttttttttgagacggagtttcgctcttgttgccctggctggagtgcaacggaacaatcttggctcactgcaacaacctctttctcccaggttctagtgattcttctgcctcagcctcctgagtagctgggactaggcgcccaccaccacacctggctaattttgtatttttagtagagatggggtttctccatgttagtcaggctggttttgaactcccgacctcaggtgatccgcccgcctcggcctcccaaagtgctgggattacaggtgtaagccactgcgccccacctgagcctgtagtcttaatacaccatactattttaagagagcagagatgtctgtttactgatgtattctaagggtctggaacatagtaggtgctttatatatagcgaatgaataaaaataccctctttctttggtaaaataaaagaggaaaggcattctagatggggaaaatagcaaaagcaatgatgaagagataccaatgatttgttagtgataaatggatttttatacagcaagaattgaacatacatttggcaaggcggattggagccagcctaaagagtttagactttttgtttagctctcattatcagaaatcgtcacttcctacctgtccaggtttgcataaaccatggatgctctgttttatggtcccatataatgaagattatgtgtaattacttcatagtggattgcactctagcaaaattaactgtccatatttcttctcatgagccctttgcgttaataaatgatgcatttgaggaggcaaaaatggttgggattttctgtgggggaattcctcatgaggagataggaggaatcatggaaaatacctggttctaacaagatcttgattattgacatctgtttctttggcttttcaaggtagtaattaccaaacagagtagtatagatcaccgtaatgacatatttggaattttctgagcaactcatgtttcatgtaaattgaggtatttcgatgtgtttcatcatattagcaccatagaatgccatatctagaactggggaaaggaaattattcataaaaaacaatcttcatggagaattcagctagagaaaaagacggaaatgaatcaaaattccccgcaatcgctcttttccacccaccattcacaatatgtgtttcttcttgagacctcaatatcctgaaagaaaatcctctgtctcagaaagtggaattaatccaggtaatattttgactggattttgactggtaatatcagctgttgctgataaagtcaagattaatgattccttggctaccagtgggctgagagtgtgaaagtcaaaacctgttagaaaccaggggaattgcccatgaaataagatggctttgtgaatgcgtaggtgactctgatttccagaggggattttgcagtaaatcaatccttctaagatatttagcttgtttaactcaatgacattttcattcataatgcttttatttctcatctcaagcaggagagacagtatcagttctgcacaaaactgagcttgaacttttacttgattgtattttcccatctataaactcttatcagggtgctaaaactgggaataaaacctagcagtttgaaaaaatataatcattttattaatgaaagagtctgtggcttgtggtagagtacacattggggcctcatttgaagaattaacaaggattaaggaagagctgcttttcatgagtgcttctctcaggaatatctgtacgtaaacatattagaaatgagtgctggtgagcactttttggacagcatttgatgtaagccctgggagaaagatgaaaaataacaacctgatggtatttagagtttattcatacatttttgtgtatattgtctcattgtaattctcataatagtttgtatcaagcagggtgttattatcatcattttacagatagggaaattgaggctcagatggattcatttactcaccttgggtcctgcagaggaaaagtgaaagcaagtgtttaaacgttgacactcagatctcttactccaaagaccattctctttattattaaactattgattagcagtgattcacaaaggtctgttttgtctcctacaaatgtgtcattgtgtatgcatgactgaacctgtcttcttaggaaatcacgatgtatcggtggttcctgatttcttttttagcacataacatacctttctgaccctgccacctaatgcaaagtgtactactattcactcattctgttcttgcattttgtagattccaaaagcattcattttcacacctactatgggagacggagttaggtaagggaacggacgagcgtagacttgaatagcagctctttttcttaccagcggggactttgcctctcagaaagctacgcaatctctttgagtctcagtttcctcactcataatatgaaactgagagtagtactgactgtatatttttgtaagaataatgtctgtcatcccctagcccattggaggtgtcaacacatgggggtgagttaaaaagagaagggtaagacagtctccatcatgaatacatacttagtccaaagggcgggggaagaagcaaaagtattgcaatcagtgctgtttcctcagttgaataattaatgtaataatactgtttacccaaaaaggataaaatgggataatgcatggagaacacttagaatcatgcctggcacatagtaagtgctcaataatttttagctctaatcatagtaattagtaagtgctccatcagaggcttgcactggtactatggttgctctgaggcaaaagcttcaatcattgggctaagtcagagaaggcatcacaaaaacagtgccatttgaatttagtcttgaggcatgtggaggagccttccatgctgtccagagttcttcaccctgatggctgatttcataaataagcttaagtgcaatgtgtaggaaaattggagtgaaagttggcaatggcgggagtgctggtatgtgttggagtaagggtggcagggactacaatgtcactgccaacaaatggcaaattttatggaaattaaaatatcctgcaaagtgcggattcaaggcaatgctgtcccctttgctacaggtccactgcattaatcacatcctttattacaagtgtcaacacatgattgggagcaaaattctttgaggcttaactgtaaaggaagaaagggataatggcacaaatgctgacctccattcaaatcttgccttaccactaactagctgcgtgatcttggagtaattgcattgcctttctgaggtttcattccccagatcttcaaaggaagtgacaattatataccttgaaatgttgttgtaagcatttgagataataggcatacagtgtgtggtgttttggtagattctcagaaaaataaaaatactatatataattataaatatgattctaatttattttataaattataatatatttacaattatagctaaataccaagcactgtgttaagagctttataggaactatctcctgtaatgatgacatgattaataatgacacatgatggtgatatgattgacagaaagatatcagcaggcccagatggaggatatagagttcttttaatgacaaggatgcagaaacatacggagattgtatagtacctagttttaaagcagcatgcacctagagagaggtgcagctttctgggtctcccagtgtttccctgggacacacagctggggataataccacctacctggagtaaggattctattgggtgcaagaagctccctttgctgtcacaagggtgatttaatcccttggcatttcttccttcacatctgactgttctgggaatctgttgcaacttagagttgcaaggaatgaatgcgaagacaccctaggacatttctgatagttgactgtgacactaggtgatgagcatgtcagttcctcaggatcattccttgggagaactggctttaggtctgtctaatgttccccactacagagcactcagtaacttacccaagatcacacagccagtacatggaaacattaggatctaaacatgatctaagtgttcctaatgaccatgccatatccagttaagaattgaattgtgcatacaatttacaaactagttaagagtagagggaggaaagccaaacatcaacttccaaagcaacagaagttagatattctataataaagttatcggttgcatgttgccggcagaagtaatgaccaaaggagttagagaagacagatgaccaagggctggaatagctgttgaggaggaagtacattcctggcatgcaaatgattcattgcaggagggcttaccacatctgatataccacgaggcttccttgctttccagctgaaatacaaccacaacttcaccctcactttcctttcccgttaagctgcccacctatcacactccaaaacaacatgtgggaaacataccttaaacagcttttaaacttttcttaattctccccccaccacctcttctggctccatagagaataacaattgctaagcttaaaacatgttacaaaaatgttaagaattcttttctcacgttgccaaagtgactactggcttagaagaaagttggaaataagtggtgaaaagcagcttagcagaggggaaatgcgtggtcatttcctgaatgtaaaaaacacctagggttgggataatgtgaaaaagagacagtgattagatcaggcttccaagagttttcgagaggagtgcaccattagaccttgctcagcgagccaccgtccaaggctccctgatcagtctatttggctaagagacaaatgtgccaacctccccagcctcactcaaggactgaggaatcaatatctgggggcatacttgcaaacaattcataaatcttatgtaaagggatttagacaagatttgctttgctagtgaagggagtgggtagaagaattatttaacctgcagctgggcaggttaactagagagaggaagctaaatgtatgctatggtcacctctgtagaggaagagagcacagaaaattttaccttttcctggattaccttcccttcttgtttgcctggtgtcctttttttgttttgtttgtttgaaatggagtttcactcttgttgcccaggctggagtgcaatggcgcaatcttggctcactgcaacctccacctcctgggttcaagaaattctcctgtgtcagcctcctgagtagctaggattataggtatgcaccactacacccggctaatgttctatttttagtagacatggggtttctccatgttggtcaggctggtctcgaactcttgagctcaggtgatccgcctgcctcggcctcccaaagtgctgggattacaggcatgagccaccgagcccagctgcctggtgtacttttaattattcttgaagatccaaataattgcttctcttggaagctacctttcacaggcagacttcatagcttccatatttgttcttgaatgaactccataggttacaaggatttcctcacaagtctgtttctcctgctagagtcactgagattgtgatactaaacagtgacttactcatctttgtattgctactctctagtagagtgagtttactggttaaagcattttcattaaatgtttgttaagtgaataaatgttgatatatatatatatacacacacacacacatacatatatacatatatatctttatatattctcaccttcccccatccattatttctttggctaaggccacctggattttctctgttttcatctccatatctatagactgcatagacctctcacacaaatttgcattgctagttgaggtgttctttgagcttctcagtggttatgacaaaaaggactttagcagtttgtgactgtgccctggaatccttcagcagactgaaataccttcagctgaaggagatggtgtttatgcagaagcccagcacctagcccatcaagcagtctgaggtttcagttggtgccagagataactccagtgagagaactcggtctaggtttttagaagttcttccccagctaaagatgacatcttaatatataaaggtttaataatcatggatggtcctttgtagacatctattgctgtggaaactctagttctctttaccttgagtagcttcttaaaaagaaaaataaagagaagaactagcagtgggaagggagaaggggtatcaggttgtataagcaaagtgatttctctggcttatgcttctataaatttgtttataaccacaaacctctggtaacagggcatttgcagaaggaaaatatttatagaagtctaccttgccaattacattgcaaaaaataaattgcctttagagtccttaaaaaaattcaaatatgttttccctctccactgccacccccacatcaataatttgcagctcgaggtctatgtctaaaggataagagtttccacaagttgattgtggatatctgaaatcaaatttaattacatgtgatggatcaacttcttgaactcccatatttctttcattgtcttcttcggattccatgcctcacctttgtggaaactgaactatagagaaatgataacatgactcagagccagccctgcaatcaagggggagtcatctaacccaaattggtgagttcaggtcagcagcatatagtgtcttggaaagagcatgggctttgcggtcagatagacctccttgaatttgaaacccagactgttattaattatattgggcagaattcttaaactctcactctcctcatcttttaaaatgaggtttgaaattcatcatggagctagcatgatgatttactagggaacatttctctgggtatcaaggtcctcaacactcagattgcacttgctctccaacagaatttcccagtaattccctatgctagttttcttttgctgcataacaaattactagggacttagctgcttaaaacaacacacattgattacctcaccatttctgtaggtcctaggtccaggcatgaattagttgggttctttgctttaaaactgcacaaagatgcaatcaagcacagggttgtgatctcatctgaggcttgggatcttgttccaagctcacacggttagcaggatttaattccctgaagttgtaagactgaggccctcagcttgtagaagctgctcagttccctgacatgtggcctttccataggtgtttcataatatagcagcttcttcaaagttagtggtaaaggcagtaaagaaatacatttacatttatatttactaatgtaatcacaggaataacatcctatcacctttgccccattgtattggttaaaagcaagtcacaggattcccacccatcctcaagggaggggaatcacatgaaagtgtgaatatcaagaggtgaagaggaccgtgtcaccctagggtctatctaccacactgtcaacgtgcaatacccctggcatgtgtcgcagagcgccctcttgtctgtgtgggttactaattgttacagtgaaattagattcctctttccaaagaagtcagagttgtgaaatgcttgggaaactatgagctgtttccccatcccttactggtgtagacaaaaataactgatacagggcttttatttcctgtgggttcacacttagtctcggaatgctttaaaagacaacacactagacagaagctaacatttggtcagtgtcagaaagtgttataacacctattcaccattcttgaactatattatatcccagtgggctagaagtatgggtttgtctagcaccattttaagcttagtagagagaactcatctcagccttgtccctgggtcccttgaagtacaagtgtccttagtaaggacaatgacaattcatgtggaattaattagtagaaattcccacatataaaatttgtccttcactctatttcttaacaggaaaaatcaaatcaaatacattaacaccaattagatgacaacataatcgaaaacaaatgtgtttaccaaaaaaaaaaaaaaaaaagtacagataggtaactagggaaattgttaacccaacaaagagagactacatgagtctgagtcccttgggaaggataaacatgtttgtaaataaatttatttctctgtcaatatttacttttctttgtgttcctctccatgtgctgagaatttccttctcaggccttcatgattctatgagtgaattactagaaatgctgttagtctcattatttttgtaaaagaacaccttgtgcctgttcttgggctcaatttaagttagagaaaaacaaaattcatgcacatgagagagttcttataagatggaagagacatactattgatctaagacttatttgttttaataggggtccttagtcatgaattatcagtaaaaagcattttatagtaagtgcaattttggcaagaccttgtttctctagttgcataaggaatcactacatgataagaaacaagaaaagtttactggcagaaatagagaaaagatatgtacatctattttatctacctaaacataagtagataaaaatatgtgtaaatagttccttatgtcaggaaactgtgtctgaatatctttctatccttaaaggcccggcacagtgctaagtacatagtacacagtaagcatatagtaaatgtttccatatttcagggacagagtttggacgctaaaatgccaatatttgtttggctatagtgatttaatccaggaaaatagaaattagtttccatgctgtctctggaacttccacaccattctcccagcattttcatctattcaccaaactagaagctctccaaaccccatgttttaaggtttttaaggaggatccattacaaaggcatgattaattaaatcattgtccactggtaattgactcaatctcctccatcttcatctccatctctggaagtctgggggtagggtttaaagttccaaccctctaatcacatggttggtttctttggcagtcagtccccatcctgaagctatctagggtccattaagagttaccttattaggataaactcagattatggttcaaaagggctacttatgaataacaaaagacactctcctccctgtcactcaggaaatttcaaaggattttgaagctcttgtgatagaaaccagggacaaagaccaaatatgtatttcttattatatcacaatatcacaggctgtcgctgtatccaaatttcccccttcctgtaaggaaattaaaataaggccaaccctcatccagtatgaccttgtcgtaacttgattatacctgcaaacatcctatttccaagtaaggtcacatttataggtactgggggctaggacttacacatgtctttttgaaagacacaattcaacccacaacagtaactaattgacttcctttctcctgagctaccctgtgattgaggcagagcaattttctctaaggacatagcactgcaaagatagagcctataatcaaacatcctagttgctctttaggagctcaacctaggtctagcctgctcaatttagtatagttcacttctacgaataatactgaacccaaagcaagactctgacgaggatcgagaaagcagtgacacacctaaccatgctgtaaggcagaatagaagagatataacagagatcaagtgtgtaatctagaaaagggacatattgattatgctgaggaggtaggcatgggaggcagtagccatttgagaggcagaagcagcaggagcaaatgcatagagacaagaaacttccatctattgagtgactggttccacttggctgaagtataaggtaagtttggagggacagggatgccagggtgtggaaacacaggtttttgcttatgagtcttcaatgtctgagaaaaaaaaaaaaggccgcatgggatgttcttgtctatttttgctgttaggtgataaataggcagatatatctaggtatgtgtgtgcgtgttgccaagggatctgtatttatacagatttagtgacaacatttattaacacaacggggtgataggctttggcatcaggatgttgtaatagttgtaatttggcttgtatcaacatccctatttttgcagatgagtaaactgtggctttgaacaataaggacctcacccagggtcgcccagcgctggtaaatgttgggtttaggaactgaacccaggtctagctggttccagagcacacattggtgctttccgtggcgtggcctgtaggtgacttctgagggaattcagctccttggtgctgagggcttagccatgattcctttcagagtgagttctccatgtcttctttggccaggttcctgtgctcagggggattttcaaagataatggtgtccactggagggaaatatatcttggagcaaagatgtgcaaggatggttccagattctccattcctatttatgaaaactggcagatttgctgactgtgaacatagtggccaaagggctgaatagatatgagcatttgagagtaaaatgtgttttgggaagctttaaattcttatttttgaaataagataataaatgtccaaatcaaatgggaaattagtgaccaggttaaaaaataaactgaggttttccaactccaagttcagtgtattttctattttgttaaaaaagtaaaagtaaattgcaaagaagatacttggagaggaggaacaaagtaagtaaggcaaggacatgatggatacagggggattaactggggagggaatgtctgtaaagtgtataaattttggggttggggggggtacagctaaaaggagctgtcctaaatcctggcaaaggccctccactttaataagcgttgtaactttctctttcattgttggaggtaacacgtatgaaaggaaagcagcaatcagaacaatgcagtttcccagagggctctttagcagaagtctcctgtggttccatgctgttgttaatgctccccttattttagtctcctggactccctaaatgctttggaccacttgagcaaggccacgttgctaattgtgcagaaccccttcagaggtggcaccgctgagcaagaccaggcaactcaggctctaatgggccttgattgtggtctctggagcaaaaaccacctcttgaaagctgctgtgagacagctattgggaggtttggtaggaagatttagtgctgctctttgaaggatcgatgtctaagctcttcaaaacctcctgacacctcagatggattctaggtggttccccagtgggcacaatctcattatcatccacatacatttatttatctcctaataggggcccatcactgtattatgagggccgcaaagcctagctatggggctaaaacaagcacacatgaagcaatgaatgagtattaactgctgagatgtatatttctgatggcctcttcaaggtgcagagaaagaagatctcctccaagagaattaaatggtcagaattggggaggtaaaaattagaatctgaagaaactaaacatgctttagagagacaggtggttggcatcagaatgaattcctggcaatagggagcaacctgcagacagggaataagaatgtacacagaatggcctgagtagaatagaaaatgtgtgtctcttttgattataacaaggaagaagtcaagtttgtttttagtttgtctgtaacacccactcattcttaccaatttgccttatttgcaaagagacagctgtgcccaggcctttagaaaggaacagtatctaccgtaatttattggtattttattttcattctacagattgagtattccttatctaaaatgcctgggaccagaagtgtttcagattttggatttttttgggtctggggatatttacatgtacataataaaatatcttggagatgggacccaagtctaaacatgaaattcattatgtgtcatatataccttatatacatagctggaaggtaattttatacaatattttaattaattctgaatacctgtcacatgaggtcaggtatgaaattttccacttgtggcatcatgtcagtgctcaaaaagttttgaattttgtagcactttggacttcagagtttcaaattaaggatgctcaacctgtatttatttttacggttaacttctataggcaagtgacactggtttcaatgaaaatgtatgtaaatgaaaagaagtgaagcaatttaaggaaaaagacgaaataataattcaggtagtatatagatggggcaaaaatatgtgatattgacgcaccattgaccaaagtttgggaaaaagaggagtcatagtaaaatgttgatccttgtgttgaagtttctgatcctccttgcactactcaccatagatactccagaaaagtggaagaatgagtcaataaataaatcattcatgacttttccaaaggaaataatccaactatctgctaataagtgtcaaaactagggtaatgacaatgataaaaaggaatcaatccaggtgacacttgagagtaagaaataacaaataacagatcagagttaggtcaatgtttcttaaactttaatatgcacacaaatcatctggggattttattaaaatgcagattctgattcactaggtctggggtggggcctgggattctgcatttctagcaagctcccagggaattccagtgctgctagtcagtgaaccacatgttgagttgtaaaagttctgggtggtatcagagaggggcagaatcacagtgaactgtaaagttttgtgctactttaaaattttgttgaaaatgcaattttaaataagaaattaaaaacaaacttctacccctaaacattctaactcggaggaagttcttttccctgtaaactttagtaatgtccttcaattctataatctcttgttttatttctgtaattcatttttagttacgttttgttcttgattctcataagcataaagtcccgattggctcataataaactctgagtagacgaggcctgtgaaatactctaaaatcatgatttcattaacacgggttgtttgcacttgaggatgaagttgcccaatgttacactgtaatgggcaaaactgctttgcaaactcaagttctctaattctggatgcttttgtgtgatgacttattgctattcccatgtctctataccaatgacaaaacctttcaaccctctgagtttttcccctagctcctgggactatgggtgggagagtctgagggtcatctattgatattgaatgtggcaggagtgagattcctactcctccccttcccttgcccttcttttccaagggcataagaaggaaagcatggagtgtcagccaggctgcatggagctgcctaccagccagaacctgctaattcttattttatggaagtacctgtcatgtttggccaaatctcctacagaaggataaaggaaccaacacagaattcagctcccacactcccctgcagttataaaacttacttagctttatttaatttttaattttttttttaagtttagaagcttcagttgagaactgcaaattaagttgcgttcaatagtcttttccagctcatatgctgctgctaggttgcaattattgctcgacacccttcctcagtgttttgacatcttcgccagcctgagaaactaaaacacaattatttattaattttaggtgagttttcttcaattttaataattcctatactttatttacttatttgtttgtttgtttgtttctttattttgagatggagtctcactctgtcaccaggttggagtgcagtggcgcgatcttggctcactgcaacctccgcctcccgggttcaagcgattctcctgcctcagcctcccgagtagctgggattacaggcgcccgccaccacacccaactaatttttgtatttttagtagagacggagtttcaccacgttggccaagatggtctccatctctggacctcgtgatcaaccctcctcggcctcccaaagtgctgggattacaggcatgagccaccgcgcccggccacttattttcttatttgcatgctttatacctgctattacttagttcctgtgatgtttcccagaaatatggaattagctgtgccagacactatggccagaagactcaacagtcacatagcgttatgatggttaaatgctaggattgaatgttaaataaattttaaagtaaattttaagtggctgcataataatttattgtgtattcactaataataaatcctaagaatctaatatcccaagataaatgagcccaagaatttattcagactatattctgtaatattctgtgtgaacaaagggaataattggatagtttgaggggtaccatgatttcttacatgttgtacaacttaaatattctaagtgtatcttagatcacatgctacaaatttctattatcactattaatagctatcagatattgaactctattaagcatcatgtactttagtcaatatttgaaaccactcattgaggtggatactattatctccactttttaggtgaggaacctaagagtcaaaaacagaggttaagagcaggtgtggtgccttgcccctataatcccagcacttttagaggctgaggcaggcagatcgcttgaggccaggagttcaagaccagcttgggcaacatagtgagacccttgtctctacaaaaaataaaaatacaaaattagctgagtgtggtagtgcacacctgtagtcccacctacttgggaggctgagacagaaggattgcttgagccaagggtttgaggctacagggagctatgatcatgccactacacgctagcctgggtgacagagtgaaaccctgtctctaaaaaaaaagaataaaaaatagaggttaaataactcatgggtaatgagtggccaagcttagattttaactttttaattctaccatccatgttctcaaccattacactacacccatttaatattatcagtagatttatctgtatctatcctgaaggtatttattttcaacctatatacttcctgcataatgtgatttataatcaatatttttattccacccctaatgggtataatgcactatgctcagttctgttgagaaatgcacagaagtaaaagccatggtgcttgtttaagagctttttacaatcttgttaggggtgtggtgtgtacatatatacaaagtttagtttagtagaaggcctcagcatctatacaagttagtaggataaaagctatcccatactcagaaaaaaatttcaaattagtatcatggttaagagcaacttgtctaacctgtggcccatagggcacatgtggcccaggatggctttgaatgtggcccaacacaaattcataaactccttaaaacatcgaggtttttgtattgttttgttttttgcccatcaactatcattactgttagtatattttatgtgtggcctaagataattcttcttccgatgtgacccagggaagccaaaagattggacacccctggaattttacaggaatgaggtgccattgtgagatagggtggcctgacatattctgctaggtcaataagtatctctgatgtggaaaataactaattgtgggttatatcataaactattctctttttaatttgaagacatgttcctttctttaggtatttctcaatttgttaaacaaggccatgtttgatatctgtattttaaaatactctactccccttttatccaagatttcactttcctcagtttcagttatctgaggtaattcctgtatgaaactattaaatggaacattccagaaataaacaacttataagttttaaattgcatctccttctgagtagcaggatgaaatcttgtgccatcctactctgtcctacccagggtatgaattactttttgtccagctggccagttattagattgtgttaacctttggggattcaccaagaaccaatgttatatatgatccaagagtccacttcagtcacacactcacacccagaatgccagaacttgcaagccactgtgtaaaatatagtctggaaattattttatggaacatagttatatggcattatatgaacagttcttcaagcatgtatacatataatgatagctatattattaaactgtgccaattgcctgccctaccctttccacattttaactctgattcctaaactgttagtaaattcagaattctgagtagtgttgtgcaatttcaaaggacctgccctttcatcatactgttctgtctctgattaaataccttctttgtgtagatccttatataacatagagacagatataatccttctaaatggtctcgtaattttgtataaacccgagcagataatagtattgggggatataggatttagagaaatttattctgataactatgagaagaaatttataggtcagtgtggcattatattaatcctttttcatcttatcacacatttggctcagaatataaaatgtgtacagacatgagatctgtacattaggtagttatttatttttctttgaataattcctttctaaaacaaaatgttggtcagcagaggtggtaaaaatgctagattgttggtcttgtttgctaggattcatgacctgtttcataaaggactttgctaggatttgtgacatgctccatgaaggacttaacttgatcagacacattaaacttcggaactgaaagaaatatctgagcttgttcaacccagaggttctcaaacttcagtgtacatcagagaccaactggagagtgtattataatatagtttgctgggtcccatcctaagagtttctgattcagtaggttggggtagggaataagaatgcatttttagcatgttgtcagatgatgctgatgttgctggtctcagagccctactttgaaaaccactggtctattgtaaggctttctttttacctatgagaaaactgaggacatgagggaggccattcatgtacatatattattcaaatcctgttcctttccatccaaaagccctcatgtggtatcctgttgaagtttgaataaaatcccaaatccttattatctagaagatcttgcatgcctgttctctgcccatccttccatatcagagtctccatagagccttacttactttcactgcagttattcaatggacacattcttatttcagcatgaaaaacaactaatatgggcacatggcacagaacaaaagtgaaggtttgacttacagagaatttcaattccatttttcaattcctgccattttcttgggggctccaaatacagctaatataagtcgcatgctgagtgacttgtcagtctatattcccatgtggtgggtccatcttgattcctctgttttatctatcagagagtttgatcctcattataataatagctattcataacatgtattcatcagccatgtactagctactgtgtcaaacagtactgagatttagatgctgacttctgaggctagactctttattcttagaaaataaacaacactgcccctctattatatactgaaataatagtgatgtttgtctaaacaaccctagctggtcaaacaatggcaaccccttcccctggctgctgttttactcaccatttaacaaaaaattaggtggtgcctttggaggaagagaagggagatttaggcggaaggatttttttttaaaaatttatttttgagacagagtctcgttctgtcacccaggctggagtgcagtggcaccatctcagctcactgcaacctttgcttcctgggttcaagtgatcctctcaccttagcatcccaagtaactggaactataggtgcatgccaccactccggactaatttttgtagttttagtagagacagggttttgccatgttgtacaggctgatctcaaacccctagcctcaagtgatccgcccacctcagcctcccaaagtgctgggattacaggcatgagccaccacacccagctgaggttgaagggattcttacaaagacatgtgaagagaataaattgaaaataaatatgattacattaaaactaagctcagtactttaagatgtcatgttctctgacttgataactgaagaatttgtgtgagtcatgagaagaaggtaatttgttgtactttatattttcagctatccttgagaatggtttctgcttcttacattctcaatgatagacaagtctgacacatggagtttactttaaacggttaggcaatcccatgggttgtggcccatagggtgataacaatagaatttccttttgtctgaccttaaaaaaggatatcagataaatactgcttccttggtgcagttaattttaggccaaaatacaattattggtcagatgcacaaattatctctttatttcttaaggattagaaaaaattttgaggaatcctactttcttcctaaagcagatctgaaatagaaataattttatacaagctaatttttccagggtttttgtttgtttcttcttaaaaaactattttaccagaaaatatgaatacgttctgaaactttaccataaaaaattctcatttcttcccttcttttccttttcttttctcttttcttttctttctttctttctttctttctttctttctttctttctttctttctttctctctctctttctttctttccttctttctctttctttctttctttctttctttctttctttctttctttctttctttctttctttctttcttttccttctttcttttttctacctcttcttattttctctcattcaagcattaatgacctatcaattctacagatagttaattcacacttacaatgtgcctgtcatatttattttaaatattgaaactcactagaaccaaagtccaaatatggatgctctgtcgtggtgagtccacttgttacaaggaccctggaaaatgaaatcaacttggatagaaaccaacatagacccaattttatatcattaaaccatcttctattctaaagaacaactgtatgtgtattacatataggcttctaatagaatttctgatggacatatcagcaaatttaattcggtattttaaaaaatacatcctaaacaaaaacagatttttctcaggagtgtgagaatgatacagcatcagataataaatttaatataaataatgatattaaagataaaggaacagaagcaaaatcatttcaaaaatgtagaaacatttaatatagtcagcatatttattaaaagtaatctgaacaagcttagattggagtaggacatttttacctcaaaaacaagaagctaccaagaaactacagcaaacatatatttacattagtaacaaagcaagaatgaatactatcattgtttctattgattattgaagtgaaaaaactagccaatggagtaagacaaaacaaaaaacaaaaaaacagaagcaaaaagattggagaggaatctacagtacttttatttgcagaaagtccataagggtttattggcagactattagaattaaaaataatttccacaagtttgttgggtacaaggtaaacatataaatctaattatcctctccctacaattataattaccaattaaaatgtagaactgaaaaaaaattcatatacaatagtgacaaaaatgtaaggaagctaagaataatcgaataaaagattcaagaccattaggggaaaaatgacaaaatattattgaagattataaagtcctgaataagtcatcaacattgaccatatttatgtatgggtagactcaataacatgaagatgccaattttttctaaattcttctataaatccacacatttccactcaaaactccaacagaactgttcatggaatttgacaagctaactctaaaactcatgtatgatcacggggccaaaaatagccaagacaactcttgggggtggggaaaaacccaagagaaaagacttgcccaactagacatcaaggcatgttttatccccaaattaattaagacagtgggacatcgacacaaaataggcacaccagcctgtgggacacaatagagctcagtaactgttccttacagtatggaaaattgatccttgaccaggtagacattgaaaatcattagttaataaacaaactagtcaacctatgatgctggaataatttcttatctatatgggaaaaaatgaaattagacttcattttatatcacccatgaaaataaattaaggatatataaaaatttaaatgtaaaatgcgaaactttaaaatttttataagaaaataatggtgattagctttacgacctatgtatgggaaagatttcttaaaagaagggaaaaaagcatagatcattaaaaaaatattgatatatttgattacaattatttttaaaacttatgttccagaaagatatgataaattaaaagacgagctacagacttggagaaaacattggcaatgcacccagcacacaaaggattggtattctaaattgtataatgaccccctacatgtgatcaagagaaagaaaaataacccaatgaaaaatgagcaaaggatatgaataagcaaatgacagatgccaaaaccaaaatggatagttaacatataacacataaaagcatgtatagccacactagaaccttgagaatacaaattcaaaaagcattgagatattacttcaaaccaccagagtagcaaaaatgtaccattctgacagtattaagtgttggcagggaggagaactaagagctctcatatcttaaagagtgggaatgtgaattgaggcagccactttgaaatacaatttagcattgaagctacacatgacatttggcctcacaattgcatatttatgtaaacacttaagggaaactctcaggcaatttacattgagctagttattagaatgtacactgcttgttatgtgaaaaaaaatctaaatcagaagagtgcatcaataaattgtggtatctctatataatataataacatccaatactggagcagaacaaatgagagctacatgcaacattagtgaacctcacagtcatactcttgagtgaaaaaagcaaattactgaatatgcaaactgatactatttagataaagcttgtaaacatttaaaataatccaaaatatttcatgtgtagtttcatatatattaataatataaaaacatgcatggacatgacgaatgtcccttttagaaagaagaaagtgggactgttacaagaatattgacctatgcctgtaatattttatttcttcaaaaagaatctgaaacaaatataccagaatgttaggaattaataaaaaccaggttacaggtatgtagatatttattatattattatttctacttgttcgaatgtttgaagtacttcaaaattaaataaagaaccagcctcactgagatgtgtgtgctgagtgctctactaggtttattcacaaagttcttacactccctgctctcaatgggactgatgaaaatgtatgactcaaccaaattatatatgaccgcatagcatgacattcagcctcattgagaaaatgtcaaaattgtgaatgttaaattctaaaatatcaaggctcaactgtagacatacaaaaccaactagggacataaagaataaaaatgaaaacaaaataaaagctgtttaataatagaattcagaacaatatataatctcttcttccctgctaaaatcaggccagagattggcatttgccttcctgaaggcaatagttagcaggaaaaaccacacaggttcatataatacaaaccaaaacaaaacaaccttctcacacgaagagaaaagaatactttgcaaaatggctgctgcatcttcccaaatacatatttcacctccccaaacagattttccatccttgaccttctcgttggaaacctctccttaagcagttacacacagctctgcaaatgttagagtgacatttggactgggcttgcgtactcagcttgcccgctcttctgggcttccccgggggtctgccaagctccagcacattggtattagccttgcaggcctcacctcccagagctagcaataacatttaccagctacagttttctccattttcaaatatttcctctggcccacatgccagtgatccagctcctccatagagtagaacctgaaaggagtggtttaaagaaaggagagccctcctgtaagaacttttaacatttacctttcattaaagattttacttgtggtttaatcgagctctcccactagaattctggtatgtttgggaaaaattaattactaaaatcttacatctctgggaggcggggtacatctttgatcattcttttgtcagtgaaaactctgaaaaacaacgcctctggttggaaaggaatcaaatctgagcttttgccgaaagctttttgcaatcccaagaaatctggattgaccaggaaattctaaatcataactgtagaaacagtttcacagccttgctatgcctaatatgtgacagggactgggtctaaggaccttcataaagtcaggtgcgttgtctctctcatttgttgtatccccagtgcctgaatgaatggatgaggaatgagttgaatagtctcccaaaagctaatgagtcatgagctaatattatccttatttcaccaatgagaaacctgagactcaactgagagatcaagtgacttgtccagtcacagagctaataagtggcaggcctcatatagaggctgagaacttcattgtgctggtgtaatctgtactagtagagatacatatgtgttcaaatgtcatgataagcactggcaaggagaggtaaacatgaataagaacacagttgagtttcaactcataaatgtaggaggaaacaggaaaagagaggatcaccagtagacaaacaccacattaataaatattgcaagcaagatcactgatggatgctaaaattagtggataaaagtttgaggagaataatatttgcataggctcaaagtattttctctaatacatgtatcaactacaaaggaaaatacaatcatttagaagtagagagacctggaacttggaagatcctgactttatcaaataagcaggaaattatcaccaggaacaaggcatgggaatatcatgaaccccttgatagaatgcactgaaaaggacacaatatcatttttatggtgttcttgccaaaaacatgtaacttctctccaatcctgaaaaaacactggacaaaaccaaaatgaggatctttgatacaatatctgactagttctctttaaaaagacatgaaagacaacaaaagactgaggaactattgtagactggaagggagcatggcaaaataatagctattgtgatgtaggatcctagaacagaaaggaagagaaaaacatattaatgggaaaatagtaaaatttgaataaggcctgaagtttaaaatattgaatcaatgtatatttgctatgattgataatcataccatggtaatgtaagaggttattagcattagggggagtaaggtgaggggtataagaaactcagtataatttttataacttttctataagtatgtaagtttgaaataaaaaagtttaaaacaattaaaaaatgagcagaaaatacatttgtccttccagtttgcttacagaattgagagagtcaaatatgtaaactaaactaaagtacacacaaaaaacagtcctgtaggcaccgccgataataaatgtatgtaccagatagaaggccatggaaaagggtggtcatcttacctgggaagagagcacaggtagcactcaggataggcttcatagagaagacgatgctcaaagatttcttatttatccaccatctgttttatagagcatctactatggaccaggcactcttctagaacatagctacatcatggtaaacaaaaaagaaaaggtatctgcattcttggagcttacagcctagaagaagtcagataacacatgagaaaaaaaaaaaaaaaaacaacaccaaacaaaattaattagatattttcggtgttgtcatgaaaaataaatgagctgatgtgatagaatatgctcagggagataggggaattggggaatacctttctgagaagatgatagttaagctatttgggctagggcctgaatgggaaagagccagccgtgcaaaatgaacaaggagcaggtaattccataccaaggaaacagggtggctgaatgcccaaatgcaagaacaaattagtatgtttgtgtttaaggaaacaaaagtaagccagcatgctgggctgtaatggacaaggaggcaatagtagatgatgagctgtaaagtaaggtcaccaggtggctctaagtccaaactggcacacttttgagtaaaaggtggtgctattaataattacaccaggacaacagaagtgaaatgagactgtctggccaaacctggacataagatcatcctttagcaaggaaagaaatcacgtaggacttggtgagccagccaaggagtatgaagttattcccagtgcattaggaagcatgggaagttataacaagggtaggaggtgattgttctggctgccatgtggagaacccactattgagagcaaagaatgaatgtaggggggatcattaggagatgatttcggaagtctagttagtagacagaggatgggggctttgactacaggagtagacttgggagaggagagaactggatgacagtagagtcaatgagccttgcgtgttctcagaagatagactgagaacattttagacaaaaggagcagcctgagcaaagtcacaggggcagggcacgttccaggagccaagagtgtattctatggccaaagtgaaaggaacagcaggggcaggccattggcctggagataagaccaggggctcagatcatatgcgatttagaattcaaggctaagtagtaagaactatggtgccattgaaagtgatatgattagattggttttagaaatatgagtctagtccaactataagagaaaaagataaaatgaacagaaaaatacagtgaaaacagagatagcttttgctagttagagaaataaacaagaagacattttgaggatggtacaataatgtgggagatatttttatttttactggaaattgtccacccattcatcagacacacacttgatcatctagtgttttgcaatataattagttgttgactcaaggactgctgaacagtgtcactgagtcataaagacggctccaagaggaaaactttgggcacaaattaatgctatgtaccctctactttctatcttctgctgcagcgctattcttggcccactcatttctaagttttagcaatatttctcaggctggtgtgcctcacatgcaattctggcaagctaaacatggtgacggagccagataacttgttccctgtagactcataaactcatcagctgtgggctggtaatataatttacaatatactttgccagccctataaaacagcttttttcttgcagagaaatggagccctgacaagaagtgtttatgacttaattttagctgtgttcttcgttgttgctgcagtagtagcctgcgtatgatgcatcctagtcatccgccaggcagttacaactttgttgttgttgtttttggcaagctaaggacaacattagactttgcttaatacctaccccacaatcctatttcaatggtggccatagcatgtacctccatgtttatgaataaatgaatcgagacacagttgttggatacctcacagccgtggcttataccttgatgaaactatatgataccatatccttctagataaagttcctgtaaaatgatattgttagaaggcttgagtggaaaaatctgaaatatgctgtttacagtcaaaatgattatcctcctgctgactagttgttctttattcttctccacagtgtactacaataactatttaccattcatatttcaggctaataaggttacttctattcagccattacataatgtgactgtagctaaaattaaagctccacaaggtaggaaatttgttttattcattgctagatcctcaaggtctggaacaatgcctggaacaatagtatgtactcagaaactacatgttgaataaataagctcaactattgacatattaaatctaccctaatgatttgggaactaatactacaaatagtgtagtcatcttccaagaagagcatattctcctgaggttggccagagggttgatgaattgatgtatcagccctgatacattatatagcatccaacagtcattccaataacatgctaagatctgcaaaactgtaactgcatatttgaattcaaatccagggacagttttttaacctaggtaactctagattctactgtacacaaagttagagttgtgagatttctctttattaattctcttttttctcttagccacatccactaaaaaaggtacttttatttcatgtcctgtatgagttgtatgtaacgtctggctctgtcaccattcctttgtgttctcattccatagctaactttccttaagaagtgttgtaatagcatatatttcagtgttcacaaaaaaacacaaaagcaatgttctgactaggtgactcaatagattttatgtgttttatatatacttatgtatatgtacacatatgtatttaatcatctgtttcacaacattgttgattttgtttttcctgattttggaagcaggattccaaataaggacagtaaaaagcaaactttttcatatctctgtaagaagggaaatcaaggctttaaaatattacctcagtttcctcaggtatgaaataaaaggtatgaatgcaggtaaatttcaactttctttctaactctaaatttctatgcaattcagagacagtaatatgacaacttctatggttctttttcgataaagtgacaagaaactgattttactttaatcagtttatcagacttcttaaattttctttgttggcttgacttttctaggaaattcatcctatatcttagacaacataattttggttcacgttgtatttgtgacccagtttgtccttgtaagttgtatgtatagaattgaggtttgttgaactggcacattgtgaaacaactgccaggaagaaagtatattttcttctgccaccctaaaggatttatctctctgatctggcctcagataatatggaagcacccacattctagtgagtacaactgtgtgtggagcagttcagttatctagcccttcaacatagtcatttggaaatcaaaagcgttaaccactagattagataagacaacaaaatcaagagttcagttgaccattaatcatttttccaaaatcagctcaatgacgttgtgtaataatatttagaataaagcaaaggtaataggtataaaaatccattcatttacagatctatacccacagtcaaacatccttcttgatggttcagagctaaagcctttattcaaattttactaaccagttattgtcaatgataatgagagagtaaatgtattctctggaatactgagaaaaagaatatggcagagtgaggcagcaagctttgagcaaaacaagcaagaatatctacagaacagtgctgttcaagatgaaaagcataactggaccatgatatcaggctcaatcactaaacatagcctgcccatgactgttatgagccattcttaccctcaaagaaatataaaagatttaactttggatttttgaatgcaatctctaccatgattgtgaaagtagatccattgtgtagggagtttgagaacagaagaaagcagaacgtcgcccttatttctctatttaatcaaagtagacttcataatgataaggaagactaacaaagaattgtaattaaccctttacaattatgttccactttacagtttgaattgcagagccctttcaaacatattttcttatgcagtttttaaatatggttcaagatttacgtaagggaaaagtaaggtcccacggttgcatgcccgtgagtagtggagctgggacctcctaacaccaaggctctttctactgaccagtgctacctgcaacatggaagtatcctctcatggaagcaatgggccacctctagacctcaaggaaattcaaacacatatgtacatgcatatatatacaacatgtactgagcatggtattatcaggcatggcttggatattttcacattcatacttcagtgttttcctttgtgctggatacattttccttgcaactctggatccatttccaatctttctccacccttcttcattcagttttgcaccttggaatgtgattctatgtggattgccctgacagctcccttgtcttctgtatttcagttgagtttgtcctgtgaaaaatactcatggaagatgaaaggaaaggatgagaatgagatctgggtatttaatttcctggctcttggaaaggcttgtctgttgacctcaaggtctccactcactttatctctttcccttcctctgcactctagcaattggccctcccctagacccattagggaaagtaaaagggtctgctcttaatagacctgaatactgcattacccctagagggcccactatctcttacctataccttttaaatcttacctttattaaactttcatcaaatggcacaattcaaatgggccatctgttttttaatggtttcctgactgattcggtattattattacacttgggaaactgagtcccaacaaggttttaccatgaaataacttgcagacctggaattccacccagatcttctaactccaagcttatatgcttacagagacagcacaccaagcaatgattctgaatgggaggctgacccatatgtgtaatcacagctctgcacaatagagctttcttgaattgactcagagcaattctcagaaacataccactgtcatttataatggtttattttgaaattttataacatgtttgcacaataaagcaatggcaaaagtatctggaagaaaattgaataagattacatctagtctttcactacaccacttggtcttccctgaatcaccggagttagtctaaaaagcaagtctgatcatgtcactttctatctaaaaatgctttctattgactaatatctaaacttcctaactgtgctttttagagtcatctatgtgttcccccatctcaaattttaccatttctttccatatgctctagttaaggggttctcaactgggggtgacttttccccctaaagggcatttggaaatgtctggagatgctttcggttgtcacgaccaaagggagtgccacagatatctagtgggtggaggccagggataccgctagatatcccacaatacacaggatagcctttgcaaccaagagttatctggtcagaatatcagcagtgtcgctcttgacaaactctaatatactccagccacaccaaattcctcctgaaccttgaattttctgcatggtattagattggtgcaaaagtaattgtggtttttgcaattaaaagcaatggcaaaaactgcaattacctttgcacccgcctaataactatcattcaccagattctgtgcttaataaatgatttcatttcatgcacttgtgaaagctgtgcttctacatatgctgtttcctcagccagagtgccttcccactcttctctttgctctttactcttatattcttgaaacatggtttacaggtctccttcttcttaattctcatctatacctttgtatagatgcctaagctgaattctcacattttctttattattcaagtataacagtttacctgtttgagtctacaacacccacttgctatattctgtactaatgacagagaacatgctatttgtgctttcccccaatttcagcacagtgtctgtcacatattagatattagtcattgaatgagagaacaaatattattgcaagcagttgatagagttctgaagaattgtgttatgtttaatttgtataaattaagtcatattttaaaattcagtggtaaaaattgctatttaagaaaagtctctataaactttttggtaaattgaaattctattagaaggtatacatttataaaccagagtttctctattccatttttttctcttttgaatattaaaaatatgaaagagtacatgcctgcttttcttaaagtgataaatatcaatccaaattgttgtcatccctttagagtgctctagattttggggaatgagaagccaatatgaccatatgtaatggcaggactccgttgagaatgtgaagttagttttcaaccttgtccacaagagggaggacatcaccccacatccattttgttgattccctggaaccgttgggtctgtttggagctggagatttatgttgctcctgctgttgcaaaatacagatttagaacctggcaggcattcttgcatagatttgcatgcagtttaagatcagcccagtttgggtggagggaaagcaatctgggcattttagaagctttgtcagaataaaacacacttaagcagtgtgtgatgccagttgctgcatgaatgagcaggagagtgtcttgaaggtacagaaagagaaaagggtgagggatgtgataatttggtggtaatttgcttacaaggttgaccaggagagtgtcttcttttcacaggagatggcttaagggctggtgggagtatagtgctaggaatgaacgtcagcttgatatgctaagagcaaaatgagagcagcaaagtccactttgtgaagttatggagctaattgctcataatactgtatcagtgccagtgggcctccagcattcactagcaatatcacatgaattgcatactctagtacttttgtttacttctttccttttactacctgccagtctggctttgtctttctagactctagaagatgtaaatggtatcacttccttgcaggtgtagccaagaagatcctggttatcattctcttcctacagtccattttccttatagtttttacttttctttttgattaggaccttatcacacctaaaacaacatatgcactggtaagattgaagactttgagctctaagttttagttattttctatctctttggatgttcagatatactaatttgattaaagaaaggaaagtgggaaaatggtagaaaggaagaacagctgcctgctaggggttttctctttcaagttaaacaaaaatgaacatgcaaaccaaataatcattatcccaaagtaagaaaaggggtacaacccaatgtcataagtctcaaaaattaggagcaagacagaattctgaagccaacccaggaggaatggtcaagcatgatgagcctgctagccccacctatgttcctaaagtacagtactatccacttggtaaaaatgctgagaattattactaatatccttatatatgaaaagaaacttagtacatattcttacctgttcccactgaaaactgaagagtagtggaaatggctataggagaaaaaaatatatgtaatagaaacagacaacgggactgagaatcaaaagaaaagtcaccaggagcacatggattcccctccattgccttgggatgttctctttaaccaggcagggtgacttctggaataggacacttaacaaagcttcaggaataagacacagtccagatagctaaatgaagcttacccatagccttgacacagctcttgatgtcttccctccatttcctgaacatattctgccatctctgaagctacagaaaaaaagtgtatagaactcaaaatattacacaattaaaccgtagctaattctaggtggcaagaagtcaacgaaactgtgtctgaacaattaggaactctggacagagatgcctgagtgtaagcaaggtaaaagggaatgacatggcaatacaaatgcaaagcaacagaacaataaagttaaaaaaaggaaaaaaagcttagaaaagtcaaataattcgatctagagaaaaagcaaaagaacagaaaatttcccgtgagctacattctatggctcaatttgcattattgaatgactcaagaaaaattgaattcatgtcacaagaactcaaagaaaaaaaaaaaacaaattatctgaaaggaaaagggagattgtagactaaaggcaaaaaaaaaaaaaaaaaaaaaaaaaaggaaagccaaaacaatgtgatcacataactaatttgaaataattagtaacaacagggggtggaaaagatatggctaaaaattgaaatattgccagagggaaagtgctgaagatatcgcagttaatgctgatgaaaaaaaccagagattaaattaatcacagagaaactgagatataaagagggcagatggtataattagatccctgaaagagaaaacctaagtacttcaacaaagaaattactcaaaggtatcaaactggaaagttttcttaatataaagaactgactctgaagtttgaaagagcatgttaagttgtaagaaaactacacagtatgttcaatgctaagatgtgcattgatcaagtcattggacttcaaggattaaaataatatccttaaggcatataagcaaaatttacagcacttatcacctatgaggtagattgctggcattatacaatctcattacacaaaacaatgtctataaaattgagcataaaatcaagtgggacaagaattatctgcaaccataatgtaactcaaatgtaaacagcaccagcagacattcacaaatacgaacaaactttggtaatataacactaaagagttcttttttaaaaagttgttaccatataataacaatataacacagatgagctctttttaaaaatgttgttaccatacaataacttaacagtacattttaaaataatttaaagagtgtaattggattgtttgtaattcaaaggataaatgcttgaggggatggataccccattctccatgatgtgcttatttcacattgcatgcctgtatcaaaatatctcatgtactccataaatatatacacctatattatttacataatcattaattatgtactcacaaaaataaaaaacaacctgggtaaactaacttatttttaacttgaatctatactccccccaaaaaataaaagacattacaataaaattcaagcatttaaaagaaaataaagttactcagaaatggaaacacttggtgagaacagtgacggcatttaaatatgcaagaaatacatggtacacattataaatatagaacaaagtatacatgtgtcagaggtcccccaaaccaccctcaatctgcatcactctctagaaggactcataggacccagaaatgagaatgtttatgagtatggtttattacagcaaaagttacagagtaaaatcagcaatggaaaaaggcgcatgggggcaaagtctggaggaaaccaggcacaggtttccaagagtcctctcccagttaaatcacaaaggatgttcctaatttctccagcagtgatgtgtggcaacacacatgaagtgttgtcaaccagggaagcaaccctggagtccagggtttttaccggaggtcagtcacataggcatacgatgcttacatgactgacttagttaccgaggctccagaccccagagggaaagcaagtgttcatcataaattatattcttagcatgaactatctagaccaactggtacagtctgactcaaggccctaggcttgcaaaaacactcttaccactcagaaattccatgagctcaatacacaggagctggtgaagggccagtcgtgcaaataggcctttcttgggagtgcacagtttgaacaactcagatcttttgagttaaccctttcttacacaatatgtgataaaaatagcaaaaaatcatagatgaaggagaaaatgtcaaagaataatgttctcatttttcataggaataaggcagttttactgggtaaatttgcaggagggagttcaaataataacaccagactgggcatggtggctcaaacccgtaatcacaacactttgggaggccgaggcgggtagatcacccgagaggtcaggagtttgagaccagcctgaccaacatgggaaaccccgtctctactaaaaatacaaaaattagccgggtgtggtggcatgtgcctgtagttccagctactcaggaggctgaggctcaagaattgcttgaacctgggagacgaaggttgcagtgagccaagattgcgccactgtactcccacctgggtgacagagcgacagagcaagactctgtttcaaaaaacaaaaaacagaaacaaataataacaccagttgtcttatgtgtttaataatatcttttgtaaattttagtgagttatcttggaaggtagtacctcataaaaagtagttgaaattcggagttttttcttttgctaactttgtgtaatattaaagtttagtttaattaaagtagtacatatagattttcctctaaagagtttgtctattctatttgtgtgtgtgtgtgtgtgtgtgtgtgtgtatataatatatatatgcttagaaaagtacctagaaatatgcctctctactgttaatgatggcatgatttgaaaagcttaatttttttctttatgtatgtctacatctcttatattttaaaatgatgaacatgtactatttaacaaaattaaatctctggctagatgcagtggctcacatctgtaatcccagcactttgggaggccaaggcaggagaatcacttgagtccaggtgttagagaccagccttggcaacatggcaaaaccctgtctttacaaaaacaaacaaacaaacaaacaaacaaaaaaaaaagtagccaggtgtggtggtgctcctgtagtcctagctacttgggaggctgaggtgagagaattatttgagcccaggaattcaaggttaagtgagctatgattgtgccactgcactccagcctgtgtaacagagcaagactctgtctcaaaaaaagaaaaaagttcttaatttgatatttgatttttctttgaaaagggaggaggataatgaaagaccgaggaaatcataactctctgagacaagtttaacacagactgggaagggtggcttttatttttaagggaatttaagcatcgtacagataaaagaaacatacataaaaaagtaaatactatgattttctttctccctggattgctcctttaacacaataattttacagaaacctttttccattgtaagtattattatattgctcaattttccagtgccaatcccttcctttatttggaggagcctctgaatgccagtggggagatagttttcctcttactggtcagaggatggaaatttagagagaagtcattgattattgagattgaaaagcaatcagacaataagtaaacaatcagacagtaaaagcaaaaattggtactaaaatgtgttttaaaatgacacaatgattaaataaaattaattatatcctctagaaatagaaatgggcttactatgacaaatacagatatataccatttgggactaagaaaaattttatgaagaaaggtatgtgaaatatttttaatagccaaaaatagaggaactctggaatgggtgggaaaggagtgagcttagcagaccttctctgtgaaacaatcgtttagctggtgaaaattattaaaacatacacacacaaaagaagctaagacacacacatttaaaaaattgtcataaggacacacagcaaatggaaaaacatttattcaagacatctattaaataccagttagaaaaatgagaggtgtgatatttaaactgtaaccagctgccatccgctagctcacccctgctccttgttttggaagccaaaaggacaagagctttcttacctgccagttatcagtctagggctacagttcaaccccagaagaggcaggctactggtgcctctcattttccccagattcatgttgcagaagcggtattatgggtaggcatagccaagaacattgggctcacttcttttatccagcccccgtttatagggtataagctctataccaattgtggcagaccaataataatgcgtgtccaattgtctcttcctcagcttgcttataaggcagaggttccatgctgggaagggcaagctgaaaaggccagagtccaccatctttcccaaattcccacttatacaatggtagtgtcactcgggtggaagtgggccgctatttgtgcaaccaactgggctgtaatggcacagaaattctgcccagggatagatgcagagtgtcacaataagagtttccactctgcctggagtcactgactatctggaacagaagttagagaagttcatggctaagggttttcttaaacaatggagatcttgatggcaagcagcttatagggagcaggcagctctatgataccagcagcaatgagcaaactggtaaagcagccagaagtcgagtagagagaatcagggaatgagaaagccctgaagagccctctggggatcacacttatccctgagggtatggaaagttgtacatatttgcaaggctacacaactcagaggtaattagagtaagacacagggcagatttgaaagcattctcaagccatacacagatgcctcatccaggaggaagagtcttattggttcagaaggcttaaacgtgatctctcaaccaacactggctgaacaataaggtactcttactcaggtgctattcctaggaaaacaaacttaaaaacaaaatcgttcattcttggtggtctggaagactgtatttattctgaaggctgaaacatctcaagggtgacaggaggataatttctaagctaacagtcctttgctgaacatgaggcaagatcataaacttcctcaaagcagtctccaagtcacacatatacaacagacaaagggcaaaaatctaactgaccaagggggcttaagtacagtatttgatcaataagttacttatattgatacactcacaggaaggcaagccaaaagataaaaacaggggaacctttctgaggggggagacgagagccgtctgccgaaaatatacaagtctcagaattatctctatcaaatcactaaataaatgaacatatgaacaaacaattagaaataaacctagaggaacagggttagtgtccagacttgttacaatgtattatctaaagtccagctttcaataaaaaattaggagaatgcaaataaacaggaaatgtgacccatacacagaaataaatgcaggcaatagaaactgcctttgagtgggctcatatgttggacttaatagacaaagaatacaagtaactattataaatatgttcaaataactaaaggaaattatgcttaaaaattaaaggagaatgagaacaatgattcatcaagtagataataaaataatgaaattttaatacatattgtatatgtctattcatctatcttccaatagaaattttagagttgaaaagtccaaaaacctaaatgaaaaattcactagacgagctcaatggtagattagagttggcagaagataaaataattgtattagtctgttctcatactaccgataaaggcatacccgagactgggtgattggtatgaaaaaagaggtttaatggactcacaattccatgtgactgggatgcctcacaatcatattggaaggtaaaaggcacctcttacatggtggcagacaagagagaaaatgagagccaggcaaaaggggtttcctcctataaaaccatcagattttgtgagacttattcactatgatgagtagagtatgggggaaactgcccccaggattcaattatctcccaccaggtccctcccacagatgcgggaattatgagagctacaactcaagatgagatttgggtagaaacacagctaacccatatcattccatccctgacccctcccaaatcttatgtcctcacatttcaaaaccagtcatgctttcccaacagtcccccaaagtcttaactcatttcagcattaactcaaaagtccacagtccaaagtctcatctgagacaaggcaagtctcttctgcctatgagcctgtaaaatcaaaagcaagttagttacttcctaaatatattcagggtacaggcattgcataaatatagccattccaaaggggagaaattggccaaaacaaaggggctacaggctccattcaagtcccaaatccagtaagtcggtcattaaaccttaaagttccaaaatgatctcctttgactccatatctcacatctgggtaatgctgatgcaagaggtgggttcccatggctttgggcagctccacccctgtgggtttgcagagtacaattcctctcctggcagctttcatgggctggttttgagtttgtatggcttttctaggtgcacagtgcaagctgtcagtggatttaccattctggggtctggaggacagtggccttcttctcacggctccactaggcagtgccccagtggggactctgtgtgggggctcacaccccacatttcccttcggcactgccctagcagaggctctccatgagggctctgcccctggagcccatctctgcctagacatccaggcatttccatacatcctctgaaatctaggtggaggctcccaaacctcagttcttgacttccgtgtacccacatgctcaatatcacatggaagctgccaaggcttggggcttgaaccatctgaagccacggcctgagctctaccttggccccttttagccatagcgtgagtggttgggacacagggcaccaagtccctaggctgcacacagcgaggggtttgggggtgtggctcagccacaaacaaaaccattgtttcctcctagcttctggggcacctgcagttggagaggctgccataaaggtctctgacataccctggaaatatttgcctcattgtcttggcgattaacatttggccccttattacttatgtaaatttatgcagctggcttgaatttctcctcagaaagtgggtttttcttttctatcacattgtcaggctgcaacttttttggacctttgtgttctattttccttttaaaactgaatgcttttaatgacaccgaagttacctcttgaatcctttgctgcttagaaatttcttccaccagttaccctaaatcatctccctcaagttcaaagttcaacaaatctctagggcatggaacaaaatgctgccagtctatttgctaaaacatagctagagtcatctttactccagttcccaaaaagttcttcattccatctgagaccatctcagcctgaatttcattgtcagcattttggtgaaagccattcaacaggtctctaggaagttccaaactttcccatgtttttctgtcttttcctgagccctccaaactgttccaacttctgcctgttacccagttccaaagttgcttccacattttcaggtatctttacagcagtgcctcactcccagtactaatttactgtattagtccattttcatgctgctgataaagatgtaccagagactggataatttataaagaaaaatatgtttcatggattcacagttccatgtggctggggacacctcacaatcacaatcatggcggaagtcaaaaggcctgtcttatatcatggtagacaagagagaaaatgagagctaagcgaaaggggtttttcgttataaaaccatcagatcttatgagacttattcactaccatgagagcagtatgggggaaactgcccccatgattcaattatttcccacagggtccctcccccaatatgtgggaattattggaactacaattcaagatgaggttggggcggggacacagccaaatcatatcaataatcaaacttgaaaatagaacaatagagattatgcaatctgaatagaagaaataaaaattttgtatatttataatatataactttaatgaatggcgtgtttgtatatgcgtgcacatacaaacacaagaacttccatcatgaagcattatggatgtgctttggtgcttggaagcatgggtgtgctccaggcatagctctatgacaatttggcaggactgttaagtatacagctgggagaatcagaccgcctgcatgcaactcccagttctgccatttattagccatgttacttgatatctagaaaatgagataataaagtcttcatggtgttcttgaagattaaatgacttcttaatgcatataaagtcctagaaagcaccaggcgaatagtaaatgctcaattttaggtatcattattgatcttctttagattctgcccttccaggagataaaagatttgttttgttttgcttcacatctggatcatgtgttaaatttagattgtttccaatctaagaagagatcttcataatatgtcttattgtaacggtgtttgcaactgtcacacttttatctgtaatcgctttatagtttgcaaattgtaatgtgcagctgttagcatgtcatgagttttacctgggagatggctgattttcaggactatcataagtgcatttatattacttttcatcttttgtgtggtatctgaacagagtagggatatgataacaacacagactattttgggacccttcaatgtggtctgcctgactcttgtttctccctgtttcacttctttctagatatgagggtacgggtgtttttctcttttgttcactgttacgtctatcacctagaatagtgcctggcaatcagtaagcacagaagaatatatcatggtatctcataatctaaaaccatttactttccagtagatgcccaagtcctttgattttattccggtctcaaactaccttacatgataaccattttaaaaattatatgtctgatgctgtattagcctgttttcacaccgctctaaagaaatacatgaggccgggcgcagtggctcacgcctgtaatcccagcactttgggaggccaaggagggcggatcaagaggtcatgagattgaggccatcctggctaacacgatgaaaccctatctctactaaaaatacaaaaaattagccgcacatggtggcaggtgcctgtagtcccagctacttgcaaggctgaagcaagagaatggcatgaacctgggaggcggagcttgcagtgagccgagatcgcgctacagcactccagcctggatgacagagtgagactccgtctcaaaaaaaagaaaagaaatacatgagactggtaatttataaaggaaagaagtttaattgactcacagttctgcatggcttgggaggcctcaggaaacttacaatctgatggaaagggaagctggcatctttttcacaaggcggcaggagagaaaagagcatgtgaagggaggaactgtcaaacacttacaaaaccatcagatagtgtgagaactcatgagaacagcatgggggaaaccacccccatgatccaattatctcccactaggcccctccttcgacacatagggattatgaaaattacaatttgagatgagatttgggtggggacacagagccaaaccacatcagatgtttctgttaaattgaatagtttgttataatctgagcatcctccttctttctttcctttatgtctatagagatactacctgatctacctgttcaatatgatgccattgcttctttcattacaaaccctacccatctaccaagaccaacacagactctatcccatctgccttaattgccttcatccttcagcttccctcctctgaatgttacttgctttgtatttatttcctgtgtcatttaaccacttgtatgttccagtacagttacttgtgcattctgtgtctccctttagaacagggaccttgtctgtttcacctttgtattctccatagtgcatgtaggtagcaaatatttgacaacagccaatatttaataaagacctactcagtgacagatactgaacccaatgactggtttgattcctaggaatgtgagtgatattctcttcctgtgttttctaaaattatttgcctagtgaatatttaaacaaattcacatgttgaacatcatagtgtttcaaaacagcccctggacttggtatcagatatattgagtcaaatccagagatgctgtgtgactttgggatgataacatacccctttaagagtcttggttttcccaaacaccacatgttctcactcataggtgggaactgaacaatgagaacacatggacacaggaaggggaacatcacacactggggcctgttgtggggtggcgggaggtgggagggatagcattaggagatatacctaatgttaaatgacgagtcaatgggtgcagcacaccaacatggcacatgtatacatatgtaactaacctgcacgttgtgcacatgtaccctaaaacttaaagtataataataataaaaaaagtcttggttttcttgtctgcaagtaggaataatagaatcacactatagtgttaatcgaggtaacaaattgtcggtaacctcagactgaggaaggtatcaaataaaagtgagttttcagccaggcgcagtgggctcacgtttgtaatcccagcactttgggaggccaaggtgggtggattgtttgaggtcaggagttcaagaccagcctgggcaacatggcaaaaacccatctctacaaaatatctaaaaatcagctgggcatggtggcatgcgcctgtaatcccagctgctcggtaggctgaggcaggagaattgcttgaaccagggaggcagaggctgcagtgagcgaagatcacactgctgcactccagcctaggcaacagagtgagactgtctcaaaaaaataaaaaataaaaataagtcagttttcctctttccctatttgaataaaagtaaaatgagtttttcaagggtgtcattagctttatgttattgttctaactctgcctctatcagatattctttgaatgggccaaactctcacaatggctggacactggggatgttatgatgccagaccatgctgctactttttccttcctttaaaagctctctggtaaatatcgatttgtctgctctggtggttataaactgctgctctcctcctattcttcatgaaatacagggattctaagttttgttttatgtacttgtgttttatctatcgcatacagaattgcaaacaatactatttgtgaggggcgttttgactttttcaaaatatcttcatatccattatttaatttggtacccttcacaagtctatgagcctggtagggcaggtacctgtgtcatcataatccccttacaaatgaggaaatagagcctcagaggttaagtggtctgcccagcgtcacacagattaaaaggtggtaacaacaagggttcatcaaacacaagtcactaggctacaaatctggcaccctctctactcgcttagcctgaaagcaaaggggtatttggcaactgtgacatccgtcatcctaacgatcttctccattcttctttggcagaggcatccatcctgagctatgatggtagcatgtacatgaagatcatcatgcccatggtcatgcatactgaggcagaggatgtgtccttccgcttcatgtcccagcgagcttatgggctgctggtggctacgacctccagggactctgccgacaccctgcgtctggagctggatggggggcgtgtcaagctcatggttaacttaggtatcgtatgaagtaccctctgccacttcgtttgggcttgtcttccctttcttttctgattttcattggtttgattgaattctttgtttgtttcttgaaagttagctgctcacctcttgtttaacagacccaggataaaacccaacagcagcgatcaccttctccttgtttctgcatgaggttttgatgtcaatttctggtttctgacagtggtgatttctttactagattatttgttttctaagtttcctttcttggttttttggaatcgtttagctttgtgtaaaacacgctactttggtccatcttttgatcaatcatattcccataagtccaactcctcagtcaccactcaaaacagtcacagctgaggtcagggacagggcaggaagtggaggcaaaatgttgatggtggggttgtaggaaattaaactttgtgggtagggtgagaagtacattgtttctagctccacagctactattcaaatggagaattctggtggccttgatgacactgatatctcctttgactttctcctagagggaggacaagtagattgttgttcccttggaaaataattccctaagttgagtctgtgacacgtggaaggaaaatgtgtctcctgatacgtatacccatttttcttcttgacattcttaaccatcactcagcatccccttgtgcaaagattgttaccttgtactatcactcactaataactctcttcttcttatataatacatatctattttacctcagagttgaaaaattatgacttcaaatttgtggctttattggaataggattttctctttcattgtaattacctataacagaatctttagaaattttcctttatatggcctcatattctcttctgctattgacctttactgaattctaattgatattctatagagattgggatcctcttggtttttggcaaggaaaaaacaaacaaacactccatttctgctgtttctaatcagcagaaagtcaatacccagcattgataagattagtgagacagctgggtccaaactttctaagctagtgaatgtatttgggtacgtagaatatgtttggatacagtgataccttataaagatttcagtgaaatggtttgtcagagccatggagaaaaaatgatgaacaaatgtaccagatgcaagatcatatgtaggcccacatgtcctggtgggaaggtggggtttttgaatccataccaatcttatctgctgtcaggtcaactggacacacttggaaaatgcctacatcataaacctaaaatctctgggacacaaaggactgttttgagcagtgacttctttagttatgtcttttttttttcttctagttttcagtgtttacagtaccgtgctctttttcttgtccaacttcatttgatttctgttgtcagtgtgtctcttggtttttcttttgtttgtgtattgtgtgtttggtcattttaggttatatttttttcttttgctggatctttttgtgtgcgtgtgttcctgagtttccaatcctccccgccatcaaccatggtaaatcaaaagatggtattcaacccttcaaaggcccaaagcctgcggcccgcatagcaaacagccttgagaacacagcgtattgagcagcctacagagactggcatacccctgaccctactaccttccatccctgcaccatcctacccaccttaaatcaatataagagtgtgttacctaaaaccaacagccagcagctgattatctcctcagaaaaaaacaacagaaaaaaaaaaaaaacagaaccaaatacaaccccataactagctcactgaaaaagatgatgaagacaatttttatctctggatctatttcaaagtcagagagagacaaacatatgagaatgattcagccccacgcgatcctgagggagtgtacacagtgtcattaaacagacatttttttccccattaggtgttgtttagtaaagattagagtgtcaactttgacaggtctcacatcttagaaggaaaaactggggtcagtgggggtacaaataaaagcgtataagaaataaggaaataagtgtacagattctcattctctctctcacacacacacacatacaccttgagttggtcatacatcccacatgcatttctagaagcattatttttgtattttaaactctagtcaaagtctgagagatgtgcttttccaatagactttgctttttttttttttttttcccctttggcttcttttgttgcaatttcaatctagctcctgctgcgttgaaccatctcaggcaaaggagaggtagcctctctgtagagagcactgtgcttgtccagaagccatagttaattttttttacaccaaaggataggttcatcataattactggtttgaatttatttaactttctttccaacctgacatggaaaactgaacttaaactctcatgcttgtgtaaatgcagctcttcatatccacgccttgtttaaaggttttccttccgttccctccccaaaatatacccctttgcaaatattttctttctctttgccgtgaatttgtgtttcatttttctcaattacagaagaaaatgtatccaagtagaatttgtcttcacatgcattccaccaaaattaatttcaaatgatcactttgctccctcactctattcaagttgtgtcttttttctagcccatgcactaacaatattttagtttatttcaaattgatcacacatatgcattcatgatataaaagcctagtatatatttctctgatgtaacatatcttccaaatgtcaaggagactagggttttccaatggctttatcttctgcaggcagccatatgtggtgctaacaggtatgagaaatatcctataactcagcacaacttttaaaaagttgagaggttgactattgatcaaccatattttgattctttagaattataagctataacattttattattacagcatatttaaagatttaaaagaccttatcttattttaatctcatgatctcatggatctcatgcgattaatgataatctcatgataattttgtgagataaatcaagcaagtgtttttatgcttacttttacagatgtgtagcacagagagaaatatattacttttcaaagcttacataaaaagttggagacagagctggaactagaacccatgtctctaaactgctagatcagcctgcgttatttgtttccttcacagatcagcactatgggtcaatgatgtgttagtcttaatggcttccaattgtttttatgatggtcacctttgaaacacacacagagagaatctccattttcctcagtgcccagtttgaattgagctgcactagggaaaagacagttgatatggacaaaacctttaaaagatccttagcagagtgccaggagcccttcttcaatggcagactctgagggagtggcatgtagtttggtaaattgcatttgaattctccagatgttctctctctggaaatgtggacttgctattactgtttaccaaacacattattgaagacacacagctcttagaaacatttacctcttccatgctcgacccaaagctcaacaacgagaaaaactttcttggccaggcaccttaatctaattacagacacttaggcctgtaatcccagctctttgggaggccgaggcagcccatcacgaggtcaggagaccagcctggccaacatggtgaaacctcatctctactaaaatacaaaaattacctgggcttggtggtgcgtgcctgtgatcccagctactcgagaggctgaggcaggagaatcgcttgaacacaggaggtggaggttgcagtgagccgagatctcaccattgcactcaaacctgggcaataaagtgagattctgtctcaaaaaaaaaaaaaaaaaaaaagaaagaaaagaaaaagaaagagaaagaaagaaaaaaactttctatcatttaccataatttaaaacaaaacaaaattaaaacaggcaacacacagatatgaacacatacacatcaaaagatatgccaagacttaggcagacttttttcaagcaaaaagtctggctgctaccaaacgtagatttaaaggaaattgccttcccaactcagttctttgactcatattttttatttaaaaaaccacatatataaatgtgtatgtgtgcgtgtgtctatatacacacgcacacacacacatatttatacatatatacatacacattcagtaacaagaacaccccctcagagcctatcaagaaggctctgggatagattttccttctcaaaccacttgttcttcaggtaaaataacaaagtaattcttcacatattgaggtaaagtaaacaaactgtctgccatcttgaaagcgccaagctcttacattggtttaaagaccgcatccactttacatgaaatcatttgagtgatccagaaagatgagcccaagccaccacctctcactaggccagcttcttgtctaataataaaatcctcagctatgcagaagccgaagacaaaacccacttgttgtttgcagtccttgggtttgttgctttaggctcactcttcctctcataagcgtgcccatacaccagtttcctctctctctttaatatgtcaggaagggacatttctccagctttgggtgatggtaggtgcagtcagtagctgaagccatcacctcttcctccctccctgccctccctccttccagtcctcaccaggggcatggcctcctctgtctggtaatcataccggttgctccagggctgtttgctcccacttttctgttgcggttgacgacacatgacaaacctaaccgcacgaaaccaaacccagatttttctcaagagatgttcttctcgggaacaaataagcattctgcctccttactcagaataactgggtgctataaatcgctcctctccagatttcacgtagcttcattctcccctttattcttgctcctttaaaatgattcactttggggaattcaaatggtggcatcatccttgacaagtcctctaaaaactactgggtcaaccttaagcagaagaagagtactttgtgactatattttcccctctatctttcttcctttaaaaaaaaaatcatttcgcttctaccttttagtatctaacggtaaacaaatccttattggaatttccaccatgataaaccaaccttaggctgaaccgggcagcttggtaacaactaacctgagacctttctctgaccttttctgcccagtcccctactatgcccactgattctactcaaggacttctatgttgtgtgtccatgactcccaagcagagattaatacaatgatagatatgctgatctctggcacagaataccttgtctgattactagctctggccagttggtcactcttttcttccctccctttcccatttaaaaaagtgaaacaaaaaccaaaaaattttctctcctcaagatgtggaatcacagagtgaaaaatactcaagatgtcaaaggtgccgagacctcctccacacgtgcctggcttgccttctccctgaatgctgtgggcacttgattcagtctgcgtattcaggcaggaagacagagatgggctgcgcgagggggttgatctgggagcctttgaatcactagcaatcagagaacccaattcattgtgataacatcatacaactcctttgaccctacacccgaccccacctctctaaaatctgggatgggtgtttgtgcggttagctgtttgcaagtggccattttatgacaggaaatgaccaggtggtgttaaccctttccttaccactaaggaagatggcaagtgtgcctatgcaaatttctatagcatttggggcccaacctaaggagagggtggagggagtttgattttagaaaaagagaaagggttaagtacgtcactgagcaacttcatgggcagattttttaaatgatacaatcagtcagactggtgatatgtctttggaatactaatacaaaaattgtgttaatgctactttaaaaacgaattttaagaaaataaattatagaggaaaatagaatataacctgcatttggtggggggaattattgcctatttttccaagtttgacaaaattaatatttcaaagtccaggtttgaaatactttatataaaagaatagctttttttgaaaaaaaaaaaatgtttggtgtctactgtggatatatatgtataccagtatatatctctatacatatgtgtatatatatgtgtgtgtgtgtatatatatatgtatccaactttactaaataatatactgtacatatacacccacccttaaacttgtacatactttatatatataaaatggccacatttcttacgtgtgtctgtccccggaagggtggactgattgtttttggatgtctgcagctgttaccttgaaggatgcaatttcatctttcatttatttttccccatctagactgtatcaggataaactgtaactccagtaagttttccctcaagtttcattttgttctttaaaaaaaaaaaacaaaactgactttattttgtttactgttttatgagctgttttttatttgaattattttttcttttaacaatggagtgggggggacctggggctaagaagatggggggctgggtgagggtgaagggctgagtgtggttttgggtgtggtttctgaagtgagggcaggtcctctcttctttccttgcatttgctctatatgaagaaaagaaggcaagggcacatgaataatgaaataatgaaaaatcaagttgaaatgatgatttattgtttttgggaggtaactctgagagtgaacaaaaagctttagggcaaccagcatgcacttctccactaccaaacagtttagaaaataaaagcactgttcttgacccacaggtggctgccaactctgacatttctttcccagtatttatctctgttgggaacttctagcaggtgggcagatcactgctattggtgataaggcaacactttaaccaaagacttgagacacactctgtctctgcaaaaggaagaactgcagtattattttcaccttatcccattcagataccctagttcttgaagaagggtcctaacaaggcacaggatgaaaactactcatgtatttcttcctcttccttagaagtaaacattagcttgagtcaacatgtagaaggggaatatgaagataaataggaagaataggcacaagagaaagaataggcctagatgatgaaaggaacaaaggaagaaatatgctttgagtactatagcatattatattaggcttattaatactaactactgtaacaagcaatcccaacattataatggctcaacaaaagaaggttttatttcttgttcagtcaaagtccaatgctaattggtcagttttcccagacagctctcttcaaagaggtaattcagggatctaggatccttccatgaggtgggtccaccacctcggagttctttacttctggctgtatccgtagggaagagagagagagagagagcttgggtggttgtgcagtaggttttattgccttgcctggaagtaacaaacatcgcttctatccatatttggtttgctagacatgactccatcctacatgcaaaggaagctgggaaatgtagtcggctagtgcacccaggagaagaaaaactggattagttgatatctagcacatgtaattctccatagtatctcatcatctttaaaattctttcctcactaggaaaaatccaacttttacatttggtttacttgttgattccatcctagtaagtcttttataggtgctagtttaaacttctttcttggtagaagatatattataggcatgacaaactaataaagcccaattctactttttggggggcaaatgttccatctaagttaacacaaaaagaagaaatttaaaatatcgatataagcaactgcttactaaatagagtgctttatccttgtcttggcatcacttacagttattttaagcaatggcctattttctgtgtttaaatatttctaattagccagaaatttgtcatgatatttagatcattaaaagcctaattgaaacatcctttctctccaaagcctggagttttctgttcctgtttttttggtttgtttgtttttttaagcagctttattgagatacaattttcataccactacatttacccatcataaacctacagtttaaggatgataattaaacttataaagttgtccaaatatcaccacaatcacattttagaacatttccatcatccccaagatttcttttctggtcatttgtagctaatccctgctcctacccatcgtcctaggtaactattggtgtgctttgttccaataaatatgccttttttggacattttatgtacatggaattagacaaattgttatatagtcattgtatcttgcttcttcaaaaaattttaatggcatttctatggaaatattttctctttccttttgcattggttttcagaaggaaataaggtggaaacccagcatgaaggtggaaagcctcgtatccgaagctacatctagcatcttctagcttcagagacttatttggagaacagggaactgaggcagttatttaatcaggatatcagaatttgcttttgctgttctatccacactttctcatgaagtcaatcccatatattccacatgatcagccacggaaagtcatcataagacaactcccaggattacctctgttgggaagatggtgacacagatgacagcaggttttcttaatctgataaaatattttctatttacaccccaccaaaaacagcattgagaggaaaatatgtcagcaaagttatattcccagctttgatcacaaagtatagaaagaatataactgatttcaattcaatacttacataaagaatcaagattagattttggaaattgtttttgagattttcacaataaacctttaatgtactaagaacatttattttgttggaaatttaatatcagagaaataatacagtgctcaatggttgaccagtgtttgactggaaaaaacaaatatacatgggtcttttaaactaatctaacacctttagagctaaacaatgtaaccacgtatctagggttatgtagagtcacaaagtaaatataatacattttttttctgaagctaattttaattgttaatatggagtaaaagtttaaattgaaaccaagttgatatattatgcagaagaatgcaaataagcataaatctttaagaaaaaaacataagaattcaaagacatttcatttttattgtgaatcttctctatttcatccctggtattattggcatttgagtggaaaagtttgagaagactatgcaattaaatttggagagaaaaagggcctacatgatccgaacttctaagcccctcttcttattgactccatgtcagatttcatagcttgacctgttacaggatctcacattgtctctgtaataggtgtgccggtccttactcttatctgattttcaactgtgagagtatttgcaccctgggtttgagggagaggaggttttccctgagccttacctcttgctgctatttcaatagaagtcatagggtaccttgcttaattttcaaaacagagcttcttttttttttcccccttgaagggaaatactgaattaaatttgaatcaaggtggattataagtttgtgaactttttcagtcattcttttttagaatgcctgtcctctgaaaagtcacttgggtaaaatactgaatgacatcagctatttttttttcctgttcatctgctataaaatgttgtttgttctgggaaatggctatttccaaggcattctgtgacactctttaatggagacaagagcatgaaaaagaaggatgatcttccagcatcgagagaaatcaatgggccatgagagagaagggtgatcttgaggggaaaaaaagcagttttcttctagccttcttccttttggcttcacttcctggcccttttgtcagagactatggcccagttccatgccaagtatttcctcccaagaagaaaagcaattttctaatcagctcttctttctgcctttcttaacttctcttttttaatactttgtctttcctcatggtatctatgatatattcattattattcattacaaatcctactactcctgctttccaaatcctccaagaataccacaccataaattgctctctagttactatcaataaacatatattacagagtgtgtaaatcaaggtctttggttgaatcaagtttgttgctgaatttgattcatctggcgggaatgtatttcttaatacacttaatacatatagttctagcttagaatttatttttaaattgcaaaagaacaacagagttggcagccatcatggcgaattgaactacagggtgacctggaacactactaaaggaaaacagaactggccggatgtggtagctcacacctgtaatgccagcactttgggaggccgaggtaggcagattacgaggtcaagggatcgagaccatcctggccaacatggtgaaaccccatttctactaaaaatacaaaaattagccgggtgtggtggtgtgcacctgtagtcccagctactcgggaggctgaggcaggagaatcgcttgaatccaggaggcggaggttgcagtgtgctgagattgtgccactgcactccagcctggcgactgagcgagactccatctcaaaaacaaaaacaaaaacaaaagcaaaaagaaccagggctgttttctggagaatttctggaggaaatgtcctgttcctatggctgtagttccataaggctggcagtaacctaagaggcacgcggttctgaaaacaggtatgaacttctcgttggtgtcatgagtgcgcaagtgaaagtatggaaaatgactttttgtctttgaccttgtctgattgtgcctttccctgtgatttcctagccactaatttattctatccctttcaagccatgtgcagtatgaatgaatatagagaactaataataattaaatatatggatagcttgaatgaatacagtaaacacatattaatgaatttcaactttttctttctttttctatttctctttcctctcaaacgctaattcttctgtgttgtggccatcttcattatctttctaaaatggagtgtatatgtggcatggaaattgtgagtttgtgtataagcctgattatttaggtatatgtaacagtgtctctctcactaattactttgaacctgaagacccactaatttctctgtgacaaggtttattttttcttcttagacacagaggagaaaggaagtagtgtgctgtacaaaaatatattgaccttaagacacttaagtgccacaatagagttatttgtgtcagagaatagctttgatgatcttgtgtattccctatataagctgatacctttgattcatcatagaggtgcacagtaatctcagagatgtatgaaaataacatcacaaggatatgatatctgcaaattttatctcccaagactactagtgtttgagtctttctcctcttggacttgcttggataatttgtttctttcttttttttttttttttttttttgccttttcccttagcttctctgccttaagtttctaagcagactccatttccagtgctttggaaaaattaacagcatgtgggtggttattgcttaatttaggcatagtttagtgagctgcagtttattatactggacttatggttttcttctctttcttttactctgtctttcctctccatggtacaagaatatgttatttcatctttacgaatcgtttatctgagaatctcagagccaaattgtttagctctttcctttaactcagaaactcttgcctcagaccaataaggagggctgacttcttcatcactaaaagtcattctcaaaggaaattgtagaaccctctttggtatccattttaaaagtcaagtaatcattactgtcagccatttacctggtgatgccacttattagaatcttagcagagatggaaaagcaagagcctatgtatcataatgtattctctgtcaaactataagcaagctataagcattgcacttcagagtttctatcttcataacgcatatttttgcttcttttggtatgttttatatttcttgtaacatatagaacacttcaagtgtaacaatatttatcgtatcaataacagccagattttagtatgatagtgggatgcttcctaaatatataatattaaacacttcttaataaatattaattcagattggtttattttaaaatagttaataagattatacatggaacaaaaggcaaaatagtaaaaattcttcccactcatcgtattcctcaaactccttttcccaaaggcaaccaaatttattagggatttttgtatcttctttcaggggtagcctatgagtatacaacatataattatatccacgttcttctccttttcttctttctgctcctccttctttttgacacaaataccaacaagcttttccacatcttatttttccactaaaaatgtcttagagactattccatgtaagaatatataggtttattttattccgtctaatagccacataacatttcattttaggggggtgctatattttattaaatcagcaccgtacatttaaatttttctcagctttttactactaaaaatgtaagaagtatatacttttgttcattagttaatgcatacatgtataagaagatctattggataaattcctaaaagtagaactgctgagtcaaaagataagtgcattataaatattgatatatattaccaaattgcactccaaagaggttttacaaagttatatttctaccagcaatatatgtgtttgcttctcctcactcttgtaacacacatcatattatcaaactgtattttcattctcttaagatagcttttcaaaatgttgctgtcacatatttatttcccatagatcttttcctcccatcctttaacatcttcaaatatacatagggatcattgtcattcatgactttggtgacaacttatatcagaaatcttttaatagcaatctgctgtagcaacatttcatatgttaatcttgttttgataaacagggatattgtagaaaagtagcaatatgttatagtaattttgtgtaatttatctcctacattattattgatctgtgttgggatctcagcacagacaggcatttagtgcaattacaaagagcaaggaggacactggagccaaatagcctgggttcaacacttgtctatgccacaaatgagctacatgtctttgacaagttgcttcaactcttagtttcctcaattgtaagtttcatatgaaatttagaaagaataaagggaatgggatctagcaccaaattaaaaagtaaacgtgatgtgaacttgaggcattaaattacaaataagtggtttccaaaagagagtatgctttgtctcatcaaaggaagaagcagaggaaacagcaaaagaggaggagaaaaagaacttgttcaaagcacaagccttcataagttatgtcttagtccatttggtgttgctatgatagaatacttggggctaggtaatttataaagataagaggattatttggctcttgattctggtggctgaaagtttcaagagcgggcagttgcatttggcgagggcttcatgctgcttccactcatggaggaagacagaaggggaggtagtatgtgcaaaaagatcacttggtgagagaggaagcaagagagagaaaccaaagaatatagactctttttaacaacccactctaaagggtactgatctattcccatgtacaaagagaagtcactaacccctgcctgagggcattaatctatttatgagggattcaccccgtgactcaaacgcctcccactgagcactgccaccacaaaaaaaaaggaagcaaatttcaacatgagttttggggggaacataccatatccaaaccatagcaagatatatggatataaacaaagttaatagagctgctgaattctaggaaggattgctagacaaaggaataaatttttaatatctgaacatcttaaaataggcaaatacccagccaatgtagaaattttatattgttaaatatcaggttaatagaggcagtatatagactcatataactgtttatcaatcacaatttgaactgctgtattatgttaaattagtgtacatggtttagatatataaagttagtgtacctagtttggaggtatgtatacacacacctgcacacacaaagagtgagagagagaaatatctaatgccagtacagcctaaaatttttacattgatatctgccactgtatgatttttatgacttgaagctaccttggatatagtatatgcttggtaaataattgctaagtaagtgaatggggtaatgaattgtatccattgcgctaccttaatttattatttatacaaaattgttaagaatcaacatgcaaggtacaagcctaaaaattgtaaagtacagtgttttgtcttgttgtcactcagaaaggaagaaaattaaccaaggagtgaatttgtcgtcttaacctaataatctaaaggaatatatattactttctctgtaaaataagagatttctgacaaataaatattttcatgaagtctgattgggccatattttggttgaaagtaaggaaaatttcatgaaggaagatgaacgtgtatctgtaaatattgcatgttgtcattcttccttgttcttcctcattcacttattccatggacatttactgagagtaagcagagttccaagagctgagtgtcattttaggaatttatactgcaaatttccaaggaaaatgtaggaggaattctcatagactgagtaatttctttatcccaccctactcttccctttcacattgcccacctccatttcttgtttttcttgaagaaattggacctcagatgtatgtatctctaaaatccagatgagtctcttatggattttgttcagggctaattcaacattcaattcaacataatgatgtcttttttcacaatgtgtgtgcatttctcatgatggggccctaaatgctggtttacttagggattttcctgatttccttttttgttttgatttgccctccttcatctgaccacttgcttggagcctcgcaagctgtgtttctgctcccctttaaaaggctgatgtttcagggactgtaattttagtaaaaatactatttctgttttccttctacctttccaagatttctttatgtactccaatccattttatgtgtctaattgctatagtcagatatacaaggtgacaaattctgtaagtacagttggtcctccataactgctggttctgcatctgcagattcaactaacaaaaaaattgaaaataattttaaaaaacaataaaaaaccaatataacaatagaaaataatacaaataaaaatacatataacagctatttgcatagcatgtacattgtgttaaatattataagtaatttagagattagagtataggaggatgtacatagtttatatgcacataatataagacaccattttatataaggaacttaagcatctacaaattttggtattcacaagggtcctggaactaatttctcatggacaccaaattaggaccgtattagtttcaggcacagtttatattttgaaaattaggaggtattatggtaaatttaaatggaaactgggcctgagaaatccctgagcagaacaaagccagttaggccgcataaatgaccttaaccttgctggatttgcaaataagagcaaaagttaatttgagctacagctcataaatacctatattcagagaaaacagaatgtaagctcaaccaatcagaagcagccaacaaatttataattatataactagggactttccaataggataggccaaataaggcaacagtgtaactgtaatccatcaaatattttctttgctttactcgcctatttatcctataaaagcctgctatttgcattccctcagtggagctcctgagccacttttgatttagagcttccctgtccaattcatgaatcactgtttgttaataaagtccttaaaatttttattgtgcctcagtttatcttttaaccgtttgacctctatgcggtgtaggatgtacagtgaccatttggtaagctaatattattaacctaaattctttattcttgtttggtaacaagataaatgtattaatggatgtatttccctttcattatgcctaatatatataaattatatgtataaagtacatatatacatatatatatatataaattgcagttgtttttatgcatatcataaaagataatataatttgaattctggagtttccagaataattagccacaaaatgaaagtctgtttactgattcaaagcatctcaggaaacacagtttccaattttgggaagaaaactttacagaccaggagatgttatttctaaaaaaaaaaaaaaaaaaaaatggagtaattttctggctgttctgttgacttactagaatcacatagctttttaactctgagtttatttgaagttagggaaataaaactaagaagactttatacatttccttctcaaaattaagctgtttcagaggaaatctgactatataatatctgttcagaaaatcattgtcatccccaagcctgtgccagccctctgtcagcagcactgtcctcaaagattcctcaagggaccctgtggaaaaatgaaaacaagagaggctatcaaggggtgcaagtaagaggtgcagtgttgagttataataatctaagtgtccttcctaaatggctgaaagtatattgcagtagaaaagtattaaaatgtgtatgtgtcccaaaaaagaggcaaaatgtaatggagatcatgtcctctaaagcaaaatatttggatggttatgaactcaggatcctccaataggcctgctggggcacatttcttttttaatatcaacatattacaaatggggaaaccaaggctcatggacactgagtgcttgacataaaatctcaaggtgatgaatggtaggcatgaacctttataaatttagttttataattcttcatcatatgagtactcttttgtcccctaaatcaagctgtctcttaatgatgacacaggactttgtttttaaaggattaatggggaaaaaagagggggatcactgcaaaggtaacgaattagaatatttttacctaaaccgatgaataggagtggaatgaaatttatttctgaaatccaggagatgacagagaaatgaaattggtgttatccacaagtgcgggcaggataaaatctaaagcaataaacagagggctgctcctctgttccagtataataaaaagtaatatttgaaacacaaaagcgagagagaggaagacctgcttatttcctgtgaggggttttcctgtgataggaggcacttttcttcctttcctccccagaatccgaggagaaggaactgccccactgaccagagtgacaatgcccataggactgaaggggtaagagcaacagaaacggaatgcttgaaaggagcagaaacagtgtatggcagcagcaaatgtgtgtcagatagaaagacaaagggaaagggacacaaagaagtattcacaatggagcaacacacatgtagtgtgttttataatgctggaaaaattctgtacctttcccatctcacagagaaaagagaacacaaaggaagatggataaaaaaaaaaaatgatgcagccactgggccggttatctctggctagagaaggattaccatttccttacaaaaagaaattgataattgaaattaaactcagattgcccaggtatacctgccggcagttggaatgtttaacttaactgctcggtttacttattgacaagcaaactcccttttactaatagaaccaatttacaaaactttccggtcatcataaatagaaaagccagatatggtaacaccgcgatgactagttaagtactcaggtacttatccatgactttgtttatccatcctcctacatatctgatagaaaacacaaggagtaggaatctcatggttaacatttcaaaggcatgaaaattgaatactaagtgaagatacaacttcattctttcccctcttcatatcttcctggaccctttttctcctttgtcacagcaaaataatataggctactaagtctatgcacaaggatatttacaataaacatttgacagtctttgctattgctatatgaagtgcatgcacttgacaggtggctactaattattatagtaaaaacaatagcattgagtgatttctgccattatgggataagaagtttgctggcattatcttatttaatcttcaccacaatcttataaggtaggtgtcattaccctcattttagaaatgagacttgttcatatggaggctgggtgtggtgtctcaggtctgtaatcccagcactttgggaggccgaggtgggtagatcacttgaggtcaggagttcgagaccatcctggccaacatggtgaaaccctgtctctgctaaaaatacaaaaattacccgggcatggctttggacacctgcaatcccagctacttgggaggctgaggcaggagaatcacttgaacctgggaggtggaggttacagtgagccgagatcgtgccactggactccagcctgggtaacagagcaagattctatctcaaaaaacaaaacaaacaaccaacaacaaaaacaaacaaaaaaaaaaaaaagaaaagaaagaaatgagacttagtcatatggaatgttttgcctagcttcagattcagtctactccattccaaagcctctgctcctcaccattgtacatattgcctctgccacttgtatgctgaagtgttaatgcctaaatgaatgaaatctatcactctagaacaagtgctgatggtcccatgaaagaggccacttctaatcactaatacctcctatctctgtaggtagtctttctgaagtcttgaccttccagagtcaagctccctcagctcagctctataggcatattagtgccccatgcttgccataaccagtctcgaaggcattgtctatttcagtgactgaaaggtacttggcatttagagatgcatagaagatgaattaggaattattattcaggaacagagacaactaagaagaggataacattagaatgccataattcaacttatgtttattactgatgaatcactctccacatgactgatgctttgttgaccttctcttggtaatgctggtactctctgtctcttatttccttccattgtactctagtcctctagtcttagccaacaggttgtggctgctgcaatccccgaggctcttctacgctacctctgtgtccatgctttgctgtgtgccctatagactgttcctctgtatctgcctttgcaacagctgtctgctcatccttcataacagctcaaggggttaccacctagatgaaaccttccttctactccaggcaggtctagctttttccacctttaagttctcctggcacttcgcacatctttcagaactcttatcacagttatatgctgtaaacaaagaatcatgggttttataaaattggaaaggagaactttatttctcataaagggttgcagcctgcaggctggccatcccagaggctgggaagcatagcctctggcaaaagctgagagcaagcacattgaggtgatcaggggtaaagggaacaggaatttatgctgagcagggtagctgaatatacatatttaatacactatagaaagagtcatgaatatttacggaggagaaccatgcaaatgtgcaattgagcttcatgcctcttcatgggttacacgttaaaaaaaaaatagctgtgttagcatgatctgagggtggagtttttggccctctgacatcaaaaagtaaaccagaggatatgaaaattgccagtgtatatcccccacaggtcagccaaaactggtccagagatggtggttggtttttaggaagggatgccttgtgaaactgattaactgtcacatcaatactgtaaagagggagagagagtctggttgtggcctcaggtgattggctaaagacaataaagaaatgggtcacctgcttcttttttttttttttttttttttccagagctggtttctgttgctccttaggaaagaatcctggttaaaggtgaataaggaaggggtatactgaggcatgaatatactaaggcatatctaccctccctgcccatcatggctggaaacttagtttttaaggtttctctgggtactccttggccaataggggattctgttcattcagtcaagggacttgagattttatttttagttatctattctttatttgtttccatgagtatcttcagaaccaacctctggactcctcatgatttggggaaatgcactattcatcattgtatcttcaccatctagcacggtgctaatcatatagaaggcattagtgaacacttattgaattaacaattgtaagtttaatgacttgaaactttgagccacaggagaaatctgtagataaacacagatttcttagtaagaggaaaattattccatccttacaaagacagaaatctcagcagatcagatgaaaataccatagattatcataatgagggcacttgcccaactcttgaagggaaatatgtttttagaaacccttattaaatactacaatatcagaaggctaaatttaaattaaaaaaatgtgattccaaaacaatctgagcacaacggggtgaccacagtcaacaatatttcattgtacatttagaaataactaaaaaaaatactaggattgtttgtaacacaaagaaatggtaaatgcttgaggtgaaggatactccatttaccctgatgtgattattacacatcatatgcctgtatcaaaatatttcatatactcaataaatatatacacctactatgtacccataaaaattaaaaatataaaagtaaaaatcggatccatcttttccctaaatagtggttgttcaaagagacatttaaggcacaagtgttgtttgtgcagtattgttttgcacatatcaaattctaggttttatgtcttacccaccctggatagaaatttatatccattccaggaggcggaggttgcagtgagccgagattgcaacactgcactccagcctgcgtgacagagcgagactctgcctcaaaaaaaaaaaaaaaaaaaaagaaaaagaaaaagaaaaatttgcacccattcctgtattctttttataggcttctgtaagcttcaaaaatgatccttaaagagattgaagatgatgactcagagcagaaaaataaaacaaaaacaacatgggtggcagagttgcgtgatagaaagaatggaaccttcaggtccagttaaacctgctctgctattaattagtttttggttttgaggtgatttttccaagccgtcattattagtaataagagctacaatatcattggatgaagaagaaaaatttctgaacagaagcatagctcccaaccatatgttttccataccagcatctatacaggcaccaaaaatcatggatgttcttatagccttgtgcctcacggcgtgaattgctcattgatcatttgaactcgtaacaatggaaacatcagttttaccaggcctcctgggcacttgtctgacctttctgatttgtcaaatggaattgcttcgtttgtaaaatgtttcataggagacaggacaacaatctctgtttgatgaaggtgaatgtacccaagataatttctagggttttaatggaagagttttgtgacagctggtttagcatctcatgtaaaataaattcaaggccttttgtctcactgaaagtaaggtcacattattaagagagaagatcctcctctaccaaagtcacagggattgactattcagttgaaccccagaggggctaatctgtccctgataaagttgagttggatgagtatcatgcattgcatgtgtttgcccatgatgagatatatgcagaagaaacaagaacaataatataggccaatatttaatgaggacttaccttgtaccagataatgttttcaattgtcacatgtattagatcctttaattctcacaaggatgatatggaggatacaggaccatttacattatttgtgtgatctagtgccaaataaaaatgtaagctccttgttctaaaggcagaatgaaagctttttcctttctttctcaattttttagttaacctgtcaaacatagggatactcagggagcaactgtagacccccacaggcactcacgaccccaccccacgattctttgtgtggaggcagaaggttgcagcagttgctagagggaggcagaaaagtgaatgaggaagaatctgcctgggtaggcaagaacattcaagccaaggctccaagtccctggctcatgttccattgtgccattgaacttgaaaaaacatgcacacgcataaattcacagataaaattcttaagcatttcaggacagtgactagaaagcattaagccccaaactcattgggttctaagtgactgcactggttgcatacctttgaatatggttctaaaagtaggtaataatattatctgaattttacagataaagaaactacaattaccagaaacaaagtttttgtgtttgtttgttttggtgatgtgtttgtctaccatataatcacgaaaacatactatgcctattatacaaaatttagcttgttctatattttggtatacttttaatactactgttttaaaattcttaatttctcctgcatgtcttccctcatggctaaagataaatttggtatcctatgaactatgttttccgtcaaggtttgcacaacggcataaaacaatccatcacatttttctggccaatagatacatgctttatttctgaatgtcaacgtttaagagactgaagtctgtgactactgttaattttgctagtaaaaataagttctccctgattttggttattatccattgaagatgttatcttcaatagttatccatgcctatgtcatgatatcttcacttcttcccaaatattatcttcctcagatattcaattgtgaatgaaaagtcaagctccttgtccatttttactgtacctcagccttcaaaggcctaaattaccatttcatttctgttgctgatcatcagcaactagaagacagaatttggatattctcacaccaatgtactattgctgcagaaatcctttgggctaactgagaggaccgaaaaaaaaaaaaaatacaaaagaacattccagaaataattacctattcaccatctttagtacaatgctgtacaaataattaatttttggttcgttattctctattcactttttcctaacatatggacgcatatatatgggtccagtgaatcccattcaaagagaatagatggtgggaaaactattggatgccatcagaatattttaaagaaaaaactgtcctttgaaacaaattctgcagaatattttgaacggaataagagaaaattggtttcaagttaatcagtgaaagtgaaacacttgctgaggccataataactgccattcctaagggctgacaggtcatgccattttccaatgtcttgctgaaaaaaataatttgtgtaggctaccactgagtagccatactggcttgccttgttcctgccttccttctgatttggggcactgcagtgggagctgacatgctgagctactcagctgtctcagcctcatggccaggcctcactcaaaacagtgtccgaggaaaatgacaacatccctttggggaactgagctagacctcatatagtatttgcattcatggaacagcgttttcttgtacttacagaacactttgttctatttaacagcatacatagttgtatctgattttattgccattgcctttgaaggcacacattcattgtgctatggtttggtaatgttcttctattcaaattgatttgtaacaaagaatgggtttacttggactctctgcatctagtgttggttcatgtcgcaattacctgcaggcagcaactgtttattgatgaggattttaccatagttttatgtgattacatgttagtttagctttcccttctaaatcaccacttagtttatagttcaatattatcgatccaagtgctaccagagagcaattctattgatggcatgttacgtgtttggaaggcagtctaactttcaacccacactctcttttggagagaatgttgcttcaactaacaatattgaggctcttgcttaaatattcatctcacacattagagtaattggcattaaataaacttcatatctgaatattttcattaagaactggagagttggtggtccactctaaagtgtccatatagaagttggctaactttttctgtagatggccagatagtaaatatttagatttaaaagccatatagccctgtcacaactactccattgtgctcttgtagcacaaaacagccatagacaatgtctaaacttattggtaaggctgagttccaatacaactttatttactaaaacaagtggtaggacagattttgcccaatggccatagtttgctaatccctgttctaggaccctaagagaggtacatttgtagaaattatgtttggaaagcagactagctacccagaattccaaacaataggcacatggaagtttggaaaactcttcatttaaagcattttttagttctagatgctggtaatgcaatgctgaacaagaccaacatggtttctctccttataagatttgcattaacatttgtgaatgcataaagacttaagtgagttcaagtaatgccaaatgcaataaataaaattaaacagagtaaagtaaatgcctggatgtgggaggaagtataactttagataaaactgccctggaagcttttctgagaaaatgatatttgaattttggacatttgatacttgaatgatgagaaggatctagtcttggaagggtttgggaaagagcattctgtgcagagacattgacaaaggtgaagggcttatggaagatacatacttggtgtgtttgaggaataggaagacaccagtacggttgagaagggaaagggactgttatctctatcttgaactgtccccattaaactgatctataatcagaattttaagtgagttaaattctctttctgatttacaatcatcctttcttttgttcttagtcacttgtggaggcaaattcgcaggttatctgcagcctttcatgtcaaaatgtaaatgtttataaattccaactcaccattattaaactggaagcaagccagtgtttcagttgagggacagttaaatcacactgtttgaaccatatttgaagaaatgatgacaccagtgtattagtggtaagacttgtggggttaaggatccataggtctagtcatttgagctatagagaggatttcaccatagtcaatggtcttcaattgctaaatcgggtaaaatagctcaactattagtttcactatggatgtctagaagcccaaaactcatcagttaattgaatactgtagactgggggaaaaaattattttatccaatcccaaaagaatcaactcaagtttattttacagaaaaatattgcatctagtcctatattgtaattttctgaaggtttttaaaataaaattattttaaatcctttgttgctaatggttgtaaaaacactaatccaaagagaattgccagtatctaaataaaacaccctgagttaatttgactcaaaaaatcaagtcctttgcctcagttaagtagaatgtgagaaaatggttctaacagaatcaagttcagctcagggaagttaattagagtgtcttgccttaaaagacaaggtagttttctaggcaatggtatttgataacaatgtttcacatgaatgcaacaaaattctgtgctctgttaagaattgccgaaagagaggaaaactctgtgagagagtaacctgttacagtttcagatagccagagggggaaatcagtctgaattcataaaatagtatatcatggattttttaaaaaataaaattgcttcgaaatacatacaataactcgcccaagatgtgtatgggtgcgtgtgtgtgttatctccatcccaataaatgctattgggaatatataaggctgacattatcattttagttgattaaaataaaatatctaagttactcgtagcatgcttaaaatatttttataagtaaggtaaataggcttgacaaactggtgatatcttaatttgcttctcatatccatttttatggatatgataaaggtacttgtcagcctagattttgttacaaattctcaatttatgtttgattctgaataaaattttattaaagatgtctaaatgcagcatctctgctaacataggatttccaaaattttaatttgtcaggaaaatgaagagtaagagattacattgtgtaacatagggcatttttttcctgcctcgtcttagcacaagatattacaggggtttttactctttttttaaattttaaatcaggattagtatactcatttttttcttggtgtttcctatttgtaactgatataatgccacaggcctgggagctttaaagaaaattatttaataataaaatagtatttaggagctcttttttttttcattttctgagaagatataatgcattcctttaagcattttgaatctcttctctagttggcagcagcaaatattgtaagggaatatttttgaaatatgaatcttaatcacatcttctgccatatccacaagagtttccattttatatgccacattcaacttcattcatctgacaacaatggaaaaatgttactttagacatcaatggaagttttactgagtatcatcaaatgcttagcaaatatttaaaatatttcacatattcttacgatcagaaattacacattgaagaatacttcttgatttgggaactttaataaaaagaagtgagaaatagatcttggtctgacatggaaggtggagcaagctgatgactttactaagtgacttgctacattcttatagaacaaggtagtgggagtatttttcactaaactatttatgggaccaaggtcacgtaacttactcttgtagcctaagctggtgataaggcttggacttttaatttccaaattatagcatgcaggtattagaaaactgatgacgcaagccacgattctcactgaaaaagaatagaacaatatcacacctgtaaccccagcactttgggaggtggatcacgaggtcaggagttcaagaccagcctggccaagatggtgaaaccccgtctctactaaaaatacaaaaattagccgggcgtggttgtaggcgcctgtaatcccagctacttgggatactgaggcagagaattgcttgaacccaggaggcggacgttgcagtgagccaagattgtgccactacactccagcctgggtgacagagggagactccatgtcaaaaaaaaaaaaaaaaaaaaaaaaaaacaacaacagaacaatagcactttcactcatttgcaattttagcagagttttcatgggtgaatatcaacatctgttgctccatttcctgaaaagtcctgtgggttggaatgccagtgctgtcccaattcactttgtcttttgctttagtaatagcaaaaatcaatgtaattaccatcactattcacagttttttttaataaatagtgggaccctcatttaagtcgataaaattgttctgtctcattctttgcctttgttcaggatcacatatgaaattcttttctgcaagatggttttctacctccattgaccttgaaatgaaaaattctttcaaaataaatattttacaaaattatttctaagtcgaaaaagacttagtgtcttggtgtacaagagtggggtaataccagcatgtttctcagtggggagtggggtaaaagaggaggacaaaaaggttaattaatgcataaaagtgcctagatcaaaggcaggcaccactgtaagcaaaagacatctccttgaatatttcctactaactttcaaaaacgaatggaactcagctgtggtttaaataataataatgcaagagacaaattcaagagctttgtctcttgaatcaaaaatggttgtcaagttttctggttgcatatacttaaacctgccaaaggtaatgatggctacttcaagaagtctgcctaagatgttgatacaatcaacgactctgtttagttgttcttgccaagaaagaaagaaataattccagattccaggtgttactacttagctggatgttttactttataaggaggcagcaattcatgagaaacagctgtaattacacagcattcaggtatttcataattaaactaacagctgattttaaggtggcacatggcatgagattttgcaactaggctaagtaagcatgaaagtgtagcttagttctcttgctgtcggctttggacaaatcctctctgtgccttggtgtacaagagtaggccaataccagcatgtttctcagtggggagtggggtaaaggaggaggacaagagggttaattaatgcataaaagtgcctagatcaaaggcaggcaccattgtaagcaaaagacatctccttgaatatttcctgctaactgtcaaaaacaaatggaactcagctgtggtttaaataataataatgccaaatactggaatcatagaaaactgagtattcttatcggtatccctgtgactcagtgattttggttccttagagaactcatcttgttatgtaggactgaagaggagcttggatgtcagttggataacattgatcctgttgaagctgtaccaggcactgtgtaaaatacaaaagttgtagagtcatctgcaggtctggtatacatggaatttacaatctaagtttcacgcataaaacatctttccggggaagacataagctattgcccttgaagatttgtaacctaggggttggagatagactccatgaggctgaggctcctctattccccatgcttcaggagagttgctcaagttagtcatggctgtgcctttgcttgtctctcccaagttctatttctattgcttggtaagtaaaacagcttattttcagggttctttaacaaattctgtaattagtactctaaagtgttcagtgatcctgactgtgttacttttcactattgcttaagatctcatgtcttttgagtgacctcttccttcaggaacccttagagccttggttttgtgagcccataaatgccaggaagcctccaagatttctagctttgtgaagtttacagaccattcatttccgcagtctcctgttgtcatctctaggggaattgcagtgtgtccatccacccttgaggcatggcaaggtgaacatcccttggactgaagactgaatgcttggttttgttcccatacttaatctgagagattcaaataattctttactttgctgctttcctaagactattttaataagaaaagcatcaaaagaacttggtcaagatggggaatcttgggtcaggaaaatttggagacttacttgaagagaatatttgaaaaagattcaaagattttgaactatcagggtagagggaaattgtttctggtggttaaaatggtaggaagtggctttcaaatctgaaaaaatctaaatgtttttaaggtgttccaggcactgtggttaacaatttatattccttttcttatttagtcctcccaacaaccctgccaaagaggtattattattcccctttgaagtgaggaatcttagtgcattcaaaaacattcatctactatttattgagcacccatatttctaagtgctgataatgtagttgtgaacaagacagcttatattttagaggagacaggtcattagcaactcaacaaataagtagcataattttcctaggaaaatatgttgtgcagaaggtaaggctaggttacaggtcatgccaattgaaggtgggaacacagtaggtgggtttgcaggacagaaagaatgtatgtatggctggtgagtgaacaagggaggggtggtggtgggaaaagatgcaaggatcaggcagggtcttgctggccaaggtaaggagtttgcatcttattctaggagcgacaggaagcttgaggaaacatttataaataaatgagtgatgtgattccgttatgtattgcaaagtttcctccggcagctgagaggttgaataatttgttcaaggtgaggtgggcacaaagaagaaagatggagggggataaatgactcacttggcacctgggtccctctgccttgaaatccctttcctgaatactggtctattttacttgactactagtattaagagattggaaagaaagaatgcaagtaatggtcagagaggcaaaccgacttaaaaagctgaagcaaaaagttgcattattttaggaaaatgaagcaggttcattcgtgctaactcctgggaagctggcctttgagtggctggcttgcgtggcccttgcagtgttacctggcaactaaggtaaccaggtgaggaggctcctttttaaacataccactgagaacaaagcttcgtttttggatactcaggtacaaggaggactgatatgtttgggtctcctgaactgtgttcctgaatttcctctgccttcttgctaataacctgaattgtgcagatactgctgcggctaccagcacacaccagtgttgaaagcagcaagctttggaaggttaaggagcaagttgtgcatgaaacacttgaccctgccctgctaaataaagaaccgacatacagcctacagtgggaagaaaagagagagaggatgctccttgagaatttttttttgtgttgcagactcttcccctccccttcctcctcccaacccacccccagtccatctgtgatgcctgaattctttacaggctgtcttgctaaagacatcctagccttaatcaccttctctgtattgtgtatcactcctgtatctatctacttatgtcagttgtttaccagttcccttcagctgtctgctttttatcatattattgatcagtcagtcttgggcgtcttaggttggaggggagagagagagaaccggcaaagggaagcaggagtagagaatagcggtggcggacaatcagttaagatggttccaaaaatagctcagctctgctgatgacagctctgcttgcagccaccccgtatgggatttacgcacttcactaagattctctgctgaaacggattcgaccagctgctcctgcagttggtggtggctggtggcggcggtggcagcagtgggctggttacatcttcagagaaggaattggaagcgataggtttggggcaaggcaggctcccacacagggacatgagatttattatcagaggctattaggactcaggttgtggggcatctgtgttctttgtacactatgctctgggcacttggcatccagtttctttttgtccctatctcttttgaatgagatgagggagtaagtgatgagaaattgttatatttctcacccactgtgtctattttgttgctattgctctagtttattatatacataggctttttttccctactgcactttctgttgggagactcagctatgtacaggtcccaactttataattctttggtcttatccaagactttcatttgtcaaagaaactctgcaaagtggctgggtctaaaaatgtaatataagtaagtacaacattgatagagggcccctgtccctcaaagactctaagtctatgctatgtagaaaatgcagtgtttcttatctagtaaggtgatcctctcttagaaaaagaaatgatcttgcacaggctctcaggcttttgtaatcaagactccttccagccacaacacctctaattacagggtttttggcatcctgattgtcccccaatgtactatgtgtaggggcactgtgggggtgccctataatttgtcaagcttattatcttgctctggcacacagaatacactgaatcaatttttaaggtctctttcaaaatgtgtctacgtcatctaaaacccataaatattaaaatcatatgcactagaaacagttaagatgtttaaattttccagaacacagagacttaggaaacaggcaagacacaacatgaaagcaaaaaaggaaagagaatgttacttattctattatctgccatgatggggaaaggggagacagaaaaacaactttctccttataaatcccagcttttgctgctgcctttactataaatattgttattcaaaaggttttcacctccttcttgggaggctattcagtgaagtataagatataaagagcaattttattgcctaaatgagaagctggccaaagtgtagtttcctcagctccatgctcagaacatctgattcagtaggttgagttgggactgatatacattttcataagcatgtgcagtaattctgatgtagctcgtctgtggaccacaactcaggaaccctagtcttttaaatgtatatttttttaataacatggtgctctaatttggagccctcagaaagaaaggaaaataaaacagcataacctgtgtcctccatgatagtttagtgggctctagtattagtttatttcatgacatgtaattgttattttcatttaatttgctgcacaattacttttatgtataatccatgttgagatgtgaataggacaatttactttatttaaatactttcagcattggcatacctgaggagataatagactatgagtagggaagacatgggctgatgttctacagtgttccagggtcagccattttcttgctgcaagccggagaagatccacacttccttctattctattgagccttagagtggccacaaggagtatcagttgctccctcctttgaaggctggagtctgtgaaggcagtgttcaagttcacttgttaacccacatcgccacctactgtccaccccccatccttaattaagaaacttttgcctgggagttgggcggagattagtgtgagaggctacagtatgaatgaaaagtgagattgtgaatgcacctctatcgagccctattcagaatgcttgatttgcaatagtttattaagaattacagcattactatccttaaatctaaagtctctctctctttcagtccagaagcaaattacttttgggttagaaatagcagccaagttcctgttaaaatgaaaacaaacctctctccaccttgtgtctaaggccctctttgttggctttaaaatgtttattgatttggggatttaatgttggatccaactgtgaatagtggccactttgggcctggtgagtgatcctggaatttgtcaaacaagtttatggaaggaaacctgaaaatgcttcaccctagtcctttgcctctttatttttgtgggttttttttttttctctttgagaatgttttctatttgagtggagaatgctctcatatggtacttttctctgatccttttggaaagagcaagtgtcctttgagaaatacttgttcttggttgttccctgctccccacccccatgcctgtccctgccacttctagagcaggtggaagtcgcctgtgggttcttctggtctcaggctttgactgttcccctccacaaatttgttcttaattcgattttgtattgaagcacatcagttatttgggcttccatctttagtgaaaagccacctttgcgtgttgttatgccacattacagtgttccagaaaacatattggtgtagatgcaaaatcttgccttcataatttttagccttatgttggattagagagcatattttcaagttgatctcttggaacctcagcatgaatctatattagaagcccagagaatgctaaacagagttttcactgagccatattagataacaaattattttacctataaatgagatattaattatatagattagatttttgttattagattatcagctatggagtgatcaccaaggaggataaaatagaaatagtataatcttctttgcccccctttaactctactatctgtggaatatactgaactttttacaaccaagtctttaatgctctttactttccctagcaaatgttcttccatttaaaaagtctttaaaatacttctttattttagcagtgcttcagaaaatctatcttagaccattctatgcttttaaatctatgataagattaattaagtaggctaacaacctcacttaaaaatattacctcgttcttgtaacattaatttctacagatttttttattgtgtagaagtagatacatagatattcctagtaactatagtataatataaaattaaaatcctatgtgttgaatcattatgttaataatagctgccatttctggagcactgtgtcttccaggcctctggtaaacactgttgcatacattatttgtcttagttctcaaaataatcttgagaggtttgtactattctttccatcttacagatgcagaagttgaggcacatgaagagaattcttaggatcctaaattttcataaatgccttcaggggaatttgacaatcaatctccattaggatcacattctagtagttttggccaaggagagtaaaggaaaagcttgtctttcttgcctagaagtttaaaggtcaaatcctctctctagccatattgcaattctggggacagttcctattgattgggcacttccatctaatatgctgttcaactgagattctttctggccaagagctgtgcaggggtaggtggcctcagagaaggagctgctggaagggagaaaaaggtggctttgtccaaaagagatgaagctcataggcatgctgtgcttcataccctctactagccttgctcatttaggttatttgctgaaaactatgcctgtctcagggagaatagtgggtgctggagatccgttggtgagtggatgctttctcttccctcatatagcttaattgttagtgctagagacagatactaaaataaatgtactggtgcaaagttaacaacttgacttcataagagccataaggggaaattttaaattgtgtgaaaatatatgactagaagagctgctctattctgggatggccatggagcatcacgaaaggctttgctgagcacatttgtgctggacttagaatgatggctaggagttactaggctaagaaagagggatgtgccaaagatctttaaggaacttaacatgaatgtggctgaggaaaagtgagggatgagcttagagagtgtggaaagggtcagataatggaggacacagtcagtcgtgataaggattttgcttttttatcttaaaagcaatggagctcatgtactttcctcttgatctgcccaagtacttcagtcttcttttccccttttatgcttttcatctgtccaagctcttcagctgagctttcctcactgatgacagcactatctggagtgaaggaggtgcagatcctgagatggactgcacaccccttggggctggatggacagactactcttcgagtgagataagggatgcaagtgtaaagggcgagtatgttgcctcactcaatcacatgttcaccaccctctctgccaacctttctgcctcctgctacaccctgcctaagccatgctgaccaaccttgtcactctggcctcactggagcaagaaagtcttagaatgctggagggttccacaagaataaaaagagcccaccacatctgcatgcataaacactacacagctagctcttgcttatttctgagtccagcaaatattatttgagtgtttttacacatcactgatccaataaggaaaacttgtataaagactaatgtttttatgcttcctttatagaacatgaacacatttgaggttttgttacttattctggagcattaatgcaagatccaagaatatcagctttaagatttgtttttctattctcagaataggtttgaaacagagagcaaaatacctacctgtatgccttctttagtgacagttgtttctaaaatatctgtctttcttctgagagaactatttgagtagtgagaattaagtaggaatggacataaagagattatcatgaagatggttttatgatcatcactgtcattgccattgtcaaagaggcatttattaaatgccagatttgattttagcattgttttaagttctgttacctgaagagaattcaaaatcacagtctttgtcctatgggaatttcaatctatcaggcagccttgatttagaaacatttgaagaggacataaaggtaacaagaatgaaaagagattggatcaatatataaaaactgaaagcatttatattacttagaagttaaaagtcaaaacaaatctagaatactgttgggatagtcagaataggttaggctgtgttgtggtaacaagccaaccccatacctcaggagctagcagaatggagtttatttctcacttcatacttcatgctcatcacaggttggcaagagtatgctttgtgtcatcattgttaagggacctagactgagggagcctttactatccagaatgttgctcgtcaccctggaagcaggaaggaaatcaggtgaattctgactggctttgaaaggtttctatccagaagtgacactttactttcacattcgctccattagcccaggcaagccacacggtaatgcatcactcgaagagaattagtaaaacagtaaagaaacacttctgatcaaatttagtaattattctagccacagtaatcagtcaatctaattagatgataatactattagtacttatcagcaacaaaacatgtgctaggtatcaaatgctttgttaagcaattcacacacattactacatttaatctttactgacttatgaggtgggttctatcattatctctattttccacatgatgaaattaaaactgggagtctttaagcaacatgcctcaggccacacagctggtattttgtagagctacaattaaaacccacttactcctaatttaagagtctgagtgttttttcaagattcctatcatgtcacagaagtccactgacttgttttgatcgagctgagaagaacagactagagtcacttctgacctggccacttagaattattaagaagtgtctctgctttgctagaaatctgtctttggctttgttggtatttagaaccagatggatgatgatgatgattattattattattgtaaaccgtcttccacttgttttctatttcctttctttaagggtgttagtgaataattctttctttcacccgggttcctggagctccttaagaattaacttcccaggctctttcatgtttttctggcaccatcttggatgatgagggcttagaacattttgtgactatgcccactgtctggaaaggcttgtaggtgaaggattctttaagaaaactcagatacttttctcaaattcacttatgatgatgttttcccaaatcattttttatcaattctatttttggtttctctcacttatgaattgtttctgtctccttcattttggaacatttttctagttcattgtttttttgttttttcactctccctccagtgtctagcaaaagcctaacacacattacttggatattcatatcttaaaaatgaaagaataaattagtaaagtggtggattcagaattctagttgtttttcagctcctctgccttgattacctctcaccaagattttaacgaagagtgctatgttaacaactgagccacttactttctccattattatataattttaataagtttggtagcatgttttctcacctgtaaaatgagaataatgatagcacccatctttcagggttagaatgaggatttgataatttcatgctgcaaagtacttacgatactgcctgacacacagaaagtactaccataacagcaacaacctctttatcctttgccttgggaatcaaatattttctacagatttcacttttcaggttttctttgtacactgaattgtacctaaaatttcttgtgcctcctataagagttcatcccgaggagattggttgcattattaccatatatttagatatttatttcctttaatctggtcatttattatcaggcaaaattcacccccaatatttcacataggttcttttctattttcccgaagtgttggcaggtctgagaaataaagggaaagagtacaaaagagagaaattttaaagctgggtgtccgggggagacatcacatatcggcaggttccgtgatgcccccaagccacaaaaccagcaagtttttattagtgatttccaaaaggggagggagtgtacgaatagggtgtgggtcacagagatcacatgcttcacaaggtaataagatatcacaaggtaaatggaggcagggcgagatcacaggaccacaggactggggcaaaattaaaattgctaatgaagtttcaggcacgcattgtcattgataacatcttatcaggagacagggtttgagagcagacaaccagtctgactaaaatttattaggtgggaatttcctcatcctaataagcctgggagcaccacaggagattggggcttatttcatcccacagctgtgaccataaaagacagccgcccccaaagtgaccatttcagaggcctaccctcagggatgcattctctttctcagggatgttgcttgctgagaaaaacaattcagagatacttctcccacttgcttttgaaagaagagaaatgtggctctgttttgcctggctcactggcagtcagagtttaaggttatctctcttgttccctgaacattgctgttatcctgttcttttttcaaggtgcccagatttcatattgttcaaacacacatgctctacaaacaatttgtgcagttagtgcaatcatcacagggtcctgaggcgacatacatcctcctcagcttatgaagatgatgggaataagagattaaagtaaagacaagcataggaaatcacaagggtattgattggggaagtgataagcgtccatgaaatcttcacaatttatgttcagagattgcagtaaagacaagtgtaagaaattataaaagtattaatttggggaactaataaatgtccatgaaatcttcacaatccacattcttctgccatggcttcagctggtccctccattcggggtccctgccttcctgcaacaatttatcatctgtttgggttattgtcccagggaatcatattttggtaagacacgtattctttttagcttaaatacttgttattataatacaataggcttaatgactttggctccatgtatagcaatgttttcatttgttgatttgttcttttattcaacacatatttattgagaaaaagaaaaataattacagagactcttagagctagaaagaatcttaaaatcttttaggcgaaattcaccctcacttgtacagacgtaatactaagcatgcaaaaagatcagtggcagaatttgcttcttcagtgtcaaagtagattcaatgagagcagcaaaggaaggaacatttcacttcttttcatcttttccttgggtaattccatttccctcaataaagaagggaggttcttccatgaaattaggagtttctgctcctgtaggtttgctttagtattagttgaaacattttgaatcaaatatgaagaacagtaattcatatataggctgaaggacctagattttaagttgttatggctggccccaagtctgcattgacataaggaatgtctagagtacattctcaggtctgcagccttgcattctgatgtcaagaagcttgaatggtgtcacagaaagggtgtctgaagacatggtgcatctgtttcctgtggcttccaagcaaattaccaccaacctggtggcttacaaaaatacaaactctcttgcagttctggagcctggaggtctaaaatcaaggcactggcaaagttttagtccctccagaggctctcacggtgactccattccttgtctcttccagtttcaggtggtgctcagcactctttggcttgttgctgcttcactccaaactctgcttccatcctcacatggtgtttgctgtgggtctctgcttctctctccgtctaacttataaggatacatgtgattgcatttagaacatgcgtggctaacccaggataagcaccttctctccagatgcttaatttaatcatgccttttgtcatataaggtaatagtcactcttttgccatatgagataacatttatccattctggagattcacaggttctggggattaagacagggactcatcttttccaggggctgccattcaactcactagacctgaatttaagttcttgttctttgactgcctttccatgattgggcaagttactgcatctctccaaaactagggtttctgctctgtaaaatgagaataataacgcctaatttacagggttataataagaaataaaagtggtaaatatatgtatttatatatatgtaaagttacctaacccagttcttagcataattagttgctgtagttccaggcattcaatagatagaacagattttaaactactttaaagactagtgtgaggctggcctatacttagttaagaatttgttaaagtttgatgatttggttgaaaaaatattctggagtgtgatggttaatccctctggagaaccctgactaatatactgagtaactacaaaatgattttatatttagttcaccattatacatagaatagccacaaaatggttttatattcagataaccattatttgttggccatgcctcatttaataatatttcctctgtctgctttccactgcttcataaccactagcacattttgaaacatattactatgtgatgtcaaattctttaaataataatgagttttagtttgagtaacaaaccagtgatgtctgtgatgtcacaggcctgaaaaaaaaactgttgcaatgatcttcattggctaaattaaaatataaagagtagtatagaatttatcatccacattttacagaattattgtttgagtcatttagggtttctattccagtctcttaattgaactgtactttctatatctgcaagtcaaaacactcatcaaaaaatatgacttcaaatatgatagccaacttttgtgttactacatagtgttaattttacagttttttatatgaaataactctctgagttaggagacaagtaaagaaatgttgccaacactcatagatatgaataacaacgtaatttaaggcatgttgcaaaacataaacttttaatatatccctctataaattcttacttttagtattcttaattctcagatattactccttttcatatgattgcatttatattcttgtttaattctctcttttttctacttatatgatttcctccccactgacttctgctcctccttcctgcttatagaaagaatgttgacctcaaatgtctattattttttcattcaatgaactacagtaaagttgatgtgtaggtgacaattagtgtaggcaaaaggtagagtaatgttgctttccaggtatcttccaactctaatattctgtggacttatatacttgagagtattcattctgcgtgtaagatctcacacttctatagctgatacattataatctgcctatgtctctttttatctgatctatagaaaaaatattattttcatatcttcatatgtttttgggttaccttaggctattaaaagaaaaataatgaagatgttaagatatttcaggacagtatgagtatgttggggtgtgtgtgtgtgtgtgtgtgtgtgtgtgtgtatgtgtgtgtataaaagattttactttttactcagccaacgctttagagatcttctgagtttccaagtaaatttatttgcttaagatgtgtctgtttgctttcatacagccattccacatcttccaagaaatgacttcaagaacatctgcttcagtactcataaacatcctatctgctcatcattttcattcttttacaacactcccactttcaaatcacatccaaaatggcaaaaagaacccaaagctaacatgattttagatgtcaattgtgtcctctctgtgaatgttttccatatttgaaatggctgtggaattatcttgcctctacccacagtaattgagaatgacaggaattggaaaagggtcatttcctctgtctcctgggattctgaaagctgtgttttcttttatacctgatcaggtctgccagttgcaaagctatacaatgtagtggagaactgcatacggttaattatgacaattacaatcagttctttacaatctctgctgctgttatgggatttaaataccataatgtatgtcaaaaggacaaaataatgttcctatgttttctgcttacagctgcttttatgattgggttttgctcataaacaggtggttataaagttgcaatccttccatgaattcctttatctttcctgtctcctaacctggcttccctggtgtgtcattgaacacaagtgttgagattcctagcatctctgaggtgatctcagatcctagacagtgtcccttgaatatgctgcaataaaaatgaaaccacttatggtcagcagaagtaggtagatgaatttagttaattctcaaagtctcccttgctacttcagacctctgtggtttgccttcccactgcgtcctgcaccttctctctattttctacctttgcttaatccctactttttcaattttatctcagtgaaacactgtgcctagtttcttctcaccattttggtctccagctcatagcatgttgtgaagactattgcatgcggacttgaatttatgtgctgttgatacttgggtacttgtctctgatgttacaagttaatccatacagtgcacatgtggtccctcactgttgctcaaggcagctggaaaataggtaaggtaatctttttctttcagcacaccttccgtctctgcagctcttacctctacctgaaaggtaggtataaagagaattatggccaatgaaactccatatgagagccctcccctcctccccagagtatatcttgcttaaacaacacatttacggttaatgaccatctggtaaaggtgacagcctttagtcctcctaattcttaactgtctgaaaaaatgtgcccaacctgccacggcttgtgactgaattataaaccatgaagcataataaagtcattaagtttcaacatgtcaaaatggactcaaattgcatcttgcccagaatttgatggcctttccccagcacttaagagagcagggctgtgtactgttcaaaaagcactttgtcatttctcgaagtactcttagctttgtgtggctgtctggacacaagcatcagcatctccaggagaaggaggaaatcgagtgaagtgagagcatggaggggccagtatgccacttcctagggaaaggcaaaggcatttcttctcaggaaaagagcagagaatgatgctgtacctcatttggttattgctcaccctcctgaatatatgattcattttacagtgggaaaattttggataaaagcttgtgctttacaattccgattacccttccccttttatcccccactatcaaaaataatcatattctataaacgtcagtggaaagtggtgagagtgcaactacgttttggagaaccaggtgtcagctctgtcagatttctatgaataggcacatctatatacactttttcaaagaaagaaaggtcactcgccaccctacttgtaaaactgtcagaggatttaggaaagaactaagttaggctgtcttttcacatgggaaaggaaatctggttctcaagatatttggggcattgcagtgaataagggatattaatagaattccacccccggcctctggctaagaacttatctgcctagaatctgaggaggaaaggaatctaagagttacccaaggctcagtctcactgcaataggaggggataacactgaacatggtggggcagatgtgggctttggtatctgttgctagtttatcctcccttcacccaccagcgcagtactgccatttcttctttcccctggaattctctatgtttagtgagcgagtttaagaatggaggatgctcagggatcttcttctcttatatagagactgggataatttgagtgttccatgttctgacacaggtggcatggatgaaggggtgtcactgaagaagctttggcaaaagctgatttacctttccaaaggctctgtgtcaggtgctggataaccgttaaaagaaaggaaagcaagccctctggcggctggcatgcagaaatgcacctgctaagccaatgagccattacaggccgtgccttcagattagagaaggacatgtcaaattagttggagagttttagaatactttatttattccagcttgtacatgaagttatcgatgcatctgctactccaagcatgttcagatgaaataatagaagaaagtctttaaggtattaaggttcatcttctgaaattgttcaacacttcttaaactgcagcaggcccagttgggcactgatagcaacttaagttgtcattactttgtgggattcagatctcgagaatatttatttagtgagagggagccagcaatttgtttctgtaggcaaaaggagattacagaagagagaccccctttgttgctgaattgagtagctgggaggagttgctggaagtgatgaatttaccccaagccatgaaggatgggtaagattagaacagataaaggaaatgaaagtgaacgtttgaaatataggggccacgggagcaggagtgggtttgtttttgaagtcagtagcaagcaagagttgagagtcagtggtaagtaattatgcacagagaaaacttggcaaatagataagaaaaaatcacattaatatttaaagtggtttaatatcaattgaatcacaaggacatcttaggtattcattatgaagctagagacagtatagcctctggacttaaggagtgggtctgtattcaaatcgtagttctgacacttctgagagtcctcaggcaagttagttagcttctctttgaccatttttcccaatctgttcacttgggatgagaagataatgtatctttagactcagatacacaaacattatctaaatccaggatgtagaagttgagtgcaaggaaagtctcagttgtccccaggctgcatatcattcaactggtgagtttccagctgctggtgtgcacaaacagaagctgaaggaccaatggcaggagaattacaaggcaagtttatgaatcagatggatatttggaccagatgacacccaggggccctccaacctagaggtctggtagttctaaaaattccatgatgtcccacaagagctaactgagatgtggggataataatgacataagtttacatcttacgctaaaaatgttgtttaaatttagttcaaaatgttctgttctatgtgaaaaaaatactatcattttatttaatgcaacctatcactgaaatgactatctcaagctgtttctctctatctcgtggagggaaggagtggaattgggggtagggtgcagggtggaaagaaaggagaggtaatactgttacccagagccaacatgttgctcttcaaaggggcttcagaaaatagaacaaagattccagcctgaatgagaaaggaggtggagagtttgaggaacacaaagctttaagtggaatttaccccatctaattatttgcgaaggaaagggtggaaagaaatgttgacagcaaagatttcatggagaacaggaacaataagaccctgtgccagagcactgtattctttgatgtaccacatatggagaagggatatagaacttgagttcagcaaggtttaaaaggcaaaatgtaatcacttccctttaattaactcaaacaatgcacggcaggttatgttaatgtgcctgtagctgagatagaggcagtaggctgccactaatacctgagagagagacagagagagagagaggaagagggagagaaagagaaagagaaagagagaggctcctgtaatgccagagcaggaagggcctagaaaccttatagactaattttacagatgcgagaacaagcctagcaaaattacagaactcacccaaggttatatggtctctcagtgacaaagtgaccataatacctcaggcctttaccaagttagtattctctctaagacactgcatgacggagtccatagtgatttcaagttagcccaggggttaaaactaaccatagtacatttgaatacggattaacatttggtgtgtcctttgaacaaaaggttaaatagaaaggtaaaatgtagaaaggtatctacacgtattcacttcagtcaagctttacttttaaagttgctttagaatattcttattaaaaccagtggtgattttcatgcagctgttttaattaaaatgttgtatgttttttataaacaaagtgatgaaaatttctggttatagccttgtagaagactgagcagggaaaccatcagaattgcaagtggagcaaaaatgttataatttagatcatgtgaccgaaataccaccaccgctgggtagaatctgcttaaactgcagctttggatttttcaggggtaaacaaacctcttatgaaaaagaaagccatgcattaaaattataaaggcacatgaaatattacaggaaagaatgagaggaagtaaagaaaactaacattcttctgttttactgctttcagggaagagttttatgaacagtttccaaaagtgttcttaagcggttgtaggttttattttgctttacaatttgacagtattttaagattctgtatttattctctttttgagctgaattatgcaggactaaacagatatcttttgtaaaaccttttatttccctgacagttaggagaaatatgaagtaggaaattctttggtaattgttggaggttggtatagtgcagtagataatgtccctttactgaatttattatcaaaatacacaagtcagagggaaggagatcaaaatatagcttctatttggtgatatactggtaaatgtttaattttcttccttttagaagagaggagactgatttatagtgttgacatatttttacggtataaatactccctccctggtgaaattcaagatgccaatgggatgtcactgaacttgaaattgggcagaggttcatatatttggctcttgcaagccagtgcaaacagtcttgggacagcactgcctgagtgcatcactcgtaaaggctgtgttagagagtgtggcctagatctcatagattagcagacttgttttaatacatcacttcagaatcagtcaaccttcaaccacaggtcttttcttctttggatgcctgtaccggtaaaactttcagcaagaaggagcaaagcaaaaagtgtgcttaccacaggcaggctggcagccaggagagttagtcgtctcccagactctaccaatctgatgaattcacaatctgaatcaagctggggaggccaggcatgtcactcagatggaaggaaacaacgaaagtgagaaataaatgttaactcttagcagcatcagaattcagaatgattcttagaaaaatgttacagggtttgtgtcaacaagaaggtcagaggcagaactgtattttaaatatccaacattttggcatatagctattctagcaaaagcatctttgaggctgtcatgtggcaagaattgtggttatcagaaaaaaaaataggagtttttaggttacacttaaaatataaagaccttaatagacctttattttatagaaagatatggaagaataaatttatattcagttccttcaaattaaattattttttcaactgggtgtaactgaaataaatagggcagccatagtaattttacttaagcaacttcattgcctcagagagcagatgatgaactattttagtgaatatatgaaatgatatctggcaagagaaaaatacttgatcatctcacttccttctagttgatgttcaagagtccctgcatccagatttacagctctttgcttacacatccatcattgttaatatgccaataccctgacgaagcaagcctggtattggctgcatgagtcagtttttcctggtagagagtggtttattattcttgttgctgctgttgtagtattaacatctgacaatttgataattaacaatgattataaattagcttattactataatgacatgagtctaagtggacatttgatatagcttatttttgagtgtaaaaattctggttctaagtcaggtgtctggaagtgttttgttattatcaccgtgctagaagataaaatctgagttctgaatcaacctactttcttattctgttgcctgtgacattgaatctcatgttcatatgttcatgtgttttatgttcatatgtttttacatttgcttccctttgttagaatttctggttaggtgtgacccaaaactcttaagtcaggtggaggagcattttaggactggctctgccatttaacttaaataataagttattaagttattataacttaaataataagttaatgaatctttccaaatctgagctttctcatatataaaataagaatgctaatgcatctacctcctaggcaccagtaaagattaagtggaatcatgtatatagtgtgtaacacattttgtgtgtgtgtggttagtttctttttttttttttgagtttgttttaatttttagctttctcaaataagagaacatgtgaagtttgtctttctgtgcctggcttatttcacttaacataatgacccccagttccatccatattgatgcaaatgacagaatctcattcatttttatggctgaatagtactccattgtatacatgtatcatacggttttttttactattatactttaagttttagggtacacatgcacaacgtgcaggtttgttacatatgtatacatgtgccatgttggtgtgctgcacccattaactcatcatttacatgaggtatatctcctaatgctatccctcacctcttcccctaccccacaacaggccccggtgtgtgatgttccccttcctctgtccaagagttctcattgttcaattcctacctatgagtgagaacatgcggtgtttggttttttgtccttgtgatagtttactgagaatgatatcatacattctttattcattcatctgttgatggacacatagtttgcaggggtacatgtgcaggtttgttgcatagctaaatatgtgttatgggagtttgttgtcagattatttcatcacccaggtattaagcctagtacccattagttatacagtaatttcttaatacatattataacatttgttaattgtataagttaaaaattttattactataatatttgttaattttataaattttgtatgataaaatacgtgtattacattcaatgcatggctacaattagtccacgtttaaggactgactcactttctagaatttggcaatactatgtctctcaaagttttcctaatgaaataagctatttatctttccaacccacagctcttcaggttcacatctatttctttgctttctcactgccctgacttctacccttccctttttgtctccctagtacccaaagtcctcttccccactgcacctgccattcttctccaggtgaaagtctgatttaggaaaagtgtatgagaaactctcataataaagagtgcatttgtattcttaaagcattacagcagagctaaagcctaagagtataatttcaatattcaggctgtgggtaagagaggtatttgctcagccgtagattccttttgatgcctctgaaatcactgtcatatctgtaactatctattgtacagtccatatggcaacctttaattatacctgttggaataatccacttagccaaagtcaagcatcctctgattacgtgttctcttgttatttcctagttgtcatatatccttggcagctgtcatcagccgaatttggtgtttctaatttttagtagctgtcatcctgtcccaagtttctgtaacacatgcttcggccttgccaaacatgatttgctttaacagttagtcataattttttgggccttaccttggcgggctagtggtcacattttactgtaggtgatctttacaagtgacttcagctccctcttctagctttacctttttttttaattgcacaaaattctatgtagcatgtcaatcgataggcaaaaaaagatctgttagcctccattacccaagagtgggccatatttcagtggtaggtaaatttggtccaatagttatgtttgaaatgccaacaatgaataaattaaattaaaatttattgagcacctacagtgttatagttatttgcttgctaatttgattttaagtgtgtgtataagtatatgcatgtgtgtgagtgtgtataatagaggctattcttttcaaggtcatacagctactaagtggaaaagctatgaattaaatgaaaagtttcctggctaagaagtccttgctttgtcctcaaaataggtttttgctaagcctacattagttagaatgggaaatatatatagagatatatgggctgggcacggtggctcacacctgtaatcccagcaatttgggaggccaaggtgggtggatcacgaggtcaagaaatcgagaccatccagggaatattgtcactgaggtggagtaaattaagcgtatataaaaatacaggttgagtaaggttatgatagctactgagtaaggttatgatagctggccaacatggtgaaaccccgtctctactaaaaatacaaaaattagctgagtgtggtggcacacacctgtagtcccagctactcgggaggctggggcaggagaatcacttgaacctgggaggccgaggttgcagtgatccgagatcacgctgctgcactccagcttggggacagagcgagactgcatctcaaaaaaaaaaaaacatacaaaaaaggtatatatgactatagccctttttcttcataaggtttatagtcttcaacgatagagtgacttttatgtttttctaccagaagattcgaagttttgtagagacaaatgtttatgacattattactttggtaaagttcagtaaagcaaacaaacaagatgaaaacctgcctgctgagggttggttaatctcttctgaaaaaggtacactttggtataatgattcataaaaagcatgtggacactttacagctttacatttagaataaaacctgtaatcccaatgcctgttctatgtgttatacctgtgttttcctgaattatatgtctgtgtacctcctctttatacagtgtttcatctaaaagggtggcatttactgctagaatttgagatcatgaaaaggaatgattttagcacaaaaaaaactaaacctgttttctatcaaattctaagaacccagaggcaatgaatgctactgtcaaaaataatttgaagaaagtgtatctgacagtatttttcaaatttagctacaattttggttttactttggggtattgctccagtggagattcgttcatgattgtataccttcctagaatatacagatttttcttattaggcattctaaggagagcttgttactgacattctgcagaactttacagtcatagtatttcatctgtaatattatcttatagaatataaagattttcctgtaaaaatggaagtgtccccaagcctgtgtttctagtcatgtttcaatcactaagtagctttctgacctggtcaagccactttaccatctttctgggtcttctttcctcattggtaccaagaaagggtcagagtatttgaaccttaatgtctcttcttagttccaccatgttgctatgcacaaccctcatccactgcttatgactgctgtgtaaaacactccaacctcagtatgcctacaggcattccacaggaggtctatgaagcttttcacagttgcaaagtcatttttcccctttggaaactggacttcaataccattttggttcaacatgtgttttcttacactgataacaagaatgggggctcctaaaagcatagatgttctttatgacatcaacctcgaaaatgtaaaggatatattcaaaatataactcctctaaagtaagtaaccatttatccaaaaatttagagggtatattcaaaatataactccccaaaaataagtaaccatttataaagtaactaatgtaaatacttctggattctaaaatgtatattgggttcttgggaacttgaaatagcaattattttataaatcctttgtaatagtcaatagcaaagtaagatcattgatgtgtgtttactccttgttgtctcttcttatacgtttttccagaggatgaagttcagtacagtaataaagtaaaattaaaaaaaagctaatgtatttgtagacttctaaagtcttcaaatatttattctgccctgttgagtgtcttatggataggtaatattatctttaaaggtgatgctcaactttcatgctgttttatttgtttttttcttgagacagagtctcagtcattctgttgcccaggccggagtgcaatggtgtgatcttggctttctgcaacctctgcctcccaggttcaagtgattctcctgccttggcctcccgagtagctgggattacaggcgtgtgtcacaatgccaagctaatttttgtatttttgtagaaacatggtttcaccatgttggccaggctggcctcaaactcctcacctcaagtaatctgcctgcctcagcctcccaaagtgctgggattacaggcacgagacaccacacctggcctgtgctgtactatttatttttttatcccatggttacatatgttatgcaatgaaaatgttttcatgctacacatcaagtataaaactcttcaggccagactcctatacagattaagatggcatatatgaattgttttttttttctttctcccaaaggcataggttaggcatatttactgtctttgccaggccttttctcactttttaagacatccgaatgtgtagatttccttccttttcaacatttacattggaagatgaacatatttagaatgagccaaaagaaaaaatgctgcataaagcagtgttgaaggaagttattctggcagtcttagggttgaaattcgcaatccattacaagcatggaagctgtagagccttggatgaggctctacaaggattgggatttgtagaaatttgatgcgtccaaactctgtaattaccttaaagaaatccaagctttctgcaattaaaaatgtgtaattaaaaagtcatccagtgtgtgtgtgtttgtgtgtgcgtgtaatttatatccataaatatgcatctactatgtgaaacatctcttaagggatatgaatgtatgctgaaataattcagctagtgtaaagagggaaggaaaaaataatttatattactgggggaaggcagtcagatgaatataaatggggaagcaccatccccagcagagataataggttgagaaggagctataaatagggaaaatctgggtgtgtatggaaaaagtgacttcaacatatgattaattagaggtggtggggaaaacaatcaaagaaatatcaatgtgtagtaagtaaaaaatgtggaagggtggtgggtagaggagcaaagtatagtggaggttactgaatgcacagaaaaataattaaactcttaggttatacccttatccaagattctgaattagtttcttctactcagcttttccggggatggttagggcttctacagataggaagtagaatgctgtgaaaagaaggtacacttacgaaggaaagtttctgaaaataaaccagaaaactaatttgctaggggagttccctagtggcagagagtttacaccatgtgttgccctttctctctgcacttccaggaattccatctgcagaaggtgagtgacaggccggtggtgctggtaaagtctgtgctgaggcagtaggagagctgatgtcaatgacaaggcaacccttgactgcagccctgacacctgtctggggaatttagactttagtgacaatccttgacctgccatgcaaatctggagctataccattgaattattgcccgtgattgggtgtggaaatggagagctttgtgggccaggaagcaggcagtttgtaatgtgtggatttttagcccggcaagctagatgttctaccttcactagagtaattttaattcattctcttctgaagaaagaggtaaagatgaaggttgtctagggaggaggaatctcaatatttttcttcattaggacagttataatgttgagaccaaaaagatgtaagtaaaggtaattaacaaagggcaatctacttcctttggagcttataaattcctcaactacttagaaatgctactctgtctcaccctgacatttgatctttgtacttcagataggatttgacgtacgtttaagttctcagtggactcaggtttccggaggacttttttgttaactgctgattgaacctttattctgctccacatgattcctttgccagcttgtttgaagtgtttgttcctggtggaaccacaacaaatatgtgagctcattttctttctattaggtaaggtctttagagtttgggatttcaagtattcagtgtttcatgccttcagtgttcttttagaaatctgtatgtattcctacatttttcacaggcagtaatccagagaatctgatatggtttggctgtatcccccacccaaatctcacctcaaattgtaatccctgttatccctatgtgtcaagggcaggaccaggtggaggtaattaaatcacaggggggcggtttcccccatgctgttctcatcatagtgagttctcacaaaatctgatggttttataagtgtctggcatttcccctgtttgcaatcactttattctgccaccccatgaataaggtgcctgcttctcttttgccttccaccatgattgtaagtttcctgaggcctccccagccttgaggaactatgagtcaattaaacctctctcctttgtaaattacccagtcttgggtactccttcatagcggtgtgagaatggaccaacactggatcaaatctggcttatgtaaatctggaataaagagtaataaaaccaaccagatgctaataatatgacgccacctcttttctcccatccaagatgtgattctctagattttccagtctgatgatgttgtggagctcgcagttgacctgtatcttcttgatataagttccatgtggttgagcttggcgtttataacagaacagcaaaaaatgggatccctttcatcagaattcccctctttgcccccacactttgtagcaattccctgtttgccactttcaactctttgttgatctaattattggtatgtctacccaagaaaatcttaagcttatttggggactgtggtcttgttatatatatcatctcccgagatactagaatagcttaagtacccaattattattcagtaagtgcctgtttactgttggactttcttgaaaattcatatagaataccttcattttcttcacactttggtctgtaaacagtgtggaagtagtgaagaagacacaaagtcactttagacatgtttattactctcacttttatcctctcccctccatcagtgaagactcctacttgccatctttcctctaaagatccttagtccctgagaagcaagagctactgaagattatatcctaataagtttctaaaactcaaaagttttggtaggaaagaacatgtaggcttaattcctttctctttgacagtttggcccaattggatgctcaggtgtaatatgctattattagccctgagatgaaaatttcagggccaaaattattagtaaaacacttaacatttattaaatttttacagagtatttaatgtgtaaatatttactgcactgggtaccttatatgcattgttacatttaattctcattataatgatttattagctattacataggtatttttactatcatccttatctatacggagagtgaggcttgatgggatcaagtaatttgccagtgtctactagctcttagatagtaaattcagcattcaagttcatgcttaaattctaccctctatgccctccatcttatataaaccttaactccaggaaaaacttacctgtcttgtactaactgtcatatatttggtaggagaggcaaggagacatttttctaatcacattctttcagtatgtgttgggataaatttcaggggttggaatttccatcaagtgcacatgtacacctcttagaattgtcactttaggttatgacaactaggatgcattttttaaataaaagaagtgtattttgtatatgtattatatactgtattcttacaataaagtgagctaaagaaaagaaaatgttattaagaaaatattaggaaatattaagaaaatgttattaagaaagagaaaatatatttactattattacctgaaagtggatcatcataaaggtcttcatcatcattgtcttcatgttgagcaggttgaggaggaggaagagagaagttagtcttgctgtctcaggcatggcagaggtggaagatatggaggaggtggaaggagaggcgaaggaggcagtatattcagtgtgagctttattgaaaaaaatacacatatgagtggacctacacagctcaaatgcatgttattcaggggtcgactgtaccttgataataacatcactgccattaccgtattctgagttggtggtataaatggcatttttctaggtgatcgttatatatgtgtatcatgtatattaccaggtatagtcctgtaatagttccacctttctgcataaaagtcttcacaaagctaaactgagagttatagtaactgtaattatggaaggtaatcacaacaggaaatatgttatatgaaatacaacttttacaagttgttttacagtttgtgttatatgaaataacaattataggctttgttattctgaacattaatttgcattagccaaacaggagattcattttaggaatatttgtatctgtctactctttctattatctatatataccaataaacattgacaaacatttaagcattagaatttttgtctcaattgaatgaagctttcaaagatgctttttcttttttcttggaatcctgttgaatttccttgaaaaataaataagagttcacaccttctcagagtttcctctgaggtgttttgatactgttaacatgagcatcaaagtaataccaactcttaaaacacacataattacttaactatcagtgtatttctaagaaccctgtcatatgcacccttcttattttatgctcatgttgtaaatagacatacatgatgctgtgctgtcatagagaaaccatccatgttcactgcttaaagaagtgagtgtgagtttgagtgtgagtctgtgatgtatgtttagtctgtaataacaattctattaattcaatactgttttaaacatgcactcacatcctgtcatcagtaaaaccaagtgtcagttatccacacaattaatcaagttctcactcaggctttctagtaattcaactagtttcccatttccttatttcttctaggtgacatagttgcttctccatctgtaaagccagtataggatattttaattatttagttagcaatgtttttattaggcactcttttaggcactgacgatattaaagtgaacaagacagataagtccctgtttccatgtgaactagagtttacattccagttgtactagtaaacaactaaaacctctacataaggcagtttaatattgaagaatgtcctgaggaatatgaatcagaacaatgtggtagtggtgtggtatacacatactatttacttagggagacctttctagttggtgacttgaacttacacatgaatgagaagtagctagtcacaagaatatctataacaagattgttataaatagcaaagatagatagatagatagatagataaatagatagatagatggaaaaagccctaaagtatgaatgagcttggcagatttgaaaaatagattgactagtagagagtggatatttgcgaagatttattactaatgatagatctttaaatatccacatagctttaagggagcagtaaatttagcttaaggttagtaaaatgttcagtaccagcaggatatccctataagattttttaggattacagaacttggataaatggtaaattggatcaacatcatgccaattaaatttgttgtatggtctgttttattaaatctctaattcgtatttatataatgtataattataacttgctgcttatacagaatggttacccgtttagtattttatctgttcaacaaccatttactaatgtcctatcatatgcaagatagagtactaggggctgagtatacaaaaataaataagaccactctgtcatgaaaacatgtacaaaaaagtagataacacaggatttaaatatatttagtgggaaatatgttttctcagtttaaacatataaaaattataaagtggaatttcagatgagagtggcattgatagatataagtaggcatagctgatgcagagaatgttaaaatataattttgcaggtctgaaaaaccatttgacatttccttgtaattctggattaatgcttatatgattatctctgccacagtggaaaagtttataaatttaaattaatggaaattgctgttgatgaaaccctctagaggataatacatttctgatatgcctatagggctccgtatttaagctaaactcctgcccaagatgcaggatgatgaagtcctttatttcggccatcagacctattaaaaccacgagtatccctgtgagtccacaagtcaggctacaatacaacatcctcaatctgacaagaaaatcaactgatttactgaatttatatgaaccaattcttatatgcatgacagccaaaaaagttccaaaaagaaaacaaattttgcattagtatgagattttgaggttaggagcctacgtttagaggtttatcagttcagcccccgtatggagctatccagggtgctgaacgtgctctgcaactcagtccccttagtctctgggcttgacctattttttccattgttgtttcttatcttcaccttttattccctacccatactgcctgctctgattgctctttgtatgatctcatcaatcatatgtgacagatttttgtcccgacccttgctatgccctacattctaacctagtacattcttcaacccatgtttagccaaatttcaattaaaatttatacctacagccttcccaacaagtgccttgactctcaattttgtttcttgaagcaatgagatcattgatttgatctctaattataaagtaattaaaaacaattttatttcagtccacaaatacataaatattctaaaaaggagcctttaattcatttaataatccataaaaataaactgaaaaatcaagcgtggacttctttgtcactttcctctttttcattgtgaccttctctctcctcccacttctccttcctcctcatcatcattataaattcaatgagtcagaatggtttaattgaaattcttcatttaaaaagtaggatcttggtaaaatgtaggttcaaagacaattttacaatagtttaaccttagtagatgaaaaatagtaaaagtataaacaactcctgtgaacatattgtctttgaaattggtaaaataaataaaattgagatcacttcttactgtacatctccagcttattttaggatgtatctcttcctttctgactggaagactcaaaatacatttagagagttggagctggtgttgacagtcaatgattagggcaaaagttttgcatgtacttcacctctgtatttctccctaatttcatccattgtaatttaagaagaaggacatgcctgaattgaaaagttcaacaagtgaacttttgaataaacagtgtagatttttatcttaggtccaccaatccctaaccatgtaatcttgggtaaatctttaactctatggatctatattttttaaatttgcaaattgagaataataaaacatcctcacactgaagattcctgccagaattatatgagataatgcatatccaaagtttagggcagaaactgaaacctagccaacattttaaaaatgtgaattattgtcattaacttatcctttcggtgcttcacctctccatacattttaagatactctggtcattatgagtacttgccacaagtatataggagataaaagatttattttcccacccattattaggttcatagctgaggtatcctgtaataagagacagattaacaggaaaaaaagcatacaaattaatataatttttatgtgacattggagcctttgaagggaagacccaaagaaacagggaatcctgtgtattttagactttggtttcataaagagtggacagtcttggggaagtatggctggacaaaagtgggcatggcctgatggtaataagctgggggaaacttagcaaggcctattgttcagattcttcctggtgtctctgtgtgttcagctgctttcctctagttctagagagaatacctctgaatgaaggtctttatgatttgctttagatgaaagtcagaggattattttatggtctgcttcaggggagaagagtgagagaaagtcaaagagatctttctgcttctgctgctttctcaaatgccaagttgctgtattttggggtagtatgtcctgaaccccatcaggtacttgacatttcatgaaggtaagctgatcaatctttcatccatggcactcattaatgtctcaatttgaaatgttgtgagctatgaaaaaaagacaaggaaggtagtgcttatctactcatgaacaaccattattaactcactattaatcattgattacaattgatctattggccatggtattgttgtgaactttgaaatatattgtattaacatttctatgaaaatggtggttgaaattctgcaggcagataatgcagtgttaacataataagtaaaataattaatgatagtgaagttgtaaaagtaagaaggttcaatgtgcttgaaagtcacagaattttgaaaaatgcaagagataaggaaaactgatgaacaaaatgtgacaacttgagactggctatgcatactgaaatgaaccagtgacttttaaactagaattcttagagtgtacagcctacagaaatgtaaatatggctaatacaggtaactttctaatttaaatacctatcaaagcttctgttggaagaaaactagatttatacattgtgacatgctcaaaatccttgtcttctccaacaccatctccagtaaaatactcctagcataaaatttattaaagtgaatatctctgaaattaggttcttttggaattaaacaaaagagaccatggttttccaggcattgttgtagatgtcactttataataagacagataaggcagtcagtatacagaggtttggttttatggccagaactaacatttattcaatcaatgagagagatcaattagagcagcattacttctacagtgggaaaatttcagagcccctgaaatagaacattattgttaaattatcaaatatgttacagttgttgctagtataatgaccctttctctttatcagaatcagggaagaaaaaagccaaatggtgactaatttatcaccaggttcataactaagttaccaaaagactgaaactaatcaggtctgattttcaaaataagcaataacatttaaagcatatttgaatatacagatgtttggatcactgatatcctaagaattctatagtctctgctgattttaaagtcgagattagattgttcttgtatacccagagaagcatagctctaaagggaaggtgttctggggaaagaaaagaaaaaaatgacgttttcatcatcacactgaaaaagtgccaacaaatcctaagtaattttgtgttgattatactaaattagaatagtgatggctataatcatttgatccctgaggcattaatgaaaaatcagcattattttgtgtggaatatgtattattatccttgagcttaggaatgattattagtaagtctgattaaatctggaagcagtgacacaagctatctttaacccaccaatgacagggctatattgtaaatttatgatgaatgaacacagtttagcatttttagcacttgttggggaaaataagaagtctgcattcattttcttgattagactgcaaagtagtacagagaagctcataaaaaattcttcataatgaaatagtgttcctactgatagattaacctatcatagcttccaaaattcacaggactggttatccttgtatgatcaaagatattattcagcaacattctggagatcatgaattcctagatacagaagtataaacaataaaaatactaccatgttgcatgcatgtattaccttcatctttttttttttttttttttttgagatggagtcttgctttgttgcccaggctggagtacagtggcacggtctcggctcgttgtaacctccgcctcccaggttcaagcgattctcctgcttcagcctcccaagcagctgagactacaggcacacaccaccatgcccggctaattttttgtatttttagtagagatggggtttcaccatgttggccaggatggtctcgatctcttgaccttgtgatccacctgcctcagcctctcaaagtcctgggattacaggcgtgggccaccgcacctggcagtattacccttatatttttaaatgctttcacatttactttatggtattcttatcatagtaacttaagtgagttagactttttaccacctgctctatcagtaagaaaactgtagcacaatccagtggaggtatttgctaaaatcacacaggttgtcagaaataccagtattggaaccccagggtcttggtttcaagtctaatatattttctgggcctcagtttagccattaattttataattacagacaatgtttttgctaacatcttgaattctttctttttaaaaagatgtctattctgtattcatagaaaatattagagattcttactgatcaaatggatcacagcaattgtttaattttaattttcagtgctaggtaatggagctcagaacacactgactcaaaatttggcatttgaggaatcagcagaaggaggccgtagaaacttgaaaggaatctacttgccccttcttccctgaagcagtcatgaaagctaactgaattttcccagaaaataggtcataagactattatatcagaggcgttcttcctgtacctggaggaaaagaatgtccttatctctgaaaacatagggacactgaaaagaatctgaacaagtaggccttgccgtgttacccccagtttattaacattagattgtactcttttgtcctccaattatacttccatgcacgactgtccactctttatcaaacctaagcataaaaatacccagatttccctgtgtcttcgggccttcatttctgaaggctcctgtgtataagttttatataaataaatatatgcttctttatgaatgaatataaattttacttaatataaatttatgtaaatttaatatttttataattataaaattacaaaaatgattgtaattttaaatcatatataaatttattataaatttatatataaattttaatataaaatatacttaattttacttaatataaatttacttaatataaattattaagtaaatttgttttctcttataaatctgtctttattacaggagccttatccaggaaccttgtgatgtatgagtaatctttctcccctgtataggcaaaattgtttctaaaatccccatataatttagggcaagttctgatccttgcatagtagcatctgacactcagtagtaacttgattaaatattagttccttttttcctaattcccaccccaaatgctgtgaccctctctgcactcaaaagacaaaatctttaaaattcttagttgatctgaaatttgtgttgatggcctacattattttattgttaaaactatgattacaggtgactagtcagtaacaaaacataaaaattgtgaaagtacagccaaaccctgttttaaatgctagatggagttagtgttttgtttccatcaaagccacaatatttctacttgaaacataggccagggcagtggctcacgtctgtaatctcagcactttgggaggccgaggtgggtggatcacctgaggtcaggagtttgagaccagcctgaccaacatggagaaaccccatctctactaaaaatacaaaaaattagccaggcatgttggtgcatgcctgtaatcccagctactcaggagcctaaggcaggagaatcacttgaacctgggaggaggaggttgtggtgagccgagattgcaccattgcactccagccagggcaaaaaaagcgaaactccatctcaaaaaaataaaataaaataaaataaaataaaaaagaaacatagctttgcaactgaatggcatcccattcacttagcatcataatggaattctgttgaatagcttaaatttagggcaatcagagccaaagactcagttacggagtaactgtaggtcccgcttggcatgtgacagattagattccttggagaagttaaatccagaaatgagtcattttaataaagcaaaacacataatataaagggtatggataagaagctatgaaaatgcctaggatagacaaaaagaaagatatcctgggatagggaaagggacatttgaacatcaaattaagcaaagccatgaagtttggaatttttcttggcattttcttcccgtaccctgcaaatattaaatcaattgtcaatcaattgtcaattttacctttaaccatttctcttcttcatgtctttctccacacgatcactgatctagggtgagctcttactatctttacttataataggctagtttattcgctatttctatttccaggcatatcactctcaaaaccatcatccagattatttaaaaccttaaatctaatcacatctcccacttgcttgaaaccattcaaagtcttctagttgcctacaagataagatctaaacttatgtttctctgtggtctggcttctccttacctgtgccacctcctctcatgatgagccattctgtgatggtgcttcagcctgtaaaattgtttgtggtttcaaaaatattgcacttcatttcatgcctccataccttttcctcttcttgtaatgccttttcatattcatctccaacagggtaagttctgcacataattcagtgtcccttttccagtttgatgttgcagctcttccttcatctcaaatatccactggattaggtacatctgtgtgtacttcatcttatccatcctgttaaagaaaaaattatagaaggacaattgttaaagcatggtagggaaagttttatttaggaccatcatgataaatatatgggccactgcaatggaattgtttgcagtgtaggagagagaatgggctcaactctgtatatagcatgaacaagtgagaatttttaaccaaggaacagagtagaggtcagcagacagacaatgactaagaggtaacatcaggagtaatgggaattctggctaaactgacctaacagaattcttgctgaagacaaaccaatgtgatcaggtatcacctgggagttggtggagaatgaagaacttaatcaggtatcaagagtaatcagatatctaaagtggggcagttcttactaaactgacttagcacacttcttgctaaaaccagattttacaaggaagtgcacagatgagcctaggagaaggtagaggggtctgactaaagttttgatcaagtaaaaaagtctttatcaatcttggtatttcccgttaagcacaatgcttggaacataatagttgctcaacaaatgttggctgatctgattataagaataacatggatagatcatcctttgtaatctataagttttttaaaagtttatttttaattattatgaatacattccagttgtacatatttatggggtatatgtgatattttgatacaaacctgccatgtgtaatgatcaaatcagggtaattggggtatccatcacctcaagcatttatcattttttttgtgttaggaacattatacttctgctcttttagttattttgaaatatacaaataaattattgttaactgttattaccctgtaggtgttactgaacgctagatcttattccttctatctaactgtgttttcgtgccttttaacaatccccctttttatgttcccctcccccactacccatcccagtctctggtagccatcattctactctccatctccatgagttcaatattatttttagctcccacatattattgagagtatgcaatatttgtatttctgtgcctggcttacttcttaacataatgtgcttcattccattatttcttaacataatatgctttaattccatctacgttgttccaaatgacaggatttcagtttcttagtagctgaataatatttcattttgtatatgtactttattttctttatccattcatctactgatggattcttgggttgatttcatatcttgtctattgtaaatagtgctgtaataaacatgggagtgcagatatctctttgatatactgatttcctttcttttggatatatacccagaagtggcattactagatcatatggtagttctatttttagttttctgaggaatactccgtgctgttctctatagtggctgtactaatttattcccaccagcacactagagttcctctttttccgtatcctcatcagcattcattattgcctgtcttttggataaaagccattttaactggggtgagatgacgtcttatcgtagttttgatttgcatttctctgatgacaatctacaagttaatatgtctgaaaatctctcagtcatcctatcatgtttctactcttcaatgggaaaaattaatttatcaagccagattgtcatcttttcttaaaaaattacatgatatgaaattcacagctttcctattcaagtgagtttttcttatgtccagctagaatcccctttgggttaatataagtctttagtgtacgaatttgaatctttgcctgaggtgctacactgttggttctcttaaaaatttgtggcattatttaattcagtaaaatttgtgtggattgatttgtatcctttgaatagttagtattatataaatatctcagtctataagactcatccaaaactttggaattggaagtccaatctcctctccattagaagtcttgtcttggacatccagtctctatttaatccaatgatatgctccctgatttatctactcagactttttattgttagttaggtttattctttattttaaactgagatccgtcatcacaaaagccattcccatttacctgttgtcctttggctgtattgccctggttatatattactgggttttgctaaatgtttcctatcttttctttcaagttaaatctttatgtctctgttagattatcacatataaatgtgtaaaaacatagatattcctgcaaagcttacaaggaaacaataaaacagaaaagacttgatctaactcctccccacctcaatccagagctattactttcactcttttagttgtttcttctgattttacttccatatttccaaacaatgtggttatggtgctatttttattttgatgtctttacattcaatacatcaatgttgattttaggttttattttataaatatcctcaattttatcttccaattcttttgttgaataaatctttgctaataaatatgtatatacatatatttattatatatgtatatatatttacatataaataaatatatatacatattttaatatatatattttattttctaagggctttatgttgtattatttcttattttgatagcattcagattgcagtttttaaaagatacaaatcatttcttttatcatattaatgatgaggcttttaaaatcagttttctattctctgcattgtatctcttttttattccattttctttctttcttttctcctatgtaccttagtctcttgtttcatatttctattagagcctatcctacattgtctagttaatcttggctgtttgttgtcacttaataataaaactctaacaaaccattagaaactgtataattatagcaattttcaaaattattattagtgggtgaaattcactaaatctaaataggtggggatctacccattttattaagagaccaccctccaaaatgtcagatcttttctctcaagtcatttttttttagtaattcagtttctgaagtcttagttttctctctgtgcgttttctgcatttaggtggatagcatcttcataacagaggagaaaagggagtctgttaggcagattggtctcaggggtcagtatataaatttacacataatcctactatttttcttataacttcgcactgctgtcacagcctgagcctcttcaagtcagattccaatgctcttcttaaacagattctctgagtgtgtttgctgatttttgctgcagtggagagggtatttctcagttgatgtgatccttatataggcttttagtcactccatctgttttcagccccactgctggctctgccttcagaaatatgtgatgcctccaagttctctaactttatagggttctacagcaaaatatccttgtttactactggcttctttctctgtaaaaacttagctttccacttttttctgtcctactgtcaattaccacacatctatacacttttcatcttccaaatcttgttgacatttctcctctgctattgtcttttcatccagtctcttttgctactgcgaactatacagcctttatttttttcacaaccattttagtaggattttgaaagaaaatacagatagaaagcttgtgtttagtccaccatacttagtgagaagttgccataacatttttgaagattgaatgtacagtatggaatatgttcattatctcagtaccatgtttgggctcataaaaataaaaatagcagacatgagtgtggcctttattcatttgttcaacaggcttttactgcttgcctatcatgggaatggcaagaaacatcatttcagttaactgaaaggacaaatacaatattcttagtgatctccttccttcagttccccacaggaaatttgaggttgataaaacagcagcaaaagcatatttttagaagataaagagatggttcgtatgatgtacagaagtctacttgctactcaaagtgtgatcagtggtctagcagcatgcatccctgggagcttattggaagtacagattcttagtctcctctctgacctactggaacacaatctacgttttaatgaggtccccagggtagtcttaaaattggtccaagggaaaggattttattagaaaaaaagtgaaccttcttttatcccacctagggttaatgcataggaattttatctgtagtcaagatcataggcaccatgtgaagtgattttcttttctttctttttttttttttttgagacaatgtctcactgtgacccaggctgaagtgcagtggcacgatctcagctcactgcaacctctgcctcccaggttcaagtggttctcctgcctcagcctcgtgagtagctgggattacaggaatgcaccaccatgtccggctaatttttgtatttttagtagagataggatatcaccatgttggccaggctggtcttgaactcttgacctcaagtgatccacttgccttggactcccgaagttctgggattacaggcgtgagccactgtgcctggcatgaagtgattttcaaacatagttgatcataagaaccttgaaggggattatttgtttaaatgtagattcttctttcttttacattgtcgtaagtaatgtaatcaatgtggaatagggctgtaaacctattttaagggcttctgagatgctaatcagtcagatttgggaactatcagggaaaattttcaacccttttcatcatgatgtctcagggaccaaatatcttccatttgctacccaccacttcctgcaactcctaccagccatcactacagatgtatcatatcagatcctattttcttcatctttgccttctcctcaaatcatgtatagtcttgagactcatctgttcagttggcagagtgtcttccttctcccaagacaacatcctcgttttcatttttcccattcactctgtgccactgcttacctccatgcccaaatctccagctctctctttgctggcaggtgtcatgttctgacactgatttggggtcaagtctggggttctgaatcaggagcctgtgtttgatggggagtagatgccagaaggcattgacaagtggcaccatgcaggcgaataatgcaagaagagtcaccttgtgggaaaattgatgcctgataatctgtcccaccagggtgtcaagtccgagagtgagaatccatcaattaaactgtgggacggactttagagaggacagacttgagcacaggggtgtggagaattggttatggaagaaattcccaagcgaaatgaatatagttggaggaaatgtgaagagggtggggagtttcctgggcctctgctggaagagcagaatgtaagagttgagaatgttaaaccagcttgcataacgttttgctgaacagtttaattcagaagccaattgagatatctgttattcctgacaaactttaaaaggttctagaactggcaaaacaactaggtctgagcaaagtgaaaagacatagtgtgaccagctgggacaggaacgctgcaaacttgctaattagtctggaggaagccaattgcccacatttttatgtactgctaattactaaagtagcagcttgctataaagacaaaaataacagcatgatagtttcttgaatataggataaagtggcctttgggatgtaggctccatcaactttaaaaatattctgtagtttttaaacttaaagcatacagtgccgtaataaaaatacactttggaagtcagttattcacttttttccataggctgttagatgagaaattatagaatatatggtaccctgttgggaatttatactaaaggattttgttttaaagataccaactctccatttgaataccatttctcagctcattttaaacatttacccaattaaaaaagctaaataagtgattttaaaatgtgttttattttaaatacacagtgtttttttctgaaaatgctttctcaacccagttatatctgtgaaaagagaatgtcctttaggaatttaccaacttttcacgcagttgtagcattcattgtgggtgttcagtaaatatttgcagaaagaatgagtgaatgagcaaaggaataaatacacaaaaccttgtgtgcatgagaacgataggatttcacacttctaaggaacaactgagaacaactactccccttgtattcttttgaggatgaggaaatttaggcagaggacaagtaactcctctggggcctcacagctggttaggggcaaaactgggtctgggccccatttcttatgtctatcagcccagcagtcttttcattttaagcttatttgtattccctttaagagaataatgagttatttctgcagggctaattctgacctgaatcatattaaatcagcaaagcctggttttcttacactttcaaatgcagaatgacaaaagtaaagcatcttttaaaacaaaacaaagccaaagcaattggagtatttggttttattgaggagtgatgttttcaaaggcagagaagggagaaaaatggaaactctgtgccatggacttaacttgaaagctaaatgtcagacttgatgtaaaggaggaaaaccagccctgaggacctataactgcataaaagaaaaaaagcagatttctattgattgcagcaaatcaatagaagttcatgtatttgcggatttatttattgcttgcattggtcactgaaacctctaattagattcatagtgtacttagtgtattgtaattatatgtggcagagcacgtttgatgaaggtggatataagtagatgaatatttagacccagcaataccactaatgactcacatgccaggtaacatttctttacttgtaggacttattaagaagtggctgtgaattgtcttcttaattaaaggtttggttacatgaccaaagagttgttaataatggtgcagtcacttatcaaatgtgtgatcccacctaacttatttataattctgaacctagtgtttctcatatgtacagataggttcctaatgacacttaccacatggggttgttgtgaggattaaataagagcatgcaagtaaggttttacatagtgcattccacataaaaagcactcaataaatgttagctattattactgttttcagtcactccaggcgagctatattgtaaaaaaccatacttccattgcttcttcactagagcctagcaaatcattgttttctactggtctactatttgtggatatttctaccccaagatcctttcccaagaggacaatgcaatatagttgaaagattcttcttcacttggtgttcagaatatttcattcaaattcaacattcacaagtgcaatttgtactcgatattgtagactttccagaaaggtgaggttcattcattcaattgcttcttggctgagcaaatttatattctcttaaatcttgataagtcagttaatcttctctaaaattgaggaagttatactcattccactggggtgctatgaggatcggatgaaggtatatagcaaaagtgcttatttgtaaacatcatgttgttgaatgaatattggttattgatattttctgaaggtccccattccatgcctttttcagggccccgtgtaaagccatcccttctctgaagctttccctgacttctctaccttccatctagatgtcaactctcctccttttcactctcactccatttcagttgatcttccttggaattcaaaatacatactgccttgtagagcagtgatttgtatttatttcattccttcttctacactttcagaaggaagtgtctacatctcattgacctcattgtcccacacagtgcataacacagtatcttgcctgtaataatgctcaacaaatatttgattaatgaatagacaggcttttatgaatccatgtgtaatgttaagttctatgaattatgtagaaatagtaaaagcaaataaagactcaattacaattttaactcttcaacaagatgatcaaatccttgaggattagaaattaattaaaaatgaactcatcctttattcattcatcccattatttaataaataaacataaatcgagcaccttccaggtgccagatactatgttggattcgaggaatttaatgcaattaaaataaatagtttcatcccatagaggttgcagtttgtaagtaataagaaataaggaaataattccaaacttgcttttgcaggatgaatatttagaactttctttattaaaagaggtcagtaaaacattcttaactgctttttctatccattattaattccaataatttggtcactgttcattagtgagattaaatttggctactgagagtaggtcatgcaaatcatctttctggttaaaaaaaggcctgtagctactgggtgaaatttgctttgaattatttttcataatcacaagtaattgggcatgtcgtactcagttataaataaatatacaaaagtacactgatctactttccttaataatgagtttgaaaaccatcgctatgttacttaaacttacttttcttcactatttaaaaagtccagagggcacaagtaaccttcagagaatctttccacattacaaggcaaaattatttaataaaatttctgaacatacattttaattgaaaagtcataagcaattctacactgatggggaaccagccaatgtgatgcaaaatgaatttctcagtaactgttttgtgtgtaggtaattttaagtgaaagaaattttttttctattgtacaaaccaagactaatttattcattgttgttccaaagcagcagaagccaccagaatgtcacattttatttttaattcacaaaattaaatatacttatggtgtacaatattgagttttgaaatatgtatacactagaatagtggactcaagctaacatatgtattacctcaaatactgatttttttgttgtgagaacaattaaactctctctttgcaattttcaagtataaaatacattgttattaactgtagtcattatattgtacaatggatttcttgaacttattgttccatctaactggaattttgtaccctttggtcaaacatctctctaatcccacccgcctacaccacctcagcacctggtaaccaccattctactctctcctgctatgagtttgttttttttttagatttcatatataagcgaggtcgtgcagtatttgtcttcctgagcatggcttattttacttaacataatatcctcaagatttgtccatgttgttacaaattaggagatttttatctttttaaaggctcaataatattggttgtgtacatataccatgttttctttttccatttccatttatgtgtcgatgaacacttaggttgattccgtatgtttagccaaggtgaataatgctgcagtgaatgttggactgcagatatctctttgtcattctgaattcttttcctttggatatataccctgtatcaggatcactggatcgtatggtaattctattttaattttttgaggaacttccatactatttttcataatggctacatgatatatccccaacagcagtataccagggttcccttttctctacatccttgctaatacttatcttttatctttatgataacaactaatctatagtaatagctaatctatagctaggtataaggtgatatttcgttgtggttttaatttgcatttccctgataattagtgatgttgaacattttttaatgtacttgttagccgtctgtatgtctccctgtaggaaatgtctatttagatcctttgcttattttttaattgggttatttgtttacttgctatgaagttgtttgaattctttatatattttagatattaaccccttatcatagaatgacgcattttaagacaaggaatgaatcttgtgaaagcttaattccctgtcctaattcctcaccctttacacctccttgcactagacacactcatttacaaactctatacttctactgtattcctatgactggagggtgtttatgagaaaagcaggtgagccttagagtaccagtatatcaatttttttccacagtaggttaagggattcatggagggaccccccctgccccccaaattgatttgccttttgcattagtcaaggttctggcaggaaaactggtgacactctcaaatgggggtaataatataagaattgggccgggcgcggtggctcacgcctgtaatcccagcactttgggaggccgaggcgggcggatcacgaggtcaggagatcgagaccatcccggctaaaacggtgaaaccccgtctctactaaaaatacaaaaaaattagccgggcgtagtggcgggcgcctgtagtcccagctacttgggaggctgaggcaggagaatggcatgaacccgggaggcggagcttgcagtgagccgagatcccgccactgcactccagcctgggcgacagagcgagactccgtctcaaaaaaaaaaaaaaaaaaaaaaaagaattgacccatttacaatagtataggcagggtaagtctgttgtcagggaagccaataaaggatggagaagcacctttttacccattacctctcttaggcttgaagggggaaagggagtgaatatttattggaacaaagagccagagatgtggctgtaactgggagagggcctcccaataggatctgaaaagttcagtagtgaaatgcaagcactgcaacccgaggcctggcagggaggagaccaaagaaactgatatcccaatctcacttttcccactccctggctttctgccaatgactcccatttgatgcagtccagaaagatgggcttcctagagagcagagtagggtggaaaatggattcagagggccatgaagagtatcagagtatcaagaatacctgttacattataaggaatatatatgtatatatgtatttattcatatggtacatgtgcttacaagcaggaagctattgtgtatatataagtgttatgtatttacgcatatggtacatgtgcctacaagcagaaagctattaatcctttcaagaacctttacaggcattattcatttaatattgataaaaccatttcaaatgagctgataatggtttggctgtgtccccacccaaatcacatcttgaattatagttcccataatccccatgtatcatgggagggacccagtgagaagtaattaaatcacgggggcaattacccttatgctgttctcatgatagtgagtgagttctcacaagatttgatggtttcataaggggattttcccccttttgcttggcatttctccttcctgctgtcatgtgaagaaggatgtgtttgcttccccttccaccatgattgtaagtttcctgaggcctccccagtcatgtgaaactgtaagtcagttaaacctcttgctttataaattacccagtcctgggtatttcttcatgtcaggctgagaatggactaatacagtaaattggcaccaggtagtgggatactgctgtaaagatgcctgaaaatgtagaagcacctttggaactgggtaacatacagaggatggaacagtttggagggctcagaagaagagaggaagatggggaaagtttggaacttcctggatacttgttgaatggctttgaccaaaatgctgatactgacatggacaatgaagtccaaactgaggtggtctcagatggagatgaggaacttgttgggaactggagtaaaggtgactcttgctatgctctaaaaaagagactggtggcattttgcccctgctctagagatctgtggaactttgaacttgagagagatgatttagggtatctagtagaagaaatttctaagcagcaaagtgttcaagacgtgacttgggtgctgtaaaaagcattcaattttatatattcacaaagatagaatttggaattggaaattgtttaaatgagaagcagagcataaaagtttggaaaatttgtagcttgctgatgtgccagaaaagaaaaacccattttctgaagagaaattcaagccagctgcagaaatttgcataagtaatgaaccaaatgttaatcaccatgataatggggaaaatgtctccagggcatgtcagagaccacaacagtccctcccatcacaaacctggaggcctaggagggaaaaatggtttcctgggccaggtccagggctcccctgctgtgtgcaacttgagtcccagctgctccagccatggctaaaatgtgccaaggtacagctcaggatattgtttcaaaaggtgtaagcccccattcttggcagcttccacatagtgttgggcctgtgattgtatagaagacaagaattgagtttggtgaacttctgcctagatttcagaggatgtatggaaacacctggatgtccaggcagaagtctgctgcaggggcagagccctcatggagaagctctactagggcagtgcagaagggaaatgtggggttggagcccccacacggagtccctactggggtactgactagtagaactgtgagaagagggccactgtcctccagaacccagaatggtagatccactgacagcttgcattatgtggctggaaaagctgcagacactcaacagcagccatgaaagcagccaggaggggcactgtaccctacaaagccacaggggcagtgctgtccaagccatgggagcccacctcttgcatcagcatgccctggatgtgagacatgtagtctaaggagatagttttggaactttaaggtttaatgactgccctattggattacttgcatgaggcctgtagcctctttgttttggccaatttctcccatttggaatgggtatatttacccaatgcctatacccccattttatctaggaagtaactaacttcttttattttacagtctcataggtggaaaggacttgccttgtctcggatgagactttggacttggacttttgagttaatgctggaataagttaagaatttgggggactgttgaaagggcgtgatcatgttttgaattgtgagggcatgagatttgtgaggggccaggggcagaataatatggtttggctatgtttgcacctaaatctcatcttgaattttagttcccataatccccatgtgttatgggagggacccagtgggaggtacttgaatcatgggagtggttaccctcatgctgttctcatgatagtgagtgagttctcacaagagctgatgattttataaggaggttttcccccttttgctcagcacttctccctggtgccaccatgtgaagaaggacatgtttgcttccccttctgccatgattgtaagtttcctgaggcctttccagccctggtgaactggagtccatgaaagatctttcctttataaattacccagtctcaggtatttcttcatagcagtgtgagaataaactaatatataagccttattattctcatgtgatataacaaaatatattaatgtagatgtgtttacagacatcttctttattccagctcaacagcccaaattcttttcaccttctgtaaagaagagtgactggaagagagactaagttaattgagataattaataagtgagtgagagaataaatgaattatagaggaggaaccaaaagcacagagctggaagtggaacaggaggttctcagcaattttaaaagtgaaggcaccgtagcagtggaagtatataaagggagtaaagtcaggctgggaaaacagaaggcaaaaatagtgttcatctagactgtgtgtcagattacttctaatatccttcaaggtacttgagtgaggaataatttcctcttatgtttctattggtattgggttgtccttttggatgaggctcagctcagagactgaaccatgtgatgtctgtgtattttagggttgcactcactttgcattaattttaactgagagttaaaggggttaagtgccttgcctaagatcacatactcagaaaatgcagagagcttactccagcccaggtttgttcatttcagatacattagtctcaattcagctttggttgaagtcacctgtgatgaatttgttgcatgatatagttttctgggggaaagatttcttttaatacatggtaagtatatagtaccccttttatagttggatagattagttctttaaatttcttttgtaaagaggatagattagtaatggtcaagtgtcattgagtgattcagacgaatagttccatgattaaatcttgtttcctttactttttgtataatgctaatgtatcccttaaaataaaaactccatttagttttcttcagttcatttaatcatggcattgttactgtaagaaagttcttctcctaatggtttctaattgctcttaaaatcttgtttgaatcccagaacaaatctctgtgttatatgtcaccagtgacccacccttactttctctcatttactgcctttcataagcagaaagcatttattttttgggtatttttgcttattttttaaaaataaataacattgatttttaatcctgggatatggaagatagtttaaagaaaacagcagtgtcggtggatagcaattaccaccaacaaaatatcttctgggtatttgatctatgaactttgtttgcactcctgcccacatcagtttttgtaacccttccaacttcctcctaagggcaaactcactgacatttccacaactgttcacctttctgatcctgataggattactatatattttgtttaggtttctagatatgataagactatctacctatccaacttggatctgtggcactttattttcctattaattttaaattcaggatttaaaaaagatacttacatagtgataaaatgagttgactcacaccctgcattattctaaaccaaaattaagttatattaatacattctctttaatcaagggtaaattcacatgccccattgtggttagtgaagtggtgaagggaaagttgaagccaaacagcctatgtcttaattctaactcagccactaactagctgtgcaatcttggacaaggccctgaaactctctgggtctcagttttctcatttctactaaaaggacaataatagtacctattacctagagttaggaagatgaagttaacaaagtgatagtgtattaaagcgtacctgacacataggaaacattcagtatatattgtctgctattattaaagctcctacacttattaggtaggtgaacttaatcagattatttgactttaataaacagcaatgatcatatttataaagtagggattgtaaaatataatgcagtgagtttacaagtgtcataatgtgaaatatataaatataaattacatatataaaatatataaatataaattacatatgtaaaatatataaatatacattatataaattatgtatgtaaaatatataaatataaattacatatgtaaaaagtacatagccatgttttgactcataaagagcattcattaaatgtggttacaatttttagaagacattatcagtaatattatcagtaatagaataagacctacaaaaaagggtaggggagagagtttcatgttgtataaggggagtgttgatttaaaagccttagattaaaatctgcaaatgaaactaaattaaaggtgttttgaagtgattttaaccgccaaacaaattgcatttaatacataataattactttattctcccattaaaataattatttttaagtgaataacagcttctttgaccaccctacctgtagttgcagtaacagtctaccagttgtctttccaaatttgtatgatgtcatcagcagcttaatagagcattagatgagaatgtctgagcattactatgctgactttgtaaaattgtaatccaaaagcaaagaatcttgacagcttagacagttggtttgatcttattattaatgaacagaagatatatcttaggctattttaaaagtgaatttataataagatttctacttcctatgttagctagagtaaacactagctaataaaccaccctcctaaacctcagcaaactagcccaagaaaagagtttaattttggtattagtattgctcactcacataaagcccaagcaattaggagcagaggaagggatgtgagggtttgctctatagagtcatagaggatccaaggtgacagagcctctgtcatcttccacacaggccttccaagatggttctagccaaatccagctagccaacatctctggaaatgacaagcatcacttttggtcatatttcattggtcagaagttagtcagagggtacctagttgcaagggaagctgggaaatgtagtctggctggcattgctttgttgcactaactcagtcctgtggaaaaggagcacaaatatttggtggacagtaaatgatctgtgtcatatccttattactcagatccatagtaataatgtctgtttttatctccttttctaattcctagtaaagaagcaatcaaataaaaagaaataaaaacactgaacagtatgtgttcatttgtctcatccattattgtatatagtgcctgatacagagttcagtatatattcagtatatatagtacctgatacagagttcatgatattcaataaatatcatgagtgatcaaacacatattctctgccttcttctcttcctcccttccttttttctctttttcttgcttcttttatatctctttctttttttctgatcccaaacactttagagtctttaatttgagctagattctatgataagtgattgaagaatcaaagacatatttaaccttggggaaagtcataatgggaataaaggaaaaaacattaatataaagtattagtaaacatttctaaattactgatttcattaaaatatttaacagtcttatgaaagactaaagaatcattttgagttcatctactaggcatggacaagccacttcaggaagtttaatatccttctttgtgcctttgggtttaatctgtgctagtgataccccagccttgacagaattgctgccccaatggcccaggctgtgggattctgcacaggaaagaccacttcatggtgaaaattctctaaagttttgctgtgaatcataccataacctaagatctgtgttatggtaaactggatactgtagtggtggaggatgtctaacttcgttttgtgtttcacagagtttcaagagttttcctgtaagcctctttagtctttgtatatttaatgtgctccaatcctacttacatctcaactgtgttctttctgatggcgatggtgatgatagtgccaatcatttatttagcactaacaactgtgtgctcgacactgtaccaatattattagaactattatttcttttactcatcacatcagccctattagatatttagagatttggaaaattatgttcagatagatttggtaacttgtctaaggtcagacatgttaggaaaaggcagagctagaattcaaatacagttttgactgagctcaaagcttgtgtaatcaccacttaggctgatgatttgtttaggctattgagagagaaagattattttatctttctttttttttctggaaagagggatgtatacagatcttttagtagtaaaattttgccactacattcagtgacaaaaacaggagttacttttgcaccaacctgataactcttcaaaatgtttggtgaggctggactcaaacataagtgcatggatgcctgatttttttcccccagtattcaagaacctcagggttttcctgaatgtgctatagacattccagggacctcctaagttttgaacattgcattattatgaagattaggtccataagttttatcagattttctaaaatacgagtaaacattttttaaacccaaggtttgctgccaacttctctcctctacagatcctggaaagaagaaagaaatggcttctaacaaaaagaaggggaggatttccagctcatttctaattcaggctcattggagaaggaagtggcatgggtgacgataagcagcagtttttatgtctgaaggaaactgaaaacagcatctcactggggtggccaggagctcttctgctgaagtctctgtgtatccagaatgcctgggattggattcttgtcctgttgcctctgacttcctagaagtggcctctgggccgtctttatttattaaatcatctgggtatgatctggctctgatattttggcattcgggagtggcagaccaagctcaaattgcaatagtcctttaaaaagatgtttctaaaagccagatatgcactgacatttcagaaagaacatttgtgcctaatttccagctgccaagttatagttcatcattcagcttcatattggaggccttcaggctttgatttatttaggaaacattggtgaacaatgggatcatgatctgcaacatgacagatgtaggaagtccatgtcccctaaaggaggttttctggagactcctaacaattaagagaatctgttctgtttctaagttgacagcaaattattgaattctgagtatccagaatgagtttggggagtaagagttgtgaagggcagacattaactgcttatttaagacataatacctgtcctttggaaacttatggtttgttagggggtagtgtcctagaaacaatgtaagacaatttgttaccaaatgataaatagaactttaaaacaaaaattttcctactgtcagggaaactaagttttccttttctttgaaggcatggagaagtgccgagcagtgtgttacttttcctctattccctggttcgttcctcacccacgtcagtttttcttcatatttgtctttattggaacccacaaagtttattcaaagttattatcagtttcttcccttttgtgaagaaaattcaatttttatgaattagatttttaagatggcttgtaatgtacccatacagccaggtataagaaattacctggtagcttcactgatgcagatgacagatacctgtggggacttacagtctagttgggagagtaatcacacacatacacacacacacacacacacacaccccagatttggcatgagaagaacaacgctgaagtcgatatctgcctattttgtttataatggtgtgaccttgggcaagtcacttaatttttcaatgtattttctcatctataagatgggagatatcttatatcctaaggctattgattatgtcagatggaatctcatctgagaaaataccttagaaattgtacagtatgataaaaatattgacttttattttctaaatcatacatagcaagatgcaggactagtttaattgttgtcacttttagaatccgattttcacatcatcattccatttcttatgatatttaacatgacaagcaaaagaccttgttcaaaggggaagaacaaataagattaattctctgtaaatcctttaaaattttattatccatctcttcactggggaaatgtctagatacattttcctaagtggttccatctttctgtaaatggctattgacctgctgagtgcagttttgctttcagagaagcattgcacttggtgtgtgatttgagtttgggatcatgaccttatttcctttgcacttgattgctttacttcaccaactgcatccctgattttgatattatctgtggctagctcctttcatgattttgggaatggctacctctcagttttctgaatattttttagtacttgctgttacaatgtagacattgcaataatgttctaaaattatatgtacatttacttactcaacacaaatttaaagagtacctgataagagctggtactctgagtactgagcactgagtacctggtagaatcattaatacagaagacaaagctctggcctcaaggattctgcagtacagcagcagggaggtaaaacacacataccacatttgtttactgcaagtgtgggaggtagataggtgtcccctaaaaacatgtgttcccagaacctgtgacgtgaccttacttggaaaaagggtctttgcagatgtttaagttaataatcttgtgatgagatcatcctggattgtacaggtgggccctaaatccagtgaaaactatctttgtaagagacagatgaggagaagacgtagagacttgtgaaacagaaggccatgtgaagacagaggcagagattggagggatataaccagaaagaatgcccataggcagcagaaattggaagaggtaagaattggattgttgcctaaagccttcagaaggagtgtgaccctgtcagcatttggatctccgactctggcctttaaaactgagagagaaaaaaatttctgttgttttaagccagtgagtttgtggtaattttttaatggcagccatgagaaacgaatacaacaaggaacaggataatctacaaaatacatgaattatacaagagcatcagaagtttgtggaaatttagtataaaaaacacctcttattgaaagtgtgattgttactatacagtcagtccagaagcactgaattatgaaaatatcattgcctggtatgtgtcagttatgtttataataatataaataatctaagcacacattgtgtcctgtaattttaattttactctaacatcccatgcaaaggtttaactgtaggtggccatttcatgaaacaaatgccaatttctcatggaccaatgttctcccagcagaggaaatatatcttcctgcccacactgggctacaacatcactaaaattacaagcagaaaggaggtctgcatttctatagcctcttcttttcttatctagtagtaaatggttataaacttgacattttccagttacaaacataagtaataatattgtaataacaaaagggaaggtccaatcctatagatcccactgatggtgatagagtaaatcaaggaatttggaagaagtggtatctagtttcacaagttgaaaaaccagaattatcttcaggcattcataatttcagtgtcatgggttaaggtgtttgggggcaaaatgagtttctggctgtgggatggatttgagtggtgttagcaatcattcaataacagaagccactgaagcagccttcgtctccctaatcaaaatgctgccatcataccattttgctcccaaaatatgctaaaagtaaggcaccaacggtaataagtagtataggtaatttttaagtaccataaaagtttacaatattaacagttacatttgttaattttgtctggcttagttggtggtgacttcagatggtaactgggtggaataagacttctaagcccacataagacaggatggtgtgatctttctgggagggtgccacgtctgtccaatattgatacaatagtgcaccagtggcagcttcttggttgggccaagtaagccttctcaatgtatttactccttcagtatttataacaatcaggaagctgtaattattgtccatattttactaatgaagtaactaaaacttagagaagataagcaatttgtctgaggtcatgctctagtagtgagcagagccagaatctgaactctggcatgatgactatagcgtctgtgtttttatgcattactgataggtatgggtggtatactggagacttagtgagtatttaggtgtgagtaacgtctacagtgacgtcagggagctcactgtacatccatgacatgagaaataaaattcccacgcttccctgtcttgaagctgaggcaatatattacatgggttaactgacaattcagacagagtgagagattcattatattcaccacaaatgaacacagatggacactcttcaaataaagcttcctattgaattttaatagtgctcttctgcagaacacatttgaaaaatggatcatagcatattcatattttcctttagcttgccaaatgtgagatgattaagaaacctgcttaaactttaaatattcttaccatacacatgcatttttcaaatgtatgcgtctgcaataaatatttgttaaatgaatatgaatgtatatacacaaacatacatgaagcaataggcgcacacacatttaatttgataaatatttgttgagtatctactgaatataaacttgggctgaagagttatggaaatacaaagacagaattcttttctgttcccaagaagctttataaggggaagtgagacatgctcagtcttgttctggtggcagctctcaaagtgtggtctctggctcggcagtgttggcatcacttggggacttgttagaaatggaaatgcttgtgccccaccatacacctgctaaatgagaaactgtggctgggggtctagcaatttatggttgtaaaagtcctccagggaactctgatgcacgttaaaatttcagaaccactgggcacaggaacgctttaatgtgctaaaggatgctaaatattactttcacgtggagacatctgagaaggcttgaagaaagagattgtatttgagcagagtcttggagaacaggtagattttggctgatagaaacagagaagggaaataaagtcaaagagaagagaggaagtcaacttagctcgtttgagttggcagataggctgcccatggatgaaaacccagattaaaatcaggcagtggaaatccctgagcaacacgcttgtgagtttagacattgttctgaaagacattggcagtcattgaaggtttctgagtggggaagaagtgtgatcaaaactaccttccttttttttttttcttacccagtgaatgtaattcagcacttgtactgagttcatattaacagaacttgatggttgtaaatcagtcttttcttcctcattaaaatcacttcaccattaagaattatctataggttatggctggaatcatgttatctctgctctttcttgactattctgacacagcaggcaacttaatttcaacaactcggtaatgcccccatcttctgtgtgtgtgtgtgtgtgtgtgtgtgtgtgtgtgtgtggtgtttgctaagaaggagtcacacggctgcttttgaattcagctgggctttaggaagctgcataaaaacaaagaaaaaatgttgctgcttgctagtgcattctttgttatgtagcaatcagaaggatgactgtgctctgaagtggtgcaggtggcctcttctgatactaattccagcgtctcaactagttcagcatcaaaagggagttctctggaagggaaataattctgtccctacccctgattgctcctatttgcccagcattgtgggcacctgcttggccacccaccttccttttctttgccatccacttgcgtcatctttctcttcccctgggtcagcctgtatatttcaatctatccacaccctgcgcaagctcattcattcatgggctttctctctgcaattttcattgtgcctccctttgttggcataattgattccctgctttgcaagagcaggtggatgagttggtttattcctttaaaaaattcctcctcttttctctttcattgctctgatctttagtcaatctttggttcagccagcttgttctccttctattgactaatctctctctgtatctttcataatggtggtgggagagtccatgccgaatctcctgttggttgaagaaggtgaaagtcaattggtaaagtcactgtgatttataatgttcaaactggggagggattgagtcgtgaagaccagaagtactgataatcatttagcttatttgctggaaggctccactagaccctaatgaaacaatctcatttatcttccccacatcctaatggaattgcagaattaatagtaaaaccattaagccttcttgagcatgtctcatctaacactccaggatctttgttacacatttttatttttctcaattttggattttttgagggtgcgaatttacttagctgagaaatttagaagtcctttattcagtctagtataaagtgtccagataaaaacataccttagagatattgtgggtgcagttccagaccaccacaataaagcagataccacaataaagcaagcatataaattgtttggtttcccagtgcatataaaagttatttttactctatagtctattaagtatgcaatagaatgatgtctaaaataaaatgtacataccctaattataagtattgtgttgctaaaaattgctgatgataatctgagcatacagtgggtcataatcttcttacttgtgaagggtcttgccttgatattgacggctgctcactgatcagggtagtggttgctgaaggaggttagggtggctgtagcaatttcctaaaataagacaacaatgaagtttgctttatcaattaactcttgcttttatgaaagatatctttgtagcatacgatgctgtttgatagcattttacccacagtagaacttctttcaaaattagaatgaattcactcaaaacttgcaggtgctttatcaactgaatttatggaatattctaaatcctttgtagtcatttcaacaatgttcacagcatctttaccaggagaaaattccattttaagaaactactttctttgctcatctatagaagcaactcttaaaatccattccagttttatcatgagatggcagcaattcagtcacagcttcagtttctacctctagttctagttctcttgctacttccaccacatctgcatctactttctccactgatgttttgaacccttcagccatccatgaagattggaatcttttccaaactcctgttaatgttgatatttcaaacttctcccatgaatcacgaatgttctttatggcatttacaatgttaaatcattttcaaaaaattttccatttgctttatccatatctatcagaggaatcaccatgtcagttctagccttacaaagtgtattttttaaataataagacttgaaagttgaaattattccttgattcatgggctagagaatggatgttacgttagcagacatgaaagccacattaatcttcttgtactcccatcaaagttctggagtgactaggtgcattgtcaatgaatagtaacattttgaaaaaaaaaaaaatcttttttttttccttagcagtagttctcaatagtaggcttaaagtattcagtaaaccattttgtaaatagatgtactgtcatccaggctttgttgttccatttacagagcacaggcagagtagattttgctaaattctggggccctaggattttttgaatggtatataagcattggcttcaacttaaagtcaccagctgccttagcccccaacaatatagtcagcccgccctttgaagtcaggtattgatgtctcctctgtagctataaaggtcctaggtggcatctttttcctatataaagctgtttcatctacagtaaaaatctcttgcttggtgtagtcaccttcatcaattatcttagctggatgtaacggataacttgctgcagcgtctacataagcacttgccgctttaccttgtgcttttatgttatagagatgatttctctccttaaacctcatgaaccaatatcttctagctttaaacttttttctgcatcttcctcacctctcttagccttcatagaattggaaatagtttgggccttgctctgggttaggctttggcttaagggaatgttgtggctggtttgatcttcaatccagaccactacaactttctccatataagcaataagcttgtttaactttcttatcatctgtgtgttcactggagtagcacttttaatttccttcaagaacttttcctttgcattcacaactaggttaactgtttggcacaagaagcctagatctcagcctatctcagttttcaacatgcctcactgagcttaatcatttctagcttttgatttgaagttagagatatgagactcttcctttcatttgaatacttaggcctttgtgggagtattaattggcctaatttctatattattgtgtctcagggaatagggaggcccaaggagaggaagaaaaatgtgagaatggccagtaagttgagcggtcagaagacacacaacatttattaagttggccatcttatatggacatgatttgtgttgccttcaaagaattacaataatgacatcaaagatcactcatcaaagatcaccatctcagatataataataatgaaaaagttttacgtgttgagagaattaccaaaatgtgatgtagtgacatgaatcaggcacatgcagttagaaaaatggtgtggattgacttgctcaaccaacggttgccccaaaccatcaatttgtttttaaaaatgcaattgttgtaaaatgcaaaaaagtgaagcacaaaaaaactaggtatgcttgtgataggtttctctcctattctttgaagaggcttttaaatagagttgattgcatggcattgcctagtaaaatcattttaaactaatatgaaattatataagctctgaacagggcatttgatgtccactagggaaagtaaaacatattttttatttcagcataagaagcttatctcttccatcttgtaaaataatataataataatagaattagttaaacatggtgattactattacgtattttatgattccaataattcaagcacagacactatcttgaatgcgtcctagtatattcagctccacaatgatgcctagggtttcatgttgaaggctgtgaagttaacaaaggaaaatggagatctgattactagcttccagagattggttgagaattgagggagaagagagatcaacattatatatttcacatggcagagggtaataggagcttttatagagaggcaaaatgcattggtagaaagagaagagagagcctaattccacttgctaaaaatctatggaagccacctaaaggaagaatgaaaaattgaatgtttatcaataagttggaaagaggagaggaacattatgggcagagcaaacagcatagaaatagaataatacatggagtatttgttagcattcagagggaatggagatgacgggaaatggtagaacatagttagaaaagtaaattgggcagaattggtgacaggggattcaatttggtaagcagtgggtaaccattcatggctttgagcagagtttggcaaactatgatttgtggaccaaatccatcccattgtctgatcttgtaaagaaagttttatttaaatacagtcatactcattcacttatgtattgtctgtggctgctttcatgctacaatggcagcattgaatagtggtgacagagactgcctacaagctgaaaatatttgatatatgactttttacagaaattttaccgatgtcaggattcactttaataaagtgtttcataaagtgtttgtttgtgccgtgatgggccatccaagattgtaatgggcgatcattggaaacaaagatgcttatagagcagcatcttgcatgtcacaaatatttgaatgaatgaaaaaatgcatatttctgttaagacatcacagtaacagtaggagatattgctttttttttctttctttttttttgacaagaccaatgtgaaaataatcagagagtggttctctggaccacatcctgttcttcaggggagagacattgaaaaacatcaggaaaagcttatccctagaattgattcagaggacaaagctacagttatgagaaaggccactttggagaaatgttggataagatgtccagtgaggcacagaatggggtgacactgggagtgacaggatcttgatggactctggccatggcacttctcaaacgtttttggcagtcctatttctattttcacagactcctccacctccactctgtcctggccagcacccagttctcaagcattacacatttatcccaagtaatgcgtagggagcttcctttcttgcacctataaattattcactagtttcagattggggtgaaaagaggaaaacataattaatccagaattatttcacatgtataaattccttgcttggttttgtttcatcatcagggcttccttggccttccatggatggcatataccttattaatttatgcttagcaatcttttgaaaataatttttacatgggtaactcactgaaacatcatggcatttatctcacatcatgtagttttgtcagttttgatgttagagaacgtattctgccttacttttatgtagcaatgtgaccaggaaatctcatgtaaaatctatgcctccctaatatgcaaaaatactgaaaatgagcacctcttctcccttccttcttttttaataaatctagtaataatagctggaataatcacaggatttctaaatggagtcagcatggcaaaggaaaatgttggtgatatatttattaagtccatagaagttaaacttccggagagctcccaagctaattggtaccccttgttcaggactggggactattaactgagagaattcattgggtgttttaatatctagccttttaaaatctattttaaacaaggactttgaaggatgactgaaatgtggttaaatttccacagagaacttacaactccagcaatgggaactccccaggtacagtgatgatacgaattgtgttggatttcttgaatttcatcttcaaagcacaagaatgagaaaagaaaggagacaggaaccatttacattaagcagagatgcataagtttcttaagtggtgctttccagagcacagctgggtttcgtgtgtgtgtgtgtgtgtgtgtgtgtgtgtgtgtgtgtgtgtgtgtgtctgatatatcaagctgtcggttatattccatagattcatagtattttcctcctctctatattccatctctactttttgtttataacaagttatttactttgcccatctatcttttaagcaaattatcttgattggaaataactggaatgcttgataattatataagaaacttaaatacttggcctattcatttatcctagagttttagggaacatcttggtctagcataggcattctcaaccatcatattgaaaaaaattgtggagcattatagcacaaatgattttacaaaataaaatgattgttaaaaattagaataggttcatagtagcctcacgctctgggttccatcatgcttcttgggagagagagaaagagcagactggctggtcagaaccctggctttgactgaagaacacattctgcctgtaagcataatttctcagctctgagccagagaaaagcagtgggactcttttctctaggaaatacagtctgcatagatagaatgaagcagaattggagacacataggaaaacaattatccctttgtattagtttatctaatcctctgctttgggaaaacaggaagagagaaaaagaagagggaggagagggagggagctaaaaacaaaggaaaacacttcacaagggtttgccctcccccaaaaattcaagacatgaaatagaatctatcacatatgattgggagccttgtgttctggttttctccaatcctaagcccaagaatttgttcctcctgatgctgtagatagtttcacctgagaagattttactcacctctgcgtcccattatgagatgggaaacctggcttctgccacgtgggcacagagtagatacccactagattttgttgttttgtgtgtatggttgccagggatgatcagtgccccaatattcttgccccatcaatattcttcttagtgagatttgcaaccttttaagcattgggaacttaagggttattatgaatacctgtcattttaagctaatatacattctttacagaataaatgcaaaatgttcacattcatgagaaaaaggaagaaacttttagctgacacataccattttgcatgttatataaatgtattctgctcagtacaaacatttttgtgaacttaaaaaaaatctcttaaatgtttctataaaagtactacttcttgaagtttatatttgaatgaaaatacctcaaattcttttctaccctgacttagaactatataactttaactctctttttcatttttaaagatgtgatattcctctgatgagataacgtggagctttcctctaaaattttcttgtgttcagaccttttttttctcttccttctggtcttcaaaaagctataggaatctgacctaggaacactgtttcctcaataattggcattttctattttcactttggttttccccaacttaattgatgagatatataatctttctccatccaaagaaactacaatgactgacactaacatttttgaacccatctatgcccatttccatttttagttctacaaatgttctgacaccattttttaaaaaatcacaacaccccaaacagtgggttctatttttttttctattgttatagatgagtaaactgacacctaaagagggcccttagcttgtggctggcatctcaggaccaaaatgcctgcgtttgaagcccctgggaatttggcctttggagcctttagcagcttctaagcctagtgagtttgtggcttcaggtcctgtttaggtcctgtttctcatttgtggagaggttggtcttgttttgaaggcagcaacctccttcattttttttcttttttttttttcactatctatcattactacgtttggtgccaagttggggcctcaaattttgaacttaaaacatgacatgcctggaaatccttttctctctcttcttctgaagggtgtccataaagtctgggatgcagacaaatatatgtaatgtcattaaaatttttacaaatctgtaaaaaataaaatagtattatcaatgttttcataccttacagatgcccttcactttaaataaagatttcctgagaactaaaaataaaaataccatgtcctcaagtttggattagtccagggagtagggagaagggctgagaaagagaagggtaaaattatctattcttgacatcactgtaataaattgattgaactgtactgcatattgaatgcttgctcttactagggtctcttcataaatcatctcattattcctcaaaataagtcagcctgctaggtttgatgagcccatttgacagatacacaagtccaaggacatcaaatgactcgcccaacatcactagggcatgtgggctgaatgaggatgttcagtctggtcacatcaaaagccctagctcttttccctataagctagaaataatattccatcccttttctcacctacctcccagcaaaaacaaatgacataaaaatatttttttctatctgcttctgctcatgatacctttaaaatgccttattcatcaattcattccccatctcaggctcaggtaacccttgatgggggatttgtatctaattttctctgtatttcttgaaccatttttttttccatgtgtccatctctatggatccaacctcatgatttcctggaccatttaaattgtcttttattctttcttttttctctatcacatatcttggctctaactcacctgctttccctttgtatttctcttttaatattttacatgtatgtattaccccaactagacagtgttttcaagggagaacttaggaatttttcatttctttccaccatgacatcagacatctttctgatgtcatagcttatgaaataaaagtctataagtatgtgacctgggtaaaacataatcattttgagacttaatgatatgatctctatcaaagttattgtcaactgcagttcattctgctgttatttttatatttgatgataattcagaatttcatgtccccttctataatacctcacatgccaaacaaattaattgtgttaatgacaggtaaggaagctcctggtcactttccttccttgcttcagacccagcttcaaggtgggccagatggggcacaggctgcctcctctgtctgggttcgagttacttgtaaccatgtctgactgtcctggggtgcctcttagctccagttaatttctgaatcctcagcaagttttaaaagtctgagcaagaatttcctttcttactctgttgcttcatctttttcctttcttctctcaaatattcaggatggaggagaaacggcaggctgagccagcaatccatcttacttgaaacctatttgaaggttgtcgggtatgcaagggggctggaaatagggactgagagtttgattccagcatgaaggccaggcatcagtaccgatctaccttgtagtgtggtaaatagactttggcatcagctaaattatttctgtgagactgaagtattttgatcgaaatagacaagtgagcaaagggatttgcaaaagaattctgttttctggcacaggcatctcaatgaggccttgtgcagaatctcacatccgagcgccccctgatggcaacatatagacacgcctcactttctgtggccaaattactccatgaaaggaatagtttctatatttgactttaagaccttatttctaatttatgttttaacctgggatgtgtttggtcaccacttatgtatttgtttttcatatttgtttgatttcaaattatctgtgataacagtattagattataaagtgcattttatgaagctattttaaaataaggtattttcaaatgtcatttaatgttttcttggaaagattcaaagtagtagagtgcttgaggagaaataaaagcagaggaggaataaaaggagatgaaggaggaggaaggggaggaggagaagttataaataaagattagcccctaattctaaaacattttttcttgatctaaatatatgaacaacgaagtccaaattatttaatgtttcccattgactataggatgaaatttaatactttagcctgatgtacaaggctcttaaagatctatccttgtctaactgagtccagagccaaccctacagctgcccaccttgaattttatgctctggaaatactaaatgattacaattacctaaatataacatagttatattcaggaaatacatatattaaatattatatatatatgtataatatgtaactatgttgctcatggatctgtgactgtgcacaccatagttccctctgtctggaacatatgtactgcctcttatcctcctgcaaatctcatccttttcaaggtaattctttcatttcagataaaatgttattctctctgtgaagcttggccgtgatttccctcaactcctgctctccacaagtttccactttgtactgagctcttacattgccttggtcattccctttctcttctccctacctatgttctgaggaaataaacaatgaagtttcatcttctttttttttttttttttctgagacagagtcttgatctttcacccaggttggattgcagtggtgtgattatagctcactgcagccttgatgtcctgggctcaagagatcctcccgcctcagtctcctgagtagttgggactataggctcatgccaccacagctggttattttctttgtagagatagggtttcgccacattgcccaggctggtctcaaactcttgggctcaagggatctgcctgcctcagtctcccaaagtgcttggattacaggtgtgagccactgcgtctgactgaagtttcatctttctagtccagcttagcacaatacttggtgcaggtgcgtaagacatatgtgttaaattgcatacttcccatttcctgaatggaggtgaaataaaggaaacaaaagttaaatacatttttcaggagatacagaaatttgtaactcgctgaaaaagtagctttttattaggactttgccttttaaatcattacacactttagtctttcctcttaaactaaattactatttattattgactttacagaagaagaaactcgtgtcatacttatatgactttttggaccctggtgacatgtgactaataggtaaaaagaacatacaatgctgggagcaatttgtccagtggcccaattttatatgatgcctcaaatgaagtgctgtttatgcaatgaagtgcgtttcttgctttgttagtagtcattgagcctctgcacacgtaaatgtgtagggaatgaccattgagagacaaagtgtttgtgatgttacccatttatagggtatatcaatagttcacatttacggcacactcctttgaggccaggcactttacacacactgtcacaccttatcctcaccatcacagtatgacattaggacaattatgtctatttgcagatgaaactgtgactcatagagatcaggcgatatgtcaagattattcagatagtaaaaggcaggcttgggttcaaaatcaggcagtctggtttacagagcctggccattttttagggcagttgttctcaaccaggggcaatttttcttcttgggatatttggtaatatcagaagacatcattttgattgtcacaactgggagagagggtgttgctggcatctagtggtagagtccaaggatgctgctaaatatctcagagtacacaagacagtcaccacaactgagaattgtccagcccaacatgtcaataatgccgaggttgaaaagacctgttttatgataataagccaggtagaattcatgacaattgagtttatacaccaaccagtccttagcctttgctgttttccgcctgttgcatttctttaagtgtcatttattttcatggctttgactattaactctatagagatgatttccaaaaatcaaatacagatgatttctagagagaacctcaacctctccctcgaattctagcttcttattttcaactctcaggaggccatttttatttgaatgatttgctgaccgttccagtaaattcaaagtaactgttgctcctaatttctccctctgtggctttgtcctttttatcctagatactgttattcttttcgttagccaggaatgaaactctgatttatttcctcttctcttttccatagttctcctgacttcctcgtctccaatcagttactgaatatgaatgacctttccctacacggcttttcatagtatattcctattttcccttccacaatgctgacctaggtctttttcacctaccatgtggtattactgtaatcatgttccagctaatcttctgactccattattttcctctttcaacatgatcctgcacaaccacccagttaatctcctgaactaactctttggccatgtatccttttgtagtgcctttctgccattgagttcagtgtggattgcatcttgtgtttaatattcttcaggatttggcctgcaccctgtcatcttcagttgagccaactccttgcattctctgaagtgtactgtgcctatttctgcctcctttcctttgcccagcctgtgttctacagaggatcaccctagctactccacacctacacaaaaatatcatattcttaagacctgatcttgaccatttaccttcactttagttcttcctgtttactgcgccattcaccctggtcctaagtcatatgttctttctttgtatttttatttgaatattttataggaacatactttgtcatcccaactggacagttagtttttgcaaaggataactaatacattttcattttctttctcagcacctgatatcataacttttttgaataaaagtctaactgtttgatcttggtaaatgtaatcattttgagagtttatcatgtataaaatgataaaagttgtaatgttgctgttctacaaagcctattaatattttaccaatttgcaaaggagaactaatacatttttcattttctttcccagcacctaatgtcatagcttttttgaataaaagtctaactgtttgatcttggtaaggtaaaatgtaatcattttgatggtttataatgtataaaatgataaaaaatgttatgttactcttctacaaagcatattaatattttcccaatttgaaagataatccataatctgtcgagtttctagagaatacatgaaaatactaaaactaaagtggatagagtttatgtgagtattatattcagaatcagtattaggggattaccaaaatcgttacttaaaccaagataaacaaaattaaagaacatacgatttggtggaatagaaaattgtaagtttaagggcagtggctaaaactggaataatttatgttctataaggggaatggctaaataaaattaaaaacacatttttaatgttattgatagaaaattaacccataaaaattggtgcattggtcattatttagactaatctgttaaagttgattatcgcacaatcatattttctcttagataaaagatttatgatacttagtaaaaatggagcagagatttcaccattatattatataattataatttcagtgaatcaactgcaaattcatcaaaggctatttacattctgcttcacttaaattttccagttttattttccagaatttttctttacactgtgccctgcactccaactagactgaatgaactaccactactttcttcccatgatttcccatatctacttcctctgttatttcttctacccagactgcccttcccaatagttttctctgtgtctacacaccttcctgacaccactcaaatatcatctccaccaccaacttgccttgatccctagaaataatcagacccttttctgaacacccttaaccatttattactattttgtggcacttatttcactcccacatccaatctgtgtgaatgggcatgacataacttttctaccaaacaatatttctttggggaaagaattgtctccagttatctttttttccctgatcctaggcaagcaaggccattgcaattgccgcacaaagggtggaaattgagctggtttcaaagaccagattcggaaacttgaattcattttctctgtttggtttcttctttcatacttgcttttcccacttggctggagctggggcctaggtagattcaggcttacatatagccatatgaacagaagggaaagaaaaggttttttttttctgccaaaacttttctattttagaaaaatagggaagggctttgttaactgtgacttggggcatgtgctcatttctggagcaataactgcagccaacagaatatggtaaaataattcgctcaatctgggctgagatacactccttaaagtcaaggactcctgtctgttaccgaagtagggaaaacagtgctgggcagacaaagaaactaccccataaaagtagaagatatctttcagagtctcaacacatataattattggcagtttctttaattatttttttctatttatttactattgaaattggattgcatattaaattttggatttagttttcttacttatcattatagtcagctttgttgcatggtcttatacattcttcttaacatgtgtggtgctcttcataaacatatgaggtgctttggaatagtatctcctgaacacgtcaagatatcaccaggaaacaaatttgactttaggtcacatggccacttttctgtctccatcacaccggttttctagctggtcagagtggggatagagtctaaaggggaaattaagtatcatgtgagctttgaattatgtaatgttaacaaatgtttaacattactattttctagagtggatttttgtaggaacactttccaacttgtatgcatgtttcccattccacatagagttcaaaatgtgactacttacagactgctttccagttagtatatttaagataaagaagcctacattacacaccttaagaatgtaggccatgtctacataataagaagaacatattttttaacttttaagtccaggggcataagtgtaagtttgttatgtaggtaaacttgtgtcatgggggtttgttgtaccgattattttatcacccagatattaagcctaatacccattaattattttttctgattctcttcctcctcccaccctccaccctctgaaaggacccagtgtgtgttcttcccctctatgtgtccatgcgttctcatcatttaactcccacttataagagagaacatgtggtatttggttttctgttcctgcattagtttgctaaggataatggcctccagctccacccatgtccctgcaaaagacaagatcttgttctttttttatggctgcatagtattccatggtgtatatgtaccacattttccttatccattctatcattgatggacatttaggttgattccatgtctttgttattgtgaacagtgctgcagtgaacgtaagtgtgcatctgtcttttgataagaaataacatcatacatgcaaacagctgctagcatgtctttgttaacactttttgtggcttaacatctttactaatatttatgattaaattcaatcctcttatttatttcccattatagaaacaagtagtgtagagttgtacgagactcctgaatttatttagtccaatgtttcaagcttttcagaggtttattttacaaacccatagtagtcagtcatgatactttggtttaaatacatctgatcctatcttcatcttgctatggggaactttctgtctcaccagtcagctttttccattgttaggtatttctgattgttggaacttcctcctcccaccagtctttttcagaatctactgtcaaatctgttctcatagcaattataatttttctttcagaattataattttaaaaatttgcacatttctgagaggtcttcaaaaagttcctggaaaatgtgcattatgaaaaaaactgggcatcacttaaaaaaatttcaccaagataaacttgtactaacttcttgtaacatgtctgaacaggatctagtttgagacactaagaaggataagacattggtttgaatagaggccctatcagagcaacatgaattctattaaaattgcagcaagaacaaacatcaaatttatggtgaggcttgggtagaagaatggtgagatcattgattctttatgaaaagaatggggacaatgccccaaagaaattagcagtttataagtagaaaactcattttaaggaggaacaagaagatcttaaagatgaagcctactatggcagaccatccacatccacttgtgaagaaaacattcatcttgttcatttcctaattgaaaagcctaggttattaacagcggaaacagtagctaacaccacagacatctcaactggttcagcctacacaattcttactgaaaaatttaagttgagcacactttctagttgatgggtgccaaaaccgtcgtacctagatcagctgcagacaaaagcagaactttcaatgaaaattttaaacaagcgggatcaaaatcctaaaacatttcttagaagagttgtgacaggagatgaaacatggctttaccagcatgtaccatcctgaagacaaagtacaatcaaagcaatggctaccaagagcaggaagtggtccaatcaaagcaaaagcagactggtcaagagcaaaggtcattgcaacagttttttgggctgctcaaggcattttgcttgttgactttctgaacgtccaaataagaatagcatctgctaatttagtacagtgttttgagaaagccaaatttttagcagaaaaatgcccaagaaagcttcaatagcaagatctttttcattatgacaatgttccttcttgttcttctcatcaaacaagggcaattatgtgagagttttggtggcaaattattaagcattcaccttgccatcctgatttgacttcttctgacttcttattgtttccttgtcttaaaaaaatctttaaagggaatccatttttttcaattaataatgtagaagagattacattgatatggttaaattcccaggaccctcaattctttagggatagactaaatggctggtatcatctctgacaaaagtgtcttgcacttgatggaacttatgttgagaacaaagtgtgtatttttaatttttatctacttgcccatgaagttcatggagtgcttttagatctgtctttttctctgtctgtttatctatctatttatctgtcaatctgtctacacacccatgcatctactatccacctacctaccaatcatttattcatataaatttgtttaaacacctggaaaaatgattatatctccctcttgccttctctttacgtattgctaactatactcagatatttgagtcattcttagtatgatagttttcttactgttgtccattcctgtcttattttttaatgttctggttcttttagaaatatgttatccaaagtaaacccactgttcttgctgtaggagagagttcactgggcctttccatgctgtggtgtggacttttacttccattgtagatatagcagaaagagctcagtgaccgagagcctgactgcttggatttatactctgcctccacctctcactggcaatgtagctttgggcaagtcacatatcctctgtatataatttttctcatttgtggggtgcagatataagtggtggctatcttggagggttgcaaagaagagcacttccttggccaatagtgtgccctctgtcatgaatatttccctgctatcattgtaacttaacttttgttgctattttaacaaccaaatcatgactatttgttatcacttctgggcctttaaagttgctgcttttcccacctagagcattttcccccaagatagtcacagggctggcaacctctaatcttttagcagcttgaatgtcattcctcaaaaaagcctccctgactgctggttctgcccttgccctggtcactctctagccctgggctttatttcattttctttatggatcctatcaccatctgaaattcttcactaatttgcttgattattagctttctccctctgctgaaatgtaacacatgtgagaccagagcctccttagtctcatttaccaatgttaacagcaaccagaatcgtgcctagcatatagcaagtgcaccagaaactttgttgaaaaaatgttttgggtccatgaaaacttccaaacatgtttcagatgttcagatgactttttctttttaacttgctctcctccaccccatatcaatgcaatggatatttgaaaactaaatccagaacctgaatttatcctcaataaatttgacttttcatattccattcagagttctggtattcctatattgttttcaatttaatgctagactttatattaattaagataattttatggtaacaataacattatgcatgcattgagtgtttgctacatatgaagcacttataaatttttacatataatctcatttaatttttaaaacaaccctatgaaatacataacatttttattcccatttttataaatgagaaagctgaggtacaatgagggctggtaattgggcaaagtcccacagctagtaagttatagagttgggatttgaacccaggccttcagatatcatcaactgaataattcatcagtgtcatgaggaattttctgaactttgtatgacttgaaactttgtgatgttttgtctgtatctatatacaagtcatgataagatgcctcataataataccaagcctctgtgatattccagtactttttattctggttactactgaaccaagaattattatattttagtcatattgtcaatgagttcactacccacagagctgaggacataaggctgctgtggaaaagggagtaaacacttattaaaagccaggataggcaatgtggcattcctgtaaagcactaattagtattttcagcagaaatatgttttaccaaacctattttgctgtcatttgaaagcatgttattttctgcatgttcacatttcaccttgcttcccagagtgtttacagcaacttgccacagtaacacatactaaaataatggtatgatacacaagtaagaataaaaaatgtgatctagagaaaaataagagttaaacacaagaccctagggtggaggatggtctgagagagagataaatatttaggccttaaggaaccacacacagttcccctggttgagccacaaattggtatgtttttttccttatgtacaggttttttttttattatactttaagttttagggtacatgtgcacaacgtgcaggtttgttacatatgtatacatgtgccatgttggtgtgctgcacccattaactcgtcatttagcattaggtatatctcctaatgctatccctccccctgccccccatcccacaacagtccccggtgtgtgatgttccccttcctgtgtccatgtgttctcattgttcaattcccacctatgagtgagaacatgtggtgtttggttttttgttcttgcgatagtttgctgagaatgatggtttccagcttcatccatgtccctacaaaggacatgaactcatctctattcttttattagccaccaggaagctttaaaaaaaatacccagaacaaattggtatttttttttaaagcttcctggtggctaacaaaagaatagagaagcaatcagttcttactgtcagttagaaaaagctatcccagttattcaagagaaacacagtatagcttgagactatatgtctccataggcctttttgtaagaagtattcagtgatataatttcccctatagcagacctacaatgaactgcttagtttcatgtcactgctgctcatattgtcctttgctaaaagctgagaatatgacactaaaacgagattcaaggaaagaaaatctgtaaaggatggaaaacgcagatagtatgttcaaaaggttagatagaacttggaggatcatttattcttcttacatcctccataaatacatagcttacctgggattttgaataaatgtgggcagcagaccattcaaagtaagattatctggaaagtgcttggagtttctgagtggtttgctgttggatccatttgttttagaaaatgaatgagaatacatggaggattatagccttttctggaaattaaggacctaaccaagttttttgttttttgaattaaagggccctgtccatatctatatataagtgagaaactgactttattggatgtctctagtgtttattcattccttgttccttcgtttattccttcaacaaatatttattcagcccctactatgccctagatacctaagctatagcagtgaaaaagacaggtatgatctctccttcaatagagtatacattttaagaggcaaggcaaacactaaacaagatactaattatacagttacaatcttgataagatctactaaagacaagtacaggtcggaaagtaagcacaaaaatgagaaactcaattccatttttacagcttccttacattatagatgatgttacctctaagatttttttcttttttcttttcctttcttttctttctttctttctttctttctttcttttttttttttttttttttttttgagacagagtcttgctgtgttgctaggctggagtgtagtggcgcaatctcagtccactgcaacctccacctcccgggtttaagcgattctcctgcctcagcctcctgagtagctgagactacaggtgtgcaccaccatgcccagctaatttttgtatttttagtagagatggggtttcaccacgttggccaggatggtctcgatctcttgactttgtgatctgcctgcctcggcctcccaaagtgctgggattatagatgtgagccaccgcggccggccacctctaagatattaacagccttctaatcactaaatccaatgtcctcttctaatctttagaaatgttcatattcgttggcatgggaatataaccatgaggtttaaagtttctgcttgtgcctttgtttgtagcagataaaatcttttgtttaaaagaaataaagcctacttgaagtccataaagagaaaacagatgaaatctggactgctttgtttggagatgcctcatgggaaggtgggagctctggctttccccacacttggtaatctcaggatcgtcttttcttgatccccatggtgctagtttggaagccactattctagaattctcattattatcagctatttatgtattggctccctggcagccctaaagactctgcctggactgacacatcccagtcctattcccagttctgtgccggagtctctgaacacttcttgaactgatctgagccaagaaagaaacttggacatctttggatttgtgaaatccaaactggaccctcttcatttgctgtgatttcccacccatgattacagttcacactctacttactaccaggtctccaaccaacacctcatttattagtccatctcctgtgtgtgcatggattggtgagggaaattagaaggaaaggaagatgattgcatccatcaattgaatcaatgtattctgggctccaaatatgtgctaagcattgtccaaggaagctgagggtataactatgaacaaaagaaacaaaaatacctgcactcttggaacatacattctaatggaggatatagacagtaaatacatcagaaattaaaattgtataacaggtggtgataagttcgttggggagaaaataaccaaagaaaaaggatagggtatgtcagggtgaggaggaccaaggtttactactttaacgaatgatgtaaaagattgcctgagtgagaaggtggcatttgaggaaagatgggtaggaatgagtgatacaggtgtctgcaggaaaagcattgcaaacagaggaagcagaaagtataatggagcttagttaggagcctggtatgtttgagaaacaacaaagaggtcgtgtggctaaagcaaagtaagagatgagactagaaaagtggcagaggagcagatcctgaattgtcctgtaggccattttgaggactttgggttctactctcaggaataactgggaagaagagtgacacgatctgtcttcagttttgaaaagatcaccctggctactgtgtggaaaatggaatgaagggggcaacgggaggtgcaggaacatcatttgggagtggttgacacaaaacaagcaagcaataaggggaaggaggggggataatttgttcaagtaagcctctttctctgttccatttgattggaacaaatggtacaacttagcagaatgtccagtaatagaggagaaagcaaataaaaattcaaagatattgagatagtacctgagtggtaatttaattaatggaaaaggaaatctcagaaagagatgtttttgcctaagggctagttgtgaaagatgaccctgaggctcaataaattgccttccattgtcagtggtatgtgcgtgtgtagataattaaagaggtgagaataaaaatagagggaaaagtcaaggattgagttttcaattttagagtttctatatatggagtactgtgtggtttataaaacactggtatttaatatattttattactatataaatgaatgaactacgtttcccaaacatctttctacgtgtgaagcaaaaaaaaaaaaaaaaaaaaaaaaaaaccacacagaaaaaaaacaagcaagcaaacaaaaacagagggaacaagagtttagagaagtcaaagaaatagtattcaattttctgtttagtaccatttattcagtgttcagtgtcaatgaggttatgagaaatattctagatactggagatacaaatataaatgaaacacagttcttgcccttaagaagcccacagtcaaatggaaaatatatagaaataaatagcactgtaatgtgataggcagacaggattgcttaattctcactgaaagattcagatcagagttaccctctgtgcagcttcttgatggatgatggggagggccagcatctggggttggagaaaagaaaggtgggtctcagggaagaaattccatgtgccaagatacagaggggtaaaattatgtggccttttcagtatatgaaagcagtgattcacagaacttagatgatacaccttgacaagatactcaagactcccaagacaagacactcaagagagtgtcttgaaaatagagtctttaaggagtaattcaattaaaattatggcattagtgcagactgtaattcaatacgactggtgtctttgtaagaagagaatgtccctataagaagatactcaagaattccaagataagacactcttgtgtcttgggagaaattctcatcttgggagtcttgagtgtcttgtccaggtgtatcatctagtacagaaaatagctcaaaaattgtgatagccttgagaatatattttacattacttactgtcgaaactgggactgtttttatcacaaaaaggggcactattaataattacactggaatgggtataaattaaagcagtctggggaaacccaaacatatggtcaacctaatgatacctgttttcctgcataaaggggttataattgtactaatttatggtgcaaactgggtgctaaagctagtgatgagtttctctgctagaaaaatgttccaaagaaataaaccaagacagttaatgcagagttttggtagaagggataactacttttagatggtaggtcacagaagcttgtccgaggtgaggactttgggctgagtcctgaatacaaacagccagctatgggaagctccatggcaggagtgctccagggagagggaatcccaaaagccctttgtgggagtccttctgttagagaagacctgtttggatggagaatacaaaaccaggggggcttgggagatgaggtccgagacataaggagaggctagttcatgttcagccatgtacatgtggtggggaatttgagttttattctaattggtggaagcacagcaggtgatagagcatacctcacgtactagtttacaagggctgccttcacaaagtaccctggactgggtgacttaaacaatagaaatttatttcctcgcagttctgcagggtggacctcccaaatcaaggtcctggctgagttggtgccttttgagggctgtgagagaaggatctgttccagaactttcttcttggcttttagatggctgtcttctccctgtttctttacattgtcttcctgctgaacatgtctgtgtccaagtttcctcttcttataaggacgccagtcatattggactagggtccgccctcatgccataattttaattgaattacttcttaaagaccctatcttcaaatatggtaagcctctgtggtattggggtttagatttcaacatacgagtgtttggagggacagaattcagcccacaacacctcattaagcctggaagagaccgtaagaatattcgattaactggataagaagcacttaaacccaatttctaagaaaagagggataaaaaggtatactgtttccaggtatagtatgaaggtcatgatataaaacagaaagaagctttttagaagggaacaaaaaacactggggcttacttcaggagggatggtagaaggagaaagaggagcagaaaaaataactattggatactagggttattaccttggtgattaactgatctgtgcaacaaatcctatgataggagttcacctatacaacagacctgcacatgtacccttaaaccgaaaattaaagttaaaaaaaggaaagaagccttatacagaggactatatatagccttatataaaggactatattaagaattcttgtgagaagtcattatttaggtgtcaggcatctatagccatttaaacagagtctgtgtgtaacagtcttgagctgctgatgaaagaaggtgtagaagagtgttggtgccaagatctggagtggagtggtaggatcctgacctggagcacccaggaatgactgtcctttgtgcacaggtgatagacaaaactgggggaatgaggagttgaacatggaggtatatgaggaaggctcatccgctcttcagaaatccagaaacctaagtgtgaaaacacagatttgagggcctccacctgacttggtgggatgctcttcataggagatattctcctaatgtacattacaaagtcaatctaggagtaatgtaaaagtgatagttatcttaaacaacctgaatattttctagatatgtgattttgcaaaaataaaaaaaataaaaaaataaaaaaatgaaaaaaaaaaaaaaaggccaggcatggtagctcacgcctgtaatcccagcactttgggaggccaaggcaggcagatcacctgaggtggagagttcaagacaagcctgacaaacatggagaaacctcgtctctactaaaaatacaaaattagccgggcgtggtggcgcatgcccgtaatcccagctattcaggaggctgaggcgggagaatcgcttgaacctgggaggcagaggttgcagtaggccgagatcacgccattgcactccagcgtgggcaacaagagcgaaactccatctcaaaaaaaaaaaaaaaaaaaaaagagagagagagagaaaagaaatatctgtgttaggaaaaaagctaggaaaagctaaattctggtcatttcataataaaacgaataatgaaacaaacagaaaaatattttatgtggaagaacagaacagagaccttgggcagaagtaaccatgacacgttggggtttgtataagtaataaacgctgagatatatgccttaaactttagactgtctgagatcagtttaaggcaaagatagaatattatgactaaagagcgtaaaatgaactgctgagcatgcaagtaccataaaaaggcccttccttcagaattgagctgatccatattttttctcttgatttcattttctacttaggaactcagttcttgacaggccacatatacaatgaatgtcccaaagattgcaatactgtatttttactgtatattttttatgtgtaggtacacaaatatttactattgtgtaacagttgcctgcagtattcagtacaatcacaagctgcacaggtttgtagcctaggagcataccatatagttcaggtgtgtagaggttacaccatccaggtttgtgtaagtatgctctataatgttcacacaaagatgaaatcacccaatgatgcatttcttagaatatttcctcatcgttacgtgaagcatgactatgtaagcattgagaatatgaatacacatgatttccaccaagagaaagcatgtgatcccaaatataattggtaaactagtattaaaattttttatatgtctttctcaatatctgttatatgagacacacttgtttcacatagaacagatgaactatttgttttccatcactagaatatttttcttctaaaacttttgacctatttgggattgaaataaatgacttctaaatttccatccattgctaatatctgtaattctgtgtattacagataattggctaattacctgagtatggtgttgcttttttcaatttataacagtttagaccttttaggatacagttgttgaaatatggcaccaaaacactaagcatcttatattgatcgtgtgtcaatttacctaaccttggcaattattttcaatatctattttccaaggaaagaaatgagtagttattatcaaattacacaagtggagaagaattggagtttaggtaaatattttgttctaaaatatcaaatggtcatttaagctgaattgggataaaacaacccctatgaattttgctggatggacaccataaatgacagcaaccctgttcttctgttttcatcatagtcaaaaaatgctttagagtttactacttctacatatctcatttagttttcataatggagattttctaatgcatgttttatagatgagcaaacaaattgaagatgttaagtgacttgttcaaagtcatatatgtgaacacatattgaacataacttatttggccttattactataatggtcattagaatatctttaaaaatataattttttaatcaattgacattacacaatttttatttgaagctttcaaaattaacagtaataatgttattttattaagcacttattatatttcagtcacagtgctaagcacgtcacagtcatcatctaatttactcaatctgaaggtatgccattctctgaaaatggcaatatacgcttacaattatttgtagcatagcattctacactaaaaagatgaaataaagaagttgaaattttctttatcaattaggatagctaatgatcttctgtggcaacaatcagcatgtcttacagcttaaaacaacaacgtttacttctcatccaccttacatcctatctttggtgtacctggagctctgtctcatgtcgtccccactcagagactcacgctgatggagcagccacaatctagagcctggcctgccacagtggtagaggaaaagacagactggtgaactgtgcagtgatccctaacacttctgcccagaggtgatgccagtcaccttgatcgaagcaagtcaatggctacatcaaatatcaaaaaagtgggaagtgaaatcttaaaacaccccggaaaatactggaaatttttattttagttttacttgaaaaaagtataaattttgattttctgtattaaatcacttattcaaacaatgatttattcaacagaaagcattgaacactgtatttcttttctgacaaccacttctccaattctctgacaccaactgggtgcccaacaattttattcaattctgatactacctggagttagcacagatcccccaggttaaggactcagtctcacaagacttctgctactctagacaccagacactgtacatggagtgctcgggctacccacagttttgtgcagctgaccacaaattgggggttctcatgaccccctccacccctcagtttccataattcagtagagccactcacagaaccacgacatgttctttatttgcaattattggtttattataaaggattcaacttaggaacagccaaattgaagagatgtattggacaaaacatgaggaagaggacccagagcatagatgccctctcctggcacactgccctgccagcatgatgatatgttcaccaatctggaagatcctcaaaccccatcttttagagttttgtgtccaggattcattaaggtagacatgattgattatacattgcccattggtgattgaactcaatctccagcccttctctccaacccagatgtcagggacggggaccttcagttctgttcctctaatccagtagtttttaatgtaatcagtcctcatcctaaagcaaaaagctacccttttctcccccatgagttatttcattagggatcttaaatagaagactattccttcagaagattttaggagctttgtgccaggaagctgggagaaagatttttttgttgttgttacactacacacagccatatgctgagcttggtgcaaggcacgggggatacagtggttaatggagcagacacagtccttgtcctcatgaaacttcaagttaggcaaactcattgaaatgaagatcagtctagagaagttagtaaaactgaaacaaagataaataaaacatgaacttgattcacagaaacacttacctccatatatgaataacatcaattagtaaactgggaggaggaaggaggtgctgggtgtggaatggacgggaaaaatggagaagtcaacactgaatttctaatcacctaaatcactttaagtctcatctttttgacatggtgatggtcaaagattggcacattattcttatcaaagcacaggatagggtgctaggtggaggaaccaggaaagattagtcagagaagatgccttgaaattctatgttagattgtcatctaggttatacagctcatggacaaaaatacatgcataaaatgatgcccacatggattaatggatacatgaaattttaaattcctagacaaacatataaatcaatgaattattaagtttatactagttgtatatgggactatttgatattgcttactttgttctttgaattttgcatttaggagatttgtagtatgagtttcttgcagaaatcttaacatttccttaaaaaaccacttccctaaaataatccttgaggaaacatatttgtcagaaatgttcacatcatattccttttgttctggtttatctcatcctccttgacttctccacatctctaagtaggaagttatttattgctgctgaagttgtaaccctggtgatttcgctatcaacttacaaatcacttcctttccatatgactacagcatgtaagaatgctgaggttttcttttctccaaataaggcagaatgcttcaagaatattttatcgtcctatatggatattctatacctttagagtgaacactttcctctattaaaacattaacagtcataatgagattcagtccaactggaccgagcttgtgaataaaacaagatgctccagtctgtggttcaaacattttgaacttcccagaatataattaggtatagaatatagttcttatctttctttgagaactttttgaattattgttatagtttctaaaatatcttttctattttgagggtaaggtcacaaaacagaaaaaaatgtgtatcagagtatgttgaatatggctgtttgtcagatcaagtttacgctgtgtatgggccttcgtccaatttagatgcagatggtataagggactttgaatatgctatattattattcagctgacttctccagtaaataatagtgttcttcaggaacagaaaaccaaacgccacatgttctcactcataaatgggagctgaacaatgagaacacatggacacagggaggggaacatcacatacactggggcctgtaggtggaggggagcagggggagggagagcatcaggataaatagctaatgcatgtggggcttaatacctaggtgatgggttgataggtgcagcacatcaccatggcacatgtttacctatgtaacaaacctgcatgtcctgtacatgtatcccagaccccaaaataaaattaaaaaaataataatagtgttctttagcgtctttcatgtgaatggaagttttgcagacattgtcacagcagcattttttcccgtgggtttccactaagtggtgccttcgccttgggggaaaggtgtctcagtcttattccagtctgcttcatttactgttgatgtgatgattgctgcctatgtagtatgtgactttctagggacaggcggtcaggtttttctggacccctctttctctgaggatctcttcaaaggaatagcctttggccttgagtgctgcctcgagcccacaagcaccttctcatggttgagcacaccctattgcttgactcagtgaaatacattgaatatcctgccaacactttttgttgtacatctctttgccctcaggctagctacagaaagaaaaagagagagagaatacatttttacatttcctgttcttcatgttgaatgaggcagtttatcttctgaacagctgctttgaaggtttgagtatgttcgatgcactaaacataacagcatagaaatgaaaaaaggaggttggcaaactaccttcttatcttcttttaaggcttttgaaggatttaagttgtttcaccttttagtggcatcacagagaggttgagatttcacttagagagaatggctttgatgtgctattttgtatattagtgaacaggttcacaaagatgccattctctaatcaatgctcctgctcccacaagacagaagagaattgaggaattaaggaaatgccaagaggtagaacatccagtatctttggtggagatcttgctttgctatgtttccttccttcaagttatttgatctgtgcgtgtgcctgagcatttattgtacaacagatactgtgctaaggcttttataagctttgtattgcttaatgttcatggcagccttgggaagaaggtactgttagagtaggaatgctactataatcttccaactgggttgacattaattccttaacctgctctttttgacttttcttcttcaacccattgataatctaattgtcctatatttctgtaaggttattctaaggtattttttgagattccttattaagaccattaatacggctgggcatggtggctcatgcctataatcccagcactttgggaggctgaggcgggtggatcacctgaggccaggagttcgagaccagcctgaccaatatggtgaaacaccatctctaccaaatacaaaaaattagcagggcgtggtggcacacgcctataatcccagctacttgggaggctgaggcaggagaatcacttgaaccctggaggtggaggttgcagtgagccgagatcgtgccattgcactccagcctgggcactctgtctcaaaaaacaaacaaacaaaaaaactttaatacgtgtgagtatagtagtgaacaattattatgggcttagtaagtgccaggttttatcttaagtagtttatgtgcaaacccgataacacccaaacaaccatgtaaaatagatatcataagccctattgtattttaaatgaagaagagatgataagagacatccctaagctcccactgacataaaatacagacaccaggatttgaactgggcccatcttactacagagcctcaggatttaacccccactcttccagttttcttcatggcctattgtcagagtagaaacattatttctattctgaacatgggctgtgctcaataaattattgcttcatctccttgatgataacaaaccattgcctttcttaaaagtcttttctaaaaaattttagcctagtaatttcaaaaaaaagtaaagcagtaaaatacgtcatcctgtaaagtctaaagatttgaaatttaaaagttttcaggctagagaacagaacttgatgtaatttctagaagtgaaataactcttgttaaaatcagatgctgctggtacgcaatccaaaagggattgtttagaccctagaagcttcaaataaattgagtctcagaaataggggggaattgagtcacacagttctgattgtttttgtcaacctactgaagaggaacaggagcacccttccgaaagagttcagagctgagtgtgagtattcacaagcaagaacctctggcacatcttcatctttataattccaatagcaatggcaaacaagaagactcaatgtttaacttcagatttcattagacggagagccgtgtttacaatcagctgactcatttgagcgttctgacaagctctcaatcctatctggatctgttaggttgtcttttaaaagaggaaatatttcaacagagataatattcctataagctgtgaaagtctgtctagaaatcaattgttaagcaacctatagagtttagagcagaaaaagctacaaaatgaagtaaatttttatagtggtttctagtgagaaacaatgtatgccctaggtgcagtgggccatggagaacatttattacattcttcttgtatgaacactgatatacgaagaaaataaaagctcagcttttgccttataacactacacttgccatggtacacttcaaaattcacacatgcatagggagattatttacacatgtgcaaaactaggaaaataaaataatgtgaaaacatactagttaaatgtgattgtgcagctcttttacttctattctggattggtgtttttgccaaaccctccctatgtcaacacaggtgacccctctgaaaggaacgtgccaattatagttgacaaaggggcttggtgcactgaatcttgagaaatgatcttgaatgacctccaggatttaaatatagttattgaaaggggccgaaccaatgagatgattcacagcttccgcatggagccatctctatatgctaagtacgaggccagtcctcataaaaacccgccaaggagggcagtagcaccattgttaccagcacagactcctccctttcctagctgtgtgaccttaaggagaaatatacactccagaaatctgctgcttcttctctgaaaagggcacaacaatagtcgcccattgtagagaggattaatgggataattatattatgtaaaactcactgaagtattttgtttacatagggactattcaataaacataaaaattataattattacagttgttataattccccttttacagctgaggaaactcccaagaccacagaataagtggaaaagttgaaattggaacctacctctttttgactccaaatgaagtgttctttttaataggtacagtagttcccacctattcatgagagataccttccaagacccccagtggaagcctgaaaccacagccagcaccaaaccctatatacactgtgtttttcctacatatacctatgataaagtttaatttataaattaggcagagtaagagttcaacaacagtaattaaaaaaatagaacaactgtaaaaataatcctgtaatgaaagttatgtgaatgtggtctttctctcttatatatttctggaatattccatttaatatttttggactgaaactgtggaaagcaaaacagtgaataaatactgtaattagtgttcattgataacataattttggccaagtgcagtggctcacacctgtaatgccagcactttgagaggccaaggtaggttcatcacttgagcccaagagttcaagaccagcctgggcaacatggtgaaaccttgtctctaaaaataaaataaaatacaaaattatatatatatatataatgtatatttatatataatatatatttatatataatatatatatttattatatatataattatatattatgtaatatatataaaatatatattatatattatataattatatataatataaaatatatattatatattatatatatattatatatattatatatataaaatatattatatattatatatttatatatattatatattatatataatttatataaatatataatatattatatatataatatatatataatatataatatatttatatatatatataatatatataatatatatataatatataatatatttatatatatatataatatatataatatatatataatatataatatatttttatatatatatataatatatatatgccaaatgtggtgatgcactcctgtagtctcagctactctggaggctgaagtgggaggatctcttgagcccaggaggttgaggcttcagtgagtcgtgattgtgccactgcactccggcctaagtgttggagtgagaccctcaaaaaaaaaaaaaaagtttttttcagaattccgactatatgccaagcactctgttgggtgctgatcaacaaggtagactaagtctttccttatggagcccacattccagctgcctctgacaatgcttttccccatggcactcagaatcctgattcctgagtcctacagaacattctgtaacttggtaattctgaggctgccttggggaacaagcgtaaggaggagggtttcctcagagcagaaaggagggaatgtttttcctgcaattagagagtgcagtgacagtggcaaccacagtagcctcatagagcaccagggatgacagggaagaaagtgaatgctgacctcggctgaaacagcgctggcagcttcagcagatatattacatggtacttaccattacttcatacagtgttgagagttttggctcttgagcagaatttctgggtctgtattttacctatgctgctcatgcattttatgatcctatgtgggttatttaagctttttgtgcctcatctataagattgagaccattatgatattgatttcataggtactttgcaggcaggattacctatctgagagaaacttgatttatttctttgatgcatgcaaacttaagcttgccaatgctcatatttgtgcatttttccccacacaggacagtgcagtcgttaaggcaccatggttagtgtcatctctacatgcctcagcctatctcaaggtctcctttggacagtttgcaaatgagtgcctgcctgagtctctatatctgagggagtcctctgcctgggggagcttatctgcccatgctcaagacatgagggctagaatttgtagataaatacaacagcttccttgtcccttggagatgattctcagacatattccacaatctctcagaggctccctggtggtaccaaatcccagttgtccacagcaatagtggggttgttaaccagctttcctcccttctctgtctcactgccccacttcctcaatttgctctctgggatcttcccccaaataaatgacatgctcccaaatccttgtctcaaggtcttgttttaggaggaaccccaggcaaaggtagttacagattttagagcaggacttcctcctgcaaattctgacttcattacttacagggattttttttttaatactttaagttttagggtacatgtgcacaatgtgcaggtttgttacatatgtatacatgtgccatgttggtgtgccgcacccagtaactcgtcatttaacattaggtatatctcctaattctatccctcccccttactcccaccccacaacaggccctggtgtgtgatgttccccttcctgtgtccatgtgttctcattgttcaattccaacctgtgagtgagaacatgcggtgtttggttttttgtccttgcgatagtttgctcagaatgatggtttccagcttcatccatgtccctacaaaggacatgaactcatccttttttatggctgcatagtattccatggtgtttgtgtgccacattttctgaatccagtctatcattgttggacatttgggttggttccaagtctttgctattgtgaattagtgcctcaataaacatacgtgtgcatgtgtctttatagtagcatgatttataatcctttgggtatatacccagtaatgggattgctgggtcaaatggtatttttagttctagattgaggaattgccacactgtcttccacaatggttgaactagtttacactcccaccaacagtgtaaaagcattcctatctctccacatcctctccagcatctgttatttcctgaatttttaatgatctccattctaactggtatgagatggtatctcactgtggtcttgatttgcatttctctgatgcccagtgatgacgagcattttttcatgtgttttttggctgcataaatgtcttcttttgagaagtgtctgttcatatccttcgcccactttttgaagtggttgtttgattttttcttgtaaatttgtttaagttctttgtagattctggatattagccctttatttaatttttattttgagttcaggggtacatgtgcatgttttttatatagataaacttatgtcatggaggtttgttatacagattatttcatcacccaataattaagcctagtacccattagttatttttcctgatcctcttcctcctcccaccctctaccctccaaaaggccccagtgtgtgttgttcccctctatttattcatatgttcacataatttagctcccacttataagtgagaacatgcagtattcagttttctgttcctgcattagtttgctaaggataatggcctctagctccatccatgatcctgtaaaggacacgatctcattcttttttatggctgcatagtattccatggtgcatatgctttatcaagtctatcgttaatgggcatttgggttgattccatgactttgctatcgtacagtgcttcagtgaacatacacatgcatgtgtctttataataggatgatttatattcctttgggtatatatccagtaatgggattgctagatcaaatggtattcagacaagcaaatgctaaggaaatttgttaccacaagaccttccttataagggaagcattaaatatggagagaaaagaccattatttacagtttttaaattaaggaaatgattaaacacttcattatttcaattttctcatgtctaaggaaggtatgatgataaaagctacatgatattttttgtgaagcttagctgaaacagtacctgtcaagtgcttctagaccattgcaagttttcaataaatgttagcttttattattattattattaatgtcagcctaccttaaaacttctttaaatagatggcatgaacagctgtagataactgcagggtgtaaaaattctggcagctttttttatacctgtttaaactctttgagcttaacgctcttcaagttccctgctggcctgtaagtaatagaccaatgtcagtggaggagacatgtagatgttaagaatgaactaagtttgtaaggtaaaaagccaggcttcctatatgcctcagcagatggtctgataaggacgctgagagagagtatcatgaaatagaagtgaagtggattaacaagaaaatccatgttcctggcacactaaggtgataagtaaatggttttctgtggctttgctaaaattttgaaaaattcagttagcagcaccgttgcctaaacatagtatggtatgttaagaaggaggattctaacaagcacttgttaagtgcctattgtaattaagacaaatatgatttggtttgtgctctcaagtctggtgggagagataggcatgtaaacagatgaattacagcacgaagtgctactgctgcaccaagacaggcaaataattcacttaagctaaggcagggaagaaagaaggaaggggatttttatatacttttatctgcgctgaaggtggctttacagatgaggaacccgaaactcaaagaatgtatgtcaattcattaaggcatgcagctgctaagtggggagccagcatttgaatcaaactttctttccccaaggttgtctccatcatgccaggctgtagtggtgacaggtggaaaggtgtagtgagccatcttctaggtatatctatccctgagagcaacaaatcctggtggttctctctgtatatagtcacagagctccagggcatgtagtacttagaattttgtttttgctcattgcacaggaaatggtatgaaactgaggtaattcatacacacataatttgaatataaagaagaaaatgatagaggcatctggatgacctgatatttaatatagtaaaaggaaaatgttttcctaagcaaaatgagtggtatacaatgaataagttgtggtcaggaaccatgtccccagagttttggcttttatcctttcattgattcacaacatgaatttttttttcctaaatatccttcactagaaggcagaattaatcaacctttgtaatttaacagattatttggatacaaaactaatgatatttttattcaaacatgtcaagaccttggggatatagcatgggatttggggagcaggttggttgttgggggcagtcgtctaaagaatcagtaacatttgagtgcctaaaatattaattattgtcctaccagcaatactgttctctgtccttaatgatgaattaagagattagaaaatagtaaaaaaataaaaacaaggacataatttccatgcgataatgataggactttgtgatatcacatttaaaaagtaggtgacttttatgagagaggaagtgaggaaaagaagccagcatttattgaatgcttgctgcaggcttctgtgccatgggtattaatagtcccattttacagatgaggaccctgagaatcatatatttagtgtcaaatgctttacctaaaagggcaaaagtataactagaacaaaagttcaatgcttaactctgaaaaaatctgttctctttgctacagaccatgccatcttggtgaaaatatcccaaaagatctggggttgagttacagtgccaaaggggagaggaatgtaatattgcaattagatgatgagagattgtcttaggaacactgaagtacactggcaaattttgggaagcagagataaattatgttgctaaaagccaaggaaggctgggcgcggtggctcacacctgtaatcccattactttgagaggccgaggcaggtggatcacctgagatcaggagttcgagaccagtccggccaacgtggcaaaaccctgtctctactacaaaattagctgggcatggtggcaggcacccataatcccagctactcaggaggctgaggcaggagaatctcttgaacccgggagatggaggttgcagtaagccaagattgcgccattgcactccagcctgggagacagagcaagactccatctctaaattaattaattaattaattaatttttttaaaaagccaaggaaatcatttggctagagagtgtgagcttgagaattggatagaagtaggggaagttaggctctgtggcactgggtggtggaaagtctgcagtcagcactttgatcaggtcaaacccagtaatatttttgaactcttatttttctctgtcaggtgccagcaagcaaaactgagtaaggaaataatagtttatggccttatattttagttagtttgagtacctgttgacaggtggtccaatttttgtgtttaatttagaagaaattctgaaggatgaggtttaataatcacaattgaagtagtggatatgggatcagagtctgattgcattggatacaatattccaagatcactgaatgatacaactcctgcaaaaaggatgctatgacaatataagcataaagccgcagggaagtggacagaggtcttaagggttggaaaaaggagtgggcacatttgtgaaatgtagcagagctatgggatttggactttgcaatgtacttgtacagtaggactaaagcagacaagcatagaatgcatgccattaattcttagccttgaggcataccttctcaataattaggagaatgaaaagaggtgttttttatatatccttccacctttatatatattttttattgttcaatgaagtagaaccctgtataaagaggagttcagggaatctattaaaaatccagggtaccttctatgtcctagtcagagttcttggagttgttgaattataaaaatatgacatcccaacacacactgtagggatcaaaacctaggtgtgtggcaggaagatagctcataggcaattccaatatttgcagttgaaatttggcatgaaacactgacaatttgcatcgtctgtccatccttcatgagctgatgatgcccaatgcttgtctcacatggcaggtctcacttcgtactgaaatgatgaagttacttctctgcctccaacactagattgtgtgttgcctgagggcaggagcaatgtcatcctttttgactttctggcacttaaaacagaatgtggctcatagttggaggtcagtacatatttgaatggaagaatgcatgaaaatataaacgttagactcttcccttatggttattgttttagtttataaagtagatgtaaatatagcccaagataacatagcaatttggcaattctccatgaattttctgtaatagaatatttcagtaagcacagtatacttcctgttttaactttgtggctaactgatctttagttatttgacagatatttttctggcaggcaatgcgctaaacattgggggttctctgcaactgttttttattttaagtggtaaagttgctcttttaattcaaatttgttttttaattgacttataaacttgtatgtatttatagtgtacaacatgatgcttcgaagtgtcaataatcaaatggttaaatctagctaatttaatcataatttaaatagctagatctaaccattttgttattgacacttcaaaacacacaaacacacataatgaaatggtcaaatctagctaattaacaaatacattacctcacatagttatcatctttatggtgagaacatttcacatccactctctgagcatttttgaaaaatacagtatatcatcattaactatagtctctagactgtataatagatctcttgaaattatttctcctaactaactgaaaatatgtatgccttggaccaacatctccccactccccacccccaaccaccccagcttctggtacccacccatcttcagctgtttgtaaatacctacggttgatgaggaaatgcatttgttgaaatatactgaagcctgtggattattgtaataatccttttatgctatcaaagatttactgctctttgagcttaccttagttgggtcttgtaaattgagtgttatttgagaacagaacacaggagggcaccagaggacaagaaaacgacaaccaaaaaaaaaaaaaaaaaaaccccaaaaccaaagcactgaacttctggctctagaatagagaccctgctaaatgtatcatctctcagcagtccatttctattaagtcttattctttaaaggccatgaggtatttgtaaacacgagagctttccaaactttcattaaaggaaagtgtccctttcccagacaatgcttccagctcagtcagatgcccaagcatgaccagaaggagacatggatgaagagaacccagggggtgtctttgcacacatgatgctctaaagcattttcagatctcctctatgggcccagcaagagtgctgtttctgaggaagaaggcagattgctggacggattcacaaaccacggcagctccaactctcctaccgatgcctttactccaggtgcctcagccagtagcaacaggtctccctgttggtgatacccaagggcaccatttaagaagaaataaaaaatgatgagttcatgtcctttgtagggacatggatgaagctagaaaccatcattctcagcaaactatcacaaggagaaaaaaccaaacactgcatgttctcactcataggtgggaattgaacagtgagaacacatggacacaggaaggggaacatcacacactgggcactgttgtggggtggggggagtggggagggatagcattaggagatatacctaatgctaaatgatgagttaatgggtgcagcacaccaacatggcacatgtatacatatgtaacagacctacacgttgtgcacatgtaccctaaaacttaaagtgtaataataataataataataataataaaagaagaaatagacaatgggcttaagtgttcactcacctcctgtgcttccctgggcctacggttatggctcctaggcatatgggagaggttgagtcagtcactgtggcttagaggctgcagtgccttatcaatttctggcattgaattatgactagaatttgaaaaacatcaaacatggcttccatgacatcatagtctcagctcagtatgtcactgagaggttgtagtagtttgcagatgacagtgatcaatgaaaacccaatttatttgactcaaagggctgtggatatatgtacgtgaaaatgtattctacagccctaacctgctgcatctggctctggaattccaggtccacatttctgagtatctgctagtcatttccatgtatagagccatcccttggtatctccaggggactggttccagaacttcaaaggaactcaaatttgaggatgctcaaatccctgacaaaatggcatagtatttgcatgtaacctatgcccaccctctcacatactgtaaaatcatctctagattacttgtaataaataatacaatgaaaatgctatgtacacagttgttactgtttcgagaatattgacaaggaaaaagttctgcgtgtgtttagtacagaggcaaggttttgagaatattttaaatccagagctggtcgaatccacagatgtggacccctcagatatgaaggatcatctgtttatcccaccatctcatactcaggatgtttaaaatagagctaatagctgtttctttctcaaacccagctcttcttttctttgtttcatctaaattaagtagcaagaccaagttttccaggctggaaaagtgtaagtgatcctcaactttgtccccccaccttccattcctatcattcagggggtcacctcaaccatctcttctatttatacctttcattcatttcactctgctatagagcattttgaattcaggatttatttacctcctttctaagtaagttgaatggcctttctgtgctttttctgttctggtcttcacgtaatccgcttcacattctttttaaattcacctttcccaagattcatcattgcttacaggacaatgtccaattccttagcattacatgcagtccatctatctttcctaccttagctctcacttcacagctcataatccctctcctccccaatgtacacaaacacacccacctttccactgtggttcatcttctggctattggttatattttgccttcaattacctctgctggatatggaatagcatagaagttatgcacatgggccctagaactaaactaggggtctgcaaactacaatcagcaggacaaatattccccaccacctcttttcataaataaccatttattggaactcaccaaggaactatggagaaacaaggaagaatttcactataaaagacgccagaggaaaaaagagtacatattgtatggttacatttatataaatctaaaaaatgcaaactaatctctagtgacagaaaacagaaccctggctgctagaggagcagggagaggaagggagtacaaagagccatgagaaaacttttgaggataatgtatatgttgcttatcttgattgtgttgatgttttaatgggtctactcatatatcaaaacttataaaattgtacaccttaaatatgtgcagtgtatcatgtgtccattatacttcaatttaaaagaaaacatggaaaacattcagcatccagtgtccccatagcctcagccacagttagcccgaagagttgcttgtgtcttgatagagagaccactgaagtaatttccacagttcagggttatcattccattgctagttctaagaatcttacccttttcatgcctttggtctctcatcaaagatgtaggatggctggacttactaatcttcaaggcacttttcaaatttctagagtctctctgtggggcaaagtggctcacgcctgtaatcccagcactttgggaggctgaggtgggtggatgacctgagatcaggagttggaaactagcctggccaacatagtgaaaccccgtctttactaaaaatacaaaaaattagccaggtgtggtggcaggcacccgtaatcccagctactcgggaggctgaggcaggagaatcacttgaacccaagaggcgtaggttgcagtaagtccagatcgtgccattgaaaaaaaaaaaaaaaaagaaacaaagaaaagaaaagaaaaagaaaaaaatttctagtctctctgatctccatttaacatgttcagtctacaagtattttggtggtacctaaacttattcaggcagtatgtctgtggtctataaatgtacataccccacctttgctgtagttgatgcctctgctgctgaaatttgtttcttttctaagtgttgcatccctctttgaaacagcaggggctcacctggcaaaacagtcctgtaagcagtagtggagaaacttggctgctcactgttcctgttttgagtaaattacccttcttaattgaacattatatgatttggcttcccaaatttgtgttcttcttttcaaaaatctaacagtaatagagtgtatttagttaggttcaaaatcatattttttaaaaagaaatgcaggaaaaaattcaaaggatgtttaatgagaatatgatagactttgaaatggaagatatcaccaggaaattctccatttcttaggactatataagtgacactgacttcacacagtggttttaaggttgagtgtactgttacaggaatatgtaagctgcttaaaacatttcacaactcatggtcagacaatgttcctttgagaggaaaattcactggcgtttctcaaaaacctgactgcttaaaatccaagtgacccaatgctggccttgcttatttctagggaaagttgccttagcaacctactagcattaagttgcttaaaggaatgtgtgtttaacattgttataagccagaaacagagaaaacagttaacatttagacaagtgattattactggcatccaggtaggctgttggaataaccaggatatgagttgctaatcgttcatttattaatcttcatggaattaaatacagaaaggatgaatacagaggagatcctgtgctggacacattctctgtgttagttcatttattcgtcaccatatccccttgattaaagtgatgatgagtctttccattttgtaacttggagagactgaggctgagagatgtttagatgtttgtccaaggtcacacagctagtacctgctggagcagaaatttgaagccatgtctggctcattcaaaatcctatgttctttctcacaccctgctggctcactacttattgtgaggcatttgaatgatcattcagctatttcctttacctgatgtttttagtttgctggcttcagtttcttagaggcaccctattgggccacatgagagattatagaattatgttgtgatcatggtgggctattatctctgcaaactctcctgacaccatcagtgcaccaggaaggttggataatcctacgtggatgtggagaaatctcaacctttttttatttgacattaggatttttttttccctctaggtggtgttttcactgactttgtggattgcaaaaagttgagtttattttagtttaacagtcaagaatgtggttctttaggacattttctctttagtgtgcctggagcttctaaatcttatttaaaccttctttttgaaatagatgttgcatatctttggctgtaagaggaagtcaggacttgttctctctgcttccagacccactccccagccatgtagactttatatttgaaggtccagagtgatttttcttttttttttttttttgagatggagtctcgctgtcgcccaggctggagtgcagtggcgcaatctcggctcactgcaggctccgccccctggggttcacgccattctcctgcctcagcctccggagtagctgggactacaggcgcccgccacctcgcccggctaattttttgtatttttagtagagacggggtttcaccgtgttagccaggatggtctcgatctcctgacctcgtgatccgcccgcctcggcctcccaaagtgctgggattacaggcgtgagccaccgcgcccggcccagagtgatttttctaaggcaataatctgaccctgtcattcccagcagcatgtagaaaatcaccttgacactccaggtacattcaagtgggctgccccagaggtcatggaacaaaaagcctcctagaccaagctaagatgtgaaattataaattgtttattaaatcaatttaaggtacactttaagcataaatcaaggggaaagtgattggttcaataaacacaggagagtgtgcaagtgggatagaaagactaccatatctcaatccttggttacacaatgttcatctaccttggttccctctctgccatattagtcttccctgctgatgaagtagttacaagaaccagagttgagattaagaaagggatacaacagctgggaaacactggtcctgttacaccattgccctcctggggagacacaagggcaagtatatctggccatagctatcacttgccaattagcctggtgactagatatatgttttatctctatgtatcaaccagagcaaatgtggggccagaatgggaccaaaatggatgtcaccaatgggttgaccagtttagggatgaaggagtcaacagagattgtctgagcttcataaatatttaaggtttactctgtactttcatccctttctatggggaagtaactctcttatttcatcctttttatctttgttcagcacacacgtgctctttttattttctctatgtctcacagctctcagagattatcaatttgctccctacgctttaatccattctataagttccatccaactttttgttgcttgctatgacaaaatcgaataatcttaaataatgcagcaaacacacgttgcagcctgtttaagatattttaagagttctttttgatctaggagataaaacacaaagttttcagtacagcaggttcttgtaagcaggttcttaaaatctcctcctggctacatctttagactcatttcctacctctcataaaaatgccctccactaccctacgacacggaagtactcgacatttgctgaacttgcatgctctcttaatctctatacgtggcagtttttaaaatctcttgtctacctggagcactagttctgcacattcattaaaaagcataagctttgctttctctaacaagtattacttgaacaccactatcttcttaaccccaaactcagacccaaatgtgcatgtatatatgcacacacacactcccaatagcttctctctttccctgtgttccttaggtataatgcaaagaactcatagtagtattaaagcacttaaaacattgtattacatttttatatcactctctactccattagactgtaagtaactttgatccagggatcaaaatatatttctccttttatctccagccactagtcaatgtccagtgtgttataaataagcagtaaatatttgatgagttgttgagttaatgagtaataacaaataaatgttattgtacaacaagttggcagatatttgttccttgaatagaatgatttttataattgtcatttacaaattcagtttagatgggatatttttctcttatttcttcccttgaacgttttcccccaactaccgtgtactcccattactagatttttttataaatcacttaaatatgtttttgtaaattattaatagcagcaagtagtgctgatctgttgggcacctaatgtgtatcaagctgtgaattagaacttgtcttccactggtcccaagagagctggatcagttcacaaccctgcataaatggtagctaggattatgattcagtaggagcatatgtagcctcaagcaggataattagttgtaataagcacataaccacattttctccctgtttctgtgttaggggatggcagtcaattcacactttgaatttcaatgtccataagctgcatttaaatacattcatataaatgcatgtcaagtaactaccatgtctaggccttggactagattctgaaaaaaataggcacaatcactggcctcgtggagttcatagccagcatcaccttaaaatcaatgagaagtagaaagtcaggttattgagaccaggatgatctacgctgcatctaactgggggatattaagttctcacagacattacaagcttatcccagtcaatataagctcactgtataatcaactacctccatatacaaatgtcccctcctccagtggcatgatctagggctggcagggattcacctttccttacccgtggtgcttctcaaaattcccctgctgcctcacccagccacccccattctcacccagtctaagtatcagttccaagaagcatttctagttcctctacccctttgttttccgcaaaccttcacatctgctccctcagaagcaccattggttatggaggtctgatctgaagttctacccatcactcacacattcatcatccatccagaaggcagttttatataaacccagataagcttggctttgcatctacttagtagctatttacccttggctgagataacttaacatccctgtttcttactgctgtcatctgtaaaatgggataaaaatgcttacttcccagtattctggggattaaatattaagctccagtacaaagtgtaacaatgactttatgcgtcattatccccgctggtctcccatagctgttctctagcacccctgtgccatctttgggattgtcgagttagccctgaagtggcaaggaccctatttcagtgctcatatttaaaaagcaccaccatcagcaaaaggggtgtagagaggaggcaccatttagaatcttggaaaatctgaaaaaacttgcttctaggccagagagtagagagaactgtgagattgtgtgctagccacagtagaccaatgttggattggagatgataggtcgtcttaatggaaagtgtgatggggagccaatgtggcacagtagctcagagtgtgggctctggagccaacataagaagagttaccctaacagaatatagaccacagagttcttcccttcaagtatggattcatcatacatccttcaaacctgccaagtacttcactttctttctctctaccaacctgcttcttaccaaccttctaaagtcctgttcttgattcaccctaggctcacctataaccttcagaagccctgtctctgactcttaactcttcctgtcttaacactgagcctctactttcagctttgggagccacaatgagtgtttcagagctgaagaatatctggagcccatatgtcagacatgaaagatttggaaaaacagaaataaaaaagttccttgaagtatttgaaatgatttattcaagtagggttgggacctaaaaatttgccaaatatatcataatgggggagtagtaccaggaacgtagagaaaggaagagaaaaattgatctcatagaaataaaacgtagaacagaggatactagaggctgaaaacaggagggggaaaatgggagacacagagagatttgataaaagacacaaaattacagctagatagaaaaaataagtgctagtgttccagagagctgcaggatacaacaatatacagtttcaaacagctagaaggagcatactacatattaaatgttccccaaacaactaatgataaatatttgagatgatggatatgctaatcaccctgatctgatcaatatatattatatgtatcaaaacatcactatgtaccctgtaaaaatgtacaattatttttcagttaaaaaaggaaaagaaacaaaaaaataaatattctgagaagatgaccttaagagagatgttggaagagagggagggttgggaaaatgggagatgtctgagaaataccctagaggaaatttgaaatagaaaaacagagctgaggaaagaaataaagatgaatcaaaaattaaattggagttatatgatggttcagggagcaacacatgtgtagagaaggaaatgagaggctggaactttggggaatcccagagttaagtaatagacaggggaagaggcagggaggggaggttgctcatgaaagttcatacatgtgggaaaaccatggacagccatgtcactgaagatgggagtggctgctgaagcctaatggtgatgaagaagactagaaaatgttccttatgcttggcgatttgcagattattagtaaccagatagaacagcagagaaaataactagctgccaaaaggttggtggggagggcttggagggcagaggaacctgggctcagcagcagtcaagggggattctgtgaagtctggggggagaagcaccctggtgggacactctaaaatgtcaaggtgaatggagaaagcaagggaaagaggcagggttatgaggagggcttctgtgagtggagtgaaatttaaggtgcctaaagaaagctaacaggaaaagtctgaaggttgagaaaagaagcaagatcactgttaaaaaaaaaaaatatatatatatatatatatatatatatatatatatatatatatatatatatatatatctcaaagaatctagaaaaaggataggaagtggagtcagaggagagtttagtcttggacaaggtggcagggtccttactctaataacagaagcaaaactgtggattaagcttataaggaagggatttcatttatttactcaacaagcatctgagtgtgtagatgcagacatgggcattttagacctggttttcaaggtgcctccaatctggttggggatatggataactgaagaattagtttgcaacagcatgagataaaccatgagggatgctgactggggtgttgaagggtgagaggatggcaggtggtgagagagacattccagagtttccttgtgagttacaggtttggttaggagggaagtggagctaactgttgaagaatagagattggccaaatctctggaatttcagaagcatcaactttgggaaacggaatttgctaatggagtggagtctgatgcagttcttcacttattttcttctggtatgcagaccaaaattatctgagaatgatcttttcacttctggctacaaaaatgcaagccaccagtagaaccacaggcaccagtttacagtgtagagagcactggactgggagtcagatctgggttgtacttatgtggtcatgggaaattccttcccctaggtgcagggactcaggattcgctttagtaaaatgaagggttattctttattgttctcagaaaggtggtttgagaatcacctgtgtggtgggctaagtattgtttcctaaaaatttgatgtctacccggaacctcagcattgtgacctgatttgtaaatagtgtctttgcacatgcaattagttaagatgaggtcacactggattatggtgctccctgattcctatgatggtgtcctcatcagaagagggtacacagagatgaagcccatgtgaagacaaacagagagtgaagtgatgcttctgtaagccaaggaatatcaaggattgcaggaaacccccagaaactaggaagggacaaaaatgattctcccctggagcctttatgacctgctcacaacttgattttagacttctcaccagaactgaaagataacatattttcgttgaaagctactaagtttgtgataatttgctacagcatccctaggaaagtaataccacctgcatccggaatatcaggaatcttattaaaatgccacttcatagtatccatcccagatcttctgaatcagaaatactgagactagagccctgagatttaaactattaacattatttatgtttcttatgaagttttaaatgtgagaaccactggcctaaatgatgccttaacagctctgaacaatctgaaagttaaaatgacaggactattttatgcatatagacgacatctcccccggtgaagtgtgttacttcccatcctataggtatcacaaacagaagtatttattttattaaatacaaaaagaaccagatcgcttccaaactacatgcttctaaacactttcataggttttgtgttctggcagcattttaaagataaaactattaagggttttattttttctggagaggtatttgtctctgagcagtttgatgaatatttaaatttcttttaatctgtgttctcccatcattttctgtatatgtttctttcttatctcattttatctggccttattttttttctctgcttttattcattttctgtgtactcagaaattaaaggcatatccattgtatgtttttatttaatagttttttactctttatcctgtacggcctgtggaaaatatttcactatgaggattagtcattgcatctctgaaccatccctgatgcatctcttggctaatggaggctgtatagtgtagtagttaaggacaaaatggaacgaggctacccaggtttagttccagcaattaggttatgcaacattgggcaattgactgaacttctttctgtgtcagttttctcaagggtaaaatgtggttgttaatgggacccatgtgttagtccgctctgctcagttatgctgcagtaacagatgcctccctggaatcctagtgacttaaatgagcagagctttatttcccaccggcattaatattcatcctagttctgctgcagtgcttcttcatgcctcttcatttctggaccctgcctgaagaggcagctctgatttgtcgcatcctggatttgtggccaagggaagagagctagcagagccatgtggtggccctcagaccttctaagtggttcacactatttctgctcacattttcttggctgtgaagcacataaggcaaaatgcctgacataagaggcagaaaatgtaaccctccagaaagggtggacctattcggaagaggctggtaggaaaagacagcaaatattgtcaaaaataatgtaatcaaccacagcaactttatgggattgacgtgagtattaagtaagttaacataggtaaagcacttagaatagtgtcttatgactattgtctggtggtctattattaacggggtcttgtgcaagtatgtgaagacattaattctttatttgagaatccaatgtaccttccaaggaaagtgctatttagagttgagaaagatacagaaatacaggtcttggtctatgccttatggaatctgtatactcctccatgaagaatgtgaagaggaacagacagttgatgacttccagatggcctgagtgcccaccagcagggtatctagtggacacctctgtacctgttcttccacatgattggtgtttatttgttcaactcccccagcagactctaagctcctttagaacagtgagtgtatctttttcatcttcgcaccccagaaactttcacaacacctgtctagtaggtcatcaacttttaaattaaacccctccttctttatacagtctgaaagtggggtggtaatttcactctcttaggtaagaacagttttcttctgcttgatgccccatgttaatgaggaactcagggtgcatggaggaggcagtcagcagtttgaagtttacatccatactgtgcccaaactgttgcacagaagtatgaagacagcgcatggaaattagtcctgtttgccaacatagtcggttttgcatgcgtcatacatggccaggcttgctgtattaagagccagctgcatttaagtcttacttaaggggaaacaaatacatttgaattgaaatacacttgatttatttttgttgatgttctagttttaattattttctctatgtgcatgtcttgcaagttttatttttgtggggactataaggatatgatatttccagggagacgaagagctataatttctcaacttttcaaacctacatacatattattttaggaaggacaaatctcatcatcttagttaacaagaaccagaatagagtgatagttctgctaatctggcctcctgggtcttgcagttgcatacaccagatgctaagaggataagacagattagccaggagtaagaccattctgtgtggcagctacctctgtccacagtgggtgatcagctaatgccatcaagctcataagctgataggccttgtaattaccatgccaaagaggctgcaaatatccctcttttcccaattttaccttatatttagtactttctattgtaggaaggagatgctgcaaacaccatggaggttgatctgaaaataccgtattcccagaactctttgtcttgggatacttctaaaatccaatgactgtatcttcatatctatacataaagtcccccatccagatgggatattcatccagaatatggcagatagaacctgaagggtctttgggtatcaagagcatatcacttagcttcttacttgaatagacttacgctatttaagaatgatcgtaacctcattcttggcagtagagtgaattagacaaattaacaaattagagttcccaaaagtcctccatggttcagagtgaagagctatgtgattgtgcttagagacctgtgctacttcctcacaaccccaggagtctggtcagtttttggtaatttacaaccatggtccctcagcctgccctgagtgctgacagcagactactgccttctgtactctgtgggcttcatggactctaggtgggtatttaggttaatgggaagtgatctatctgtggagtcaggacaggcagctatctaggttaatgggaagcaatctatctgtggaatcagaaagactggattctttatttaatttcacaattcaatagcttgtgagcttgtgcaggtcacttaacctcttaatctcatcctaggtaattgacgttacctacctcatgcggttgctgtaacatttgagttactgcatgggacatgattgagtgctatgtaggttttatcttagtttgagttcccttgagagcaaagcctgagacaaagacttgggtgagatagtttttctggagtggtccccaaaagcagaagtgaaggagcagggagagtaagcagtgcagaaagaaacaccagtatgagtgtccactgtcaagattcctgctctaagcactgcataggtgggagagatgaaggtgttgccatgaatgcctcccaggattttctgcttaaaacataggaggttggagtatttattcattggctcccttcccctccccattctttgatatttacccctagggtattcttgccctcactcccatttcttggttgctctttcttgcaggcagggcaggcaccctagctttagagaaggcccaagggctggccatgcttgaagtgggggaccatcaaactgtctgagctcacaataactgtcacctgctgcagtggctgaaatctgacattggctgagggaatatgatgccaggcggcacgtgatgcagggtctgctggaagcgcatacaaatatgatatttttcatactcactttcatttacaatatacacatttaacttttttttttttttttttttttttgctttattaataggttctgtatgctaggcctgtaccctggtcttacaaatactttaaagaaagcccaggttatactcttcattatcctcctagaattagattttctgtttcataattagcaatagtctcccatatcctccatgccctttacccagcctcaccctagtcctctttcagtcctgagacaggacaactcagggatgtaaacatggagaaactgtgagaacaaaccagagaggaaggatttttcagacaggctgactagggtttgagtcccacagctgtatgaccttgacaggtcacagagctttgctctgtctcttgattcctaaagctggggtatagtagatcagctgcatgctacaaaactaaatgagaccacgtatgcaaagcaactggtacttctttatatatggtactttcattcccctatcacttccccaaaaagctgcattttttctggccaggaagaatatatattaaaaggaaaagtagtgacttcatttatatctatctgctgcctgatatctttcagctccaaatttgtcaaattcactctactgccaagttccttctgctcctcttccttctccccctctaccctccataaatttactctcctttaatttattcatccatttctatgtattcacttattaattcaattatatgtatttactactatatggaatgctttcctgaatcggttcaatctgtcctattgctaaaatacagtctgcagctctcttcagctccccctccatttcttctctccccctcaacccatccactcatttgtttatttaatttattcagttttatttatttgctcactagtttttttccaatacattgaacaccctcttggtgcaatgtgccatgcttagttgttggggattacaaaggtagaatattctacctcaaagggcatagaagtgaatttttttttttaaaaaaaaactacaatacaaggaatagagtggtcatttgcaaaataaaatttttattgaattgctgaagcagtaaactctcagctgggagggtcagggaaggctgaggagggatggctgcagatagaaaggttataaaagtaatagagggagacaaatgtaagctgtattttgcattccttgattcctatttaaagcaaaatattaattaatattaatgtactagacctttaaattcataattggatatatatttttttctgcatgctagggcaaaaaggtcaattcacaagaatacagacttaaattagaaatgtattaggggatggtaggcagcaggtcttatggcatatcctcgttagaatctctttagctcaatcacattcagcttcaaaatctgtgactttagtgataaacagtaagatcacacgatcagactcaaaagcactataatacctaaaaatcattgtaagaaatctaatttgtattaatcataccattagaaaagtggagaaagtttcagtatctgttataaagtttttttaaaaacaagagtagaatcaatatccacaaaaggatcttcctgcctatccctgagaaaattgcccttatctcttgaaaagtggtttcatggagagagattatcgcaagaaagcttgagcctgtccccagcttaccactgctgagcactgctgtaaatttatggcttgaggtagaggtttggcaatacattggggacaatattctttttcatcttctgaggagccatttgtttctttggaggtatatctgctccagattcattccatttcaaaattgagatgctccattctctcagccaagatgaatgggttcattttacactgtgatcacaatttagagatgctattgaatgggctgccagtgtttgctttgtaatgttaggggcactcttttttctagtcttaaggcataggttacagcacataacagaaaccatgcaggaaagacaaaaagaagaaagagagggagggaaggaaggaaggaagaaaaaagaaggaaagaaggaaggaaggaaaaaaggaaggaaggaagggaacgagggaggtgggtgggcaaatagcaacacccaacaatcctgtatcatcaatagatagttgtggcctgaggtataaattaacactattctaagaaaaatcaggcaagcagtgaactttgattcatacgtctcagcagcaggaagctgccgggagctggttatcaagtgtgactcataggagagacacaataccagaagtagccttctctggctagtaggatcaatcatgtcttacttttttctggaatctttcccttttcagtgaggctgttttcatctacccagtttgtcagagcaaaccctaggaatcaacactgatttctctctttacttctcctactaccaattcacctcccaaaccaatctccaagtcctgttgactccacctctaaaatacatcccaaattttacaactttcatttctactgtctcctagttttagcctaaatcattttcatctcttttctttaatagcttcctaatagatcttgtttccattatttcacttttggtctaatatacctacagcaaccagagtgattctcaaaatttaattgagattatataatctccttacttaaaaccttccaagagcttccagtatgtgttgaagagctttcaggtttgtaccatgtcattaggacttcatgtgatctggactctgcctacatcaccagctttgcatgattggctccttcctaaatgcaccttctcagagaagccttctctgatcatctcatttagtatctttctacccaaccaactgctcaggacaagagtagagaagtcacctcaaagaggccttcctggaacattctacaaagtagccagtcctcagtcctcactccctacccccaactgcttttcatcgtattaccctgccttattttagatagggttgacagaactcaaccctatctaaaattatctcatgttccttaatttgtgtattgtctatcagattttctcaccccaaagtagactgtaaaccatgtaaggcaggacccgttctgtcttgtttatctttttatcctccacaatgaggatcagaatgagcatcagaatgtgaccacagtgcctggttgccttctgatgctcaattagcatttgtgaaagatgtgaatagatagtcttgcaaaaccttggcagaagtgagtaacagtattctattaataccctgggaggctgaagtagaggatgaggcacggagaaagaggtgagtagtccatcgttgaacttgttatatgtggcagtctcaatggtatgtttgcttattaaatcctgataaatattggtggcatttttagtaggttttaactagaagcaggggctcctggagggtgctcaggctgaatagctgggtcacttgtctttctcacacctccctgggagacttctctgtagaagacttcaagaaaaatccctgcaccttccacacctgttgtaggaggtatggcagctattcctgagccttaagtactccagtaagaatgaaatgaactatttgaggtgttctgccaaacgggctctaaaaataattatgatttaaaatgttttttttttccagtgaatatgaacgctttaaaactaagtttgtaaaaacaaaacaaaacaaacaaaacacctcctcaatctctgttgggttagacacccaaagaaagcaaccagaagctgaaattttgtggacagaacataaaacgcctttttcctacttctctgtcctcctcttcttccttcagtcctgttctttttccttatcatccctgcttttacttgcctgatctgttttgtctggggaggatgcctaatacaatgtgtgatgctatgggcttagtgaaatgcttgtcacagctcagctagcctagccaaaggggctggtggaagcaaaggtaagttttcttttttgacatatctttggtttccttcaaatctaacacagtccatcattttgagcatttattaaccatatcatttagatgtataattataggcatctttcactacgcctttctaaagagggtaattttcatatattttatgcattgtagaaattttggttcatgtgaaacatagtttgaagggaaatcaagttactgtttcatttacctctttgaataaatagaaagatgttcaggtaaaaccaagtgattatgatacagatctcaccccctccctccccaacctccacccaagcaaaagtttccaatggttccccatacacttttggaaacagagctttgtggcatatggaaggaatttctaccccctgcgtatgagcaaacccatctggtttagttggtttggccaggtcttagaaatacattgacaaacacgtgtatgtcaggggtaacttgtagtcttgctgcttatattgctcctggggggaataagaaattcatgtaatatgaacagtctagtttttaagaaaactgaaataaattaaaaataattaaaatccaaagttcaccttatgaaggtgtgtgcctttaataatgctcaaatatagatttttaacatacactctgattttctgtctgccaaaagagggaaaaatctgataatagctgagtgtcatcttcctccaagcaatcagcaatgcattatttcctaatattgctgtttgatttcattattggttctggcttcttaaagaaataagggttccatagggttactgtaggataggtcaagaaaaacaatctagtcagtgtatttcatccatgatatcttattccgtattccccattcaacagagaattaggccatcttctgtgaagcaaagccttacctcaaagagatggtgctaaatgagttttcaatgaggatagcttgtgtgagcatttgggtggtattattacccaagggattcattaaaggctctctgttctacaatagtaaacaattaaacactctatttttacaaagttctgcatcccagaaatcttttgcatctttattccaggcatgagtgtcattacctgggaaattcaactgaggagtgttaggtaatttattaacattctctacttagatccagcagtgatagtttaagcagcctcaagagaatcaaaggatttttttttgtgatcaatatttattacttaaactataaaagagggaaaaatacatgtaatacatacaactaatatgtacccagttgcagatcataactttcctagttattaaaaatgcaggaaagttaatggttttgagacgtttcttaagttctcactagtttcattttaaatttcagtgttttcttctttttgtctgaaccatcctttacttacgtgaatcactctttacattcattgcttcactgatgctacttcactgggtttttgcttgaataggccagaaaaagtcatccctagactacatcatcaagaacagttttgtatatttcaaccttcagcttgtgtctgcatcttgcattacttatcaattcacttttatgcctgggctacttattaggtttgtttctcctctctctttgccttgatttcccgctgagtgtaaacatcacttttcctctgtagaatgagttgaccttttgacttgattaaggataaatgccattgactctccacttctggaggccaagggttttacaaaatcccactgggacttatttatttattgtttgaaaatgaatatcaaatactattccatatcattttaatgagatggatgtgaatctttttttttctactttaagaataataagaattgttactgttggaggtatcaaatgtaactaaatagtagggcatgagaagcttcagttttttgggggttttttgagatggagtctcgctctgtcatccaggctggagggcagtggcgcaatctcagctcactgcaacctctgcctccctggttcactccattctcctgcctcagtctcccgagtagctgggactacaggcgcctgccaccatgcccggctagtttttttgtatttttagtagagacggggtttcactgtgttagccaggatagtctcgatctcctgacctcgtgatctgcccgcctcggcctcccaaagttctgggattacaggcgtgagccactgcacctggcctggtttttttttttttttttttttttacatttttattcattggccatcacattccaaagttttacagtcaaatggacagttaaatatttgtgtttgaatctgaccactgtgaatatctcaaggataccataagagctgatggacctccaaacgttagcatcactggactgagagaaagctcgttttatatctctataggtactgtcataccaatgaagcaatgttcccaaactactatgtttgtgttagtcattttccgcttatcttgtccccaatcataaaaattaagcgatgtacaaaaattgcctaaagaacagatgccaccttatagaagatgttttaaatagcccgtacttgtagcagttctgccttcatagctaatattctccacgtctttcttcacttttttctttcttattgaagcatttgcatgtagaataaagaggataaaaacataaaaaaacaaagacagatttgttttttctgagaacatctgttcttgttataaagaatccacatgatgtggtccattttctttcaatgccctcactgttggctgttgtgatggcaactgttacatcaatcttagacctgaacttaataagataatgaagagtagtatctaatcagttgaaaatacagggaaattctgttgtaatacatacattttatgtaatattgagacaaacatacaaagcaagataagctgagatgtaatctaaaatggtttattgtagaattactttattcctaagattcattgctctcatggcatcactacctaattttgagtgcatttggtcctttaggtttccttactaaatgttcaagattcttgtaaatttgggttgcccttgagctttgggtgcattctgaaaattattaaatataagtcatttgctgtgtacattgtaattaaaagaaaatttttcactttgaaactctgtttatttttcaagaggagagttcctccaaacttgaactactaccatagctcttataaccagcagaaaataggaatactaattactcaaaattaaaaggtgtagtttgaaattacctagagatttatattcccctgtataaaatgtcttcagtcttggagaggagggaggagtgtagctagtgacagttacataataaagctttcaaaattacttagataaaatatattgactctaattgatggttaccatagaaacagacttatatagacattgattattcaagcactcattaaagctcctactatgtacttggccctgtgctcagtatatgttggagccaagtatatggttttccaaactatttcacatatatccatagggatatattagccacttatatgttatatcattttatttcctagtcattttcaggaatggggctttccacatatagattgactaatccaaaaatatttaatcagcgtctttcttcatgagctcagctatcctcctacaaagagcaaacttggtctgtcttctgcttctatgtaatcttctttgtcttttaaatttgcatttcagatcaataacgatatacatcctaaaagaatgtgatattttcttcctttattaactggatcattttaatgcctctttgtctctcttgccatctttttcccctaagtacaattcctgttacccctgattctttatagggttcacttgaaccttagcttgagcatctggagcatggatctcttgagacaacttggtttattcctctatttagtggcactttatattagtcatgcttttgtcctgaaaagtttcagttttggaactttacatcatttcagtttttaggtatttggatccttttggaggatgatgaacaatgggaaaattctgggggccctcacattcccttcaggagcattatttatgatggggtttaaaacttgacagtattactattgtaatgcttactattgtgatttctatggtcgtgaatcctagtaggaccctgtgttaatggaaatgtcaagttaaggcatatgtgttgcaaagttcttttctcgtcctattggtggatactctctaaaagccagactggtgtatcatgccaaatggccaaattattctatagaaaaaatactatggtaaatttcctatatcttaaaggaattcgtctggattctaaaactttgagagattaatgactgctaactacagcttcctgtaaatgattgcttactgccattggcatttgaaaaccttatatctaagataaaagaaggcactatttttttcattactgtaccattatcctttatgtttgaattgagacttttgcatttggggactcctacagagaatccactggatcagtaaaattcgaatggactttgggtggaatataattccttgaatgctgctgggtcatgtgcaccagtgtggttttgacaaccctgatgcatgagcactactttcagaattgattctaactttggcacttactaccatccttaggcaaaggaccagagaccttgtatgcagggcagaagctcaatgacaacgagtggcacaccgttcgggtggtgcggagaggaaaaagccttaagttaaccgtggatgatgatgtggctgagggtgagtatgactatggtgaaattcgtctgtcttttctctcagtcctctcagtcactgagtgagcaaacagtgttttgcaaaaccttttattttgcatagtagaagtcacaaatcatgttttctgttgacaaactcaggcaaggctaagaaggtcttcctctgtattttacaataccttttcatcaatgtgcgttatggaaattacctactaactataactacatatttatgggtctctctccttaggcgtagagtatgtgtctggagaacagatgtagggttctacagatccttttattattcaatcattcaaaaatcacatgtcaatcatcctcccatatgccagttccttccatcagtgagtgaatcactctctagtagaagagatgggcaaaccagaaattcagaacattacaggtaaaagtaagtactaaaacagtgcatgatacttagaaggtgctgaataaggtttggtttaattaattacttatttaatcattattaattatctattctgcactacacaccattttacaaggcactgataatacagtggtgaacaaacaagcaaatctttggcctggtgggatttacatttagaatgtggaaagaaacattcagagctccacacaatcaataagtatttcctaagagtctgttctatgtcagcagtatgctagaattgcagaagataaaatggaaacagatgagattacctgtttcctcaaataatgaaccaattaagcagatcagataggactctggtatttgaaaacaggaccaaaatatataatgagattctaattttgatgggtgagattacaatttgtcaatcagaagagagaattacccatttgggctggagaaatcaggagtggtttataaacgtagatcttcagactgaatttgatggtggatgtaatttatgaaggctgaggtacaagaaagagggtatcatcaagtgccattttacatgctatatcttttttttctttctttcttttttttttttttaagacagtcttgctctgtcgcccaggctggagtgcagtggcgcgatcttggctcactgcaagctctgcctcccgggttcacgccattctcctgcctcagcctcccgagtagctgggactacaggtgcctgccaccacgcctggctaattttttgtatttttagtagagatggcgtttcaccgtgttagccaggatggtctccatctcctgacctcctgatccacccgcctcggcctcccaaagtgctgggattacaggcgtgagccatcgcgccaggccttacatgctatatcttataagtcttccctctctgatattctagagcaggacacatctatgaagcagaattcttatccatatgggaaagaagatttggggcagcatggggtattacatgaaacactgttgccatcagatctgggccctgacgttaacttgcaggacgttaggaaagttaacattcctgggccttgtcaaatgcagtcagtggcctaagccatctccatggtttcttctgtgaataagacagtcagtagccctgggggtctaatataatcattgccactaaaatattttatgcctttgagatagatatactaaacctctttttcctaatttcctcatttttaaaattgatattctattatttctatggcctttccagcatgaatattctgtaatttggggtcttataatttaattttatattcatgagcctgagtttctatacttctggaatcaggaaatatagtaagatatgtacgtgcatgtacaggtgtgtgtgtgtagagaaggatagcctgtggattaaggaagagcgtctaggcacatatccagtgcccagtaggcattagaaactgttagctgtgttaagcatatcagctcctttaatcttctatcattcactatagcctttaaaggtaagtgttcttaatgccatttaaaggaagcataaaactttgagagcgttgtataattaagctccaaatccatgtcagtgtgattccacaaaatcattctgcttgctgtacttcaaaatccatcataagaaaataatttatcttacaatatgggaaaaatataatggaatgggttggagtgaggtagggaatgcattagcttattaaagtctcctaagaaacttacaggaggtaggccacaacacttgacctctccctcacaaaaacaaagacaaacagaaccaccacaacaattacccaaaacacttcgattacacatagacataactcagaagcgggaggtgaagttcctggtctacgtgcctggagcataaatttgcattctgaaatgaacattttaaaagagatgtacaaatggttacactatttagcgcccgcagccaacctgaattaattattcaagaactgtatgaactgttggtgcatctggatcctgcaaaggataagtcacacatctgttgctcactcctctgggcttgtctctgaagggtgatgggattcacagccgcttctgaaaagcagccactagatggcgacctcaccctgatctctcctgacagtgagttcgtttcattttccctggaaaataaatgctccaaaagtatagtcataaagaactacagagctgagggtactataatgtgtctctctcagtcattattcttttatgaaaactttggaataaagctatttgtaaattgcactttcttttaccactaataattaaaaagcagggccaagtcacgaaatgccattatccagtaatttgattttttgaaattaatgaaacgctttcattttcagacgtgtccccccaaccccccgaacttcactgctgatggaagaaagcagccagaaggataaagaaatttgagaggggaaaagtgctgttttgcttatgagttacaatcttgggttgctttttatagtgataaggggttgggaaattttaattttagttcacagaagtcataaaatcaggcaatgaaactaaaatacccacagtcctcaagttattaagtagtatctcattggcttatttagtaatccctttaatgttctttaaggcccccctagtgtgtccaatttcagctagtttatagaaatgatgtaaagaataggtctggctcacaagaaatcaaaagcaaggatagaaatattcctcaaccttgtgtttatcatttattgtaatgtgattgtgttcttggaaaagcattaagttcgggtgacagttaataataattgattgatctatgtttctattattaagaatacattactataccaagcataacttgagttatactcctcagaattggggcctaatgctgcatgaactgcctcctctgcctagaacttcttgctagtacaaaaacttgcccttgctagtagaaaaatttgactacactggttcttgttgacttttcctgtccttacctacatagcatgtatagcaccaagctgtaaaaagtcattttgcaaaattttccatttaaaatgtatttctcatagtaatttttaaaaacttgacaaaataggattgaggagtgtgcggtcaaacaaaatgaaatggagttctttattgccaggcttattaggagactttaataagctaatgtacattgcaaatcattgataagtatgcagtatttgctaattttttttttttttttttggttccagaaactttttttactgaagtattttataccacatacttacacacttttaaaaaatgctgacattatggagaaaaggatttgggaccagtagagctagggaattatgggcaaaatatgaagattcttgactggtactctgtaagccttcgttttcttaacttctctccccacgtctaagggccatgaaaggtcaatttgcttcctctcagcgtttcccattattattcttttttgctgagctcttagttttgaccaggaacctcatgtgtggaaatggtgaggacccaaaccttgaccccaaagcaaatgtctcaaatacaagcccctccccccagaagttaggaatgctggctgtgctcagacccctctggtagccactgggggacatatagaagacacaagaggtggcctctacttaaaaagagcccacattctcacacaaaaaaagagaaaaacagtaagtgaaatgaccacaacatgattcaatcatttcggaggaagggagagaaatgaatgcagcataattagtaatagcgcacggtttaagccataggcactctattaaaaactttacgtgtgttgatacgtttaaccctgctaacttcatatccgttttacagatggggatctgaggcatagaaaaattcagtaactcccccaaggtaacccagtgaagaagtcttggaagcagaatgcaaagtcaggcagtacagccctggactctccatgctcatccactatatgctattgcttcataggaataggaagctacagcttgaacctggccagaattttccataactatatgtccttcgtcactctaagagctggtttgtagactgcttgttggccatcagtgcaatatggaagtgaatgtgtgacaaggaggcaaggcaacaatgctgctttagggagggtgctggatatattacccatgaattagatggagtgacattctgatactgggccatagggaagaagtacaaactccttagaacagcttctacatggaaatttcaccagttaaattctacctactgcttttcttgggcaatgatgtgaggaataagtaaaaccttttttccaaagacagttcattgtactagtaaagatatgggctttggaattagcacacctgagttcaatgtaggggtctaccatttaccacctgcatgaatcttgatcaaactgcttaacctctgcaagctaaatgtcctaacctctaaagcaagagaaagatacttctctacaattttattgtgataatgacatttcatagtgattatgcagtatttagcacagtgcttgccttatatggaattttcagtagtcttggttttggcttgttatctttctccccagttacttctctttcccctgaagtttgaaagaagcggctgtgaggtatgaatatatttgccccttaagtagaaaggaggttcagtttgcagacagcattcagaggagatgagtgaaaggtttccatcactactattgattaaatgacacatagattaaaaaaaaaatatttggttggtttggcacaggtttcaaactttcagcatctctcatgctttgcacaggtgcaataatatacttattttttgaagtcttcatcaacaaaggagtaaattcgtttagcacacagtgaagccaattctttttctttcctttttctttctttctttttttttgagacggactcttgctttgtcacccaggctggagtgcggtggcatgatgtcgactcactgcagcctctgcctcctgggttcaagcagttcttctgcctcagcctcccaagtagctgggactacaggcgtgtgccaccacgccaggctaatttttgtatttttagtaaagacgggttttcaccatgttagccaggatggtctcgatctcctgacctcgtgatccacccacctcgacctcccaagccaattccttttctaatttgatctcacatggccttctccccctcccctcaccaacttttagttgaggctcctgtgtgagtcatcctgaactcccagtttgtgttcctgggctaagctcctaaatccactattaacttcacttcttgtacttatccacatccacgctcagtctctctgctatctcaataaacacttttttttttgctatgaaaaattaattttctagtgagcagaatatcccaacccctcaatcctggagatcaattcatccagaatttctctgaaagttctcaacttgactttaaaattgtttcttcagattccttttggaacctcaatcttcaccagagattccccattctgacttcttagttctcatcttagattttttctttgtaaaataagaattagcatgactagcagcatcatcatagttcagtttctctgtttctgtggatattgactatgactccccctccccatcattttccagcccagctccccttcctggtaggagtagctatagccaatttgacagtagatgtttctttcagtcactttattaatttagagcatgcaaatttagattatgttgctttgtattttcacagcctgtctgatttttaacactaagcaattttatttcctagttatttgttagcagatttatgttgcattttgatttttatatttaagttaaccaacatctttttttcttatactaagagagtgatttgtcactagttgtcaaaacactgcatagaagctcataacatgtaaatctaatttttgtgcttatagggaatataagaaattttatttttatttttttagagacagcatctcgctgtgttacctaggctggagtgcagcctcaaactcctgggctccagtgatcctcctaccttagcctcctgaatagttagcactataggtacatacctctatgcctggctaatattttttttttaatttgtagagactgggtcttgctatattgcccaggctggtcttgaactcctagcctcaagtaatctttctgtctcggcctcccaaagtgctgggattacaggcatgagccactgtctccagccaattctttaaattaggtctgagttttttcccaaagagataaaaccaatattgagcacttaagggtatgatctggtttagtctcccagatactgaagtttaagagacctaagaaaatacaatcctccctttttttgtcactgtaattctgagccaatagagaaaatattgcaatgaggatggaaggcaaatatcattttaattagtaataacacacaataatattgcttacacccactgaacttcagaattagacagaactgcccacttgaatagtagttcagaactgggcagacatcctttgtggaagcaaggcttgctcctgtaacacccattctatggatgcatgcagtagaatggacatttctgaaggcagcttgctccagcaaagagaaacaggaggtgttaggggctgagctaagcatacacagcttctctttgcagatcatccttaatatttctgattatgtcacttcttcaggaaagttgttaaagaggaaataaagagatgctatcagtcttgctaatggagttttttcaatgtagaaggtaacaagagaggacaggaagaaagaattccccctctaatgcttggcagtagaacatggtttgttatgttttaacatgatttttctatataaatgttgaggaagccaatttctactctggccacattaatgatgtttttctttattttgttattaaaatttccagtctctttgtatttttttttcaagccctccttatcccctctgccctagtcactcaccacttctaggtaaaataggtaatacaagttctaaatagttcatttgtaacagctgaagatatttccgttgtgaatgtcagaaacccaactcaaacgctttaagcatgaaagggagtctattgccacacagtttgaaaaagccgggaggtgcctggcttgatccagagtctcaaaggacagcacagatgattctcttcatttggtaattgtcttctgggttgctagtcctctgatccctctgattttcttatagcctctagggactcaaagctttcttcttacccctccagcagtccttgcttgcaaagaatcctctttcctaagtgtaccagcaagagctctggaactgagtgtggccgggatggcttgggttgttgccagttctaagggtggtccctaaatcagccacaagagcatcactgtgaaacttgttagaaatgcagattctcaggcctcaccccagacttttgaattctaaactctgagggcctaagccccccaggtgattctgatacaccctaaagtgtaatgaccgctttttaagtctgtagtccaaagtctgtgacagttaggggggtaaagtacattgagtggtctaggctgagtagcttgattagggtcaactttatccagtccaggtggttgaaaggtcaagaggggtgggtagcttcctaaagaaaaattacgtgttattataagataaagtaacagttgctgggcaggtaaactcaactgataagtctataatagaatccttcccacgagtactaagtggagagttattacgagaaaaaatacttggtagtgatgcccaagacttgtgtgttgtgtctttacaagggtcagagcaacaaaggcctttcttcttatagtgtgtattagtgtccagtgattctcctgaatggagaatatcaatagttttatcctttagcctgggttactcatgacctcatatttccccttatatgatgagccgtgctgagcagctgcgtgacagcatgtaatttgggcaatgcctgattgaggccaagtaaggtatctaccatattgaatatttggttttcttgaactcacccaagaaagctgaatattctgtgtggaaacaggttacacccaaaaaatatacttgagggtgctgtgataaatgatggtaacttttctgtttgtacctcatttacaattttcacaggtacaatggtgggagaccatacccgtttggagttccacaacattgaaacgggaatcatgactgagaaacgctacatctccgttgtcccctccagctttattggccatctgcagagcctcatgtttaatggccttctctacattgacttgtgcaaaaatggtgacattgattattgtgagctgaaggctcgttttggactgaggaacatcatcgctgaccctgtcacctttaagaccaagagcagctacctgagccttgccactcttcaggcttacacctccatgcacctcttcttccagttcaagaccacctcaccagatggcttcattctcttcaatagtggtgatggcaatgacttcattgcagtcgagcttgtcaaggggtaagtagaagggatcacgacttatgttggacacctttaatctactgaagctctacgtaaaatatggacataaaaataacttgtctattctactccctaccctccattcctgacacattctcgcatcttccttgattaaatggatccataaaattattaggtctggaaaggagagaggctcatgatttaatttaaaggtcttccactaactcaacactaacagactttttcctatgaaatgtagccctttaaaactattgaagaaaagcttatttttgcaaaagagggctatgatttgtattgcatctaattcttgagtattactaactacaaccacccaatttataccaaaagatgaaacataaatattttaaatcctaccattagcccatatatgcaagtttttagaagctgccctttcctcaagacattttactaccatgtattagaaaatagtcaaaacaaaaaaccaaaacaaaaaccaaaacagattaatggttgatgatgaatttaaaagtcacccccttatgttttgtagtgtacaacctgtgctactttgactctggagagtattagtaggtagtgttaatgaagtggactcgatgagtatggaattatagtgaagcatgatagaataaaatctgactattcttgtaacctcatatcaagatttaaattattcctgcattatgccagtttagcatgggggatttgaagcccactatgtcagttacacacatatagccattaaaccacttcggggattttccaattattgtttttttttttttttcttcctaggtatatacactacgtttttgacctcggaaacggtcccaatgtgatcaaaggcaacagtgaccgccccctgaatgacaaccagtggcacaatgtcgtcatcactcgggacaatagtaacactcatagcctgaaagtggacaccaaagtggtcactcaggttatcaatggtgccaaaaatctggatttgaaaggtaaaccttgtaaagaaatttagtttttaatagagcttttcttacaatagatagactatttccagaggcaaaccacaggttcagagtgccatgcatttttgatacatcatccatatcctgttttaacaatgttgaattatcctgtaatgcaattttttccgtttttacttagactactcatcaagaaatggttcattttctctgataacctcgggaatgtcatgctgtgggggctgagagatgacaggatgagtgtcaaagtgtgggaagggccgtaatacagaggaaggaatataggctttggaatttcagctgaatcatttaatgtctggtgtcatcagtaaactgtcttagccttgttcagcttacatttacttttctttgcaaaatgaggataataattgttagtttctgtataggtcgtgagaagttttgatggcatgtctgtatatccctcagcatattattggtaacaagcacataaaaagcactcaataaatgcttgctttgttgacaatattgttaatctttactccatctatgatgaataaatttttgagatggtatatataaaatgaatgacacataataaatattggtttcctttttttgcagggtagaaactcaggtgcttatctcatttatgctgtcccccccccccccccccagctatcttattccttatctgatgaattatctcaagtgtatcaaactagttgacatggtcaccacatcctttactcattctcttttgctaattactttcctttccaggtgatctctatatggctggtctggcccaaggcatgtacagcaacctcccaaagctcgtggcctctcgagatggctttcagggctgtctagcatcagtggacttgaatggacgcctgccagacctcatcaatgatgctcttcatcggagcggacagatcgagcgtggctgtgaaggtacaacctatttttttcttgttaagctacagccttgttgcaagcaccaagcctctttgctgcctctgccactgcctccttcctcagttgaccagtcctgtctcattctcatttgccacgtgacattgcatcaccatcagtgttctcttgtcactggtttagtatgtcaagacatgtgccacaggctccaggaatgtatgttggcagatgttttctgagtatcacatacttgccaataaaaataaaataaaataaaaaacttccctggcattgacatcaggcttctttcaatgtgtaccttggcttccagaatggctgaaacagcactggagacttttatttatactttaatacatgatgaggggaaaaccagagattttatgtagatgtcactaattaataaaatgtttcttattttggctgatagtgactgcattatttaatgcaaatctagcaggcaataggaaaacgatgtccaaatgccatgatgatggaagggaactaacatttactaagtacttactaattatcaggcattgctaggcagttctttagtgtggtatattggaacattatgggctttgatattagaaatacctggattcagctccaggtagtagctcttgttagctatgtgacatttggaaggtgatgtaacttctgtaagctatatctttcttacctataaaacagggcaataaaacttaccttgaatgtaaggagatcagaaatacacataaaatgcctggtatgtagtaggtactcgataaatggtaggcttattgtttacaaatattattttatgtcaaacatctaataatactgcatgtctacccatgcagcacaacaaaccatgctcagcctgttcctgtagatgatccactgtctcttgagatactaaatgaattttacaggtcttcctgaatccaacaattctttgcagtgtaaacaatctagttttaaccagcagatggcagaagtgaacacattcagccttccctagtagtcttgggttggctgaaaacgtgactgttacctaacttgaaaggcaaagaagttgcctgaccaaggatctatgtaattatttcctttttttctttttgagccttttggttgagccttatggtcctgtgtttgcgcaatatattgtgtttccttgtatcagttgttaatttaccacatcaaatctgttcattccacttctgtgttcaacttcatgtatcgcttctgttcttaaacagcttccatctgggttagctcatcatcgtaaagcacacatttataaaagcttcctgtcagcttatcaggctgacttggagttatggaaattgtttccctttgcctaagagttatttttgtattttgcactagtaataggaatgttcattcctataacccactccatttttcctttatccagaaatatttcttaaattgtcttggccaaatatggtgtttgtactatgtagtgtgtgtgtgtgtgtgtgtgtgtgtgtgtgtgtgtgtgtgtataaagggacaggaggttgggaatcactaagcccttaaagcagccactttgctcctagaaatgaacaatttcattcaatcagggatttttgtctccttggcttgcttttagttcttttgtgtattaaagggcaatcctggaatagacgtagcatttggaattaaattgtatatagtgtttagaagattgtagaatggcagtaattccatttatcctggaataattaatcatatgaagtcaaatcacaatataagagcacatattagaaagcgtaagatactggtcaaatgttacagaatttttattatgccatcagttcttcagatttaaaagttaacaggaatcatccattaactctatgtcagtgttttccaatagatatatgtaacacatgcaattataaatttcctagtagctacattttaaaaaggtataaagtaacaggtcaaatttattttaattttgtattttattcaatttaactaaatatacccaaaatattatttcagaatgtaatagagataaaattatcaatattttgcactttttttcacattaagcctctaaacttgagtttgtattttatacttgcagcacacctcaacccaggggctacatgcatttaaagtgctcaatacacatgtcaatggctactgtattggtagtacaggtatacagaatacaaaaattaaggtgtaaataaataaagctatagtattggattaaaaggaggtctaagctttataaaagggtactaaaatgtataatataaagggagaatgacctcacttaagagagttttaagagaagcagtaagagcatcagcaaaaagaaattacataacgagttggggaaaatgtccctatccctatctacagctctatgtgcagtttggcattactcatcacatgcattacagagagctccgaccttcctctgagtatggttgattgttcaaagccggatattgtggcttgatggctccaccatctgaatctatggtgagtcccatgagcctaatagcactgcactctattgccatggagataattacaacggttacccactgagcattatgcctaccccgctgggtgggatgaagtggagggtgagtgctgagggaagaaagtccttgttgattgtacacaaatgacttggataattagcctaagtggccaggaaaaatggcccaaaatgggttaaggcataaattactgtcattggaagtttgtaccactgtgaataagcccttgcaagagatcccaggagcattttagggttctgtgtaagatggtggggaggtaaagggagagcaaaaaacactggagacactgcaaaaaggcatcatttttattctgaatctcttgtgtagagcatgagacccccaagaaggcctttgagcattaggtagtatgaggaccacaggaaacagaacaaatttcttaatttatcatttcttttacatagaacagtaaacaagtaggggatgaggttttataactaagaactaagaccagaatctcttcaagatatgttttattctagcaaatctagaatacacagataaacatatatatatatatatacacacacacacacagatagataagtatctgtatctatctacatttaatatatgtttccatcaaagtcattgacaatgacactttaagatccctaggtagtaaatgtgttaccttccctattatatcagacccatgacagcaggtaaaataaaaggcaaaagagtccaaaattatttttatttattttattgattgagtgagtgagtgagtgagacggagtttcgctcttgttgcccaggctggagtgcagtggcgtgatctcggctcactgcaacctccacctcccagcttcaagcgaatctgctgcctcagcctcccaagtagctgggattacaggtgcccaccaccatacctggctaatttttgtgtttttagtagagatggggttttaccatgttggccaggctggtctcgacctcttgatctcaggtgatccacccacctcggcctcccaaagtggtagcaaaattatttaaaaacttgctaatttagtactcttcagctctcaagtatgagtagcaaaaaagaaaaaaatcttgaaactagtatttgattttatgtctctgatagatgcaaagtgtataatttagatattaagtgcaatttctgggcaactcctagtcaacatttagttgtaacttgatacctctcaatttaagctagggttttaaaaaaaatcatacctgatttaatatgtggctggtaaatgtatcttcctatattgaggccagctttgctgcagaggccaaggcatgatcagctagaaatgtggtttcacaattgcagatgataaacatctgaaagaaatacacgtgctttgttttgaaactggcacgaataaataaaaatgacattagtctggtgcccttttgcctgcaactatttgggtttggatatatttttaaaattaaacaaattgagctttttggtgttcccaaatcaccgtgatccaaatgtctaattccagtgccaaattcctgggtggcatttgcaagagggcacaaggggtgcactcgagtgactctttcatgctgaactcctaatgtttagaagtatttctatgggctccatctgattgcacacacgtgtctttcagtctgaccgtgcactccctgaggttggctgtgtggatgtgagaaagctcttgttgcccttgttgcccgttgcctgtgctttgtcaagtctgatgcgcccctgccctgctctgctgacttggctctgaggaggccggctctgtccctggtctgcgcgtccccctctgccctactccccaaccccatctttgctgtctctggtgaacctgtagagcatttcaattgtctgtctgagtgatggttatgcagattgcgttttcatttctgtaatgttatcctggtttattctacctcttactaacctctggttattgttttcgctttttctgttcttttgctaacaaagttgcgttgaccaaagctgacctgcaaggtagagaaggttcttgttcccattaccactttggactgaaagatgccctgtgtaacccttggtatcttttctttagagatcttcaagctgtcacacctcttggacagcagcaattgtggggaggtggctgaaccctgtgttcttctgaaagggtgacagataacccagatcaatgcatgaaaaatagctatcaagaggagacctcatgggggaagaaacatgattccattttggggggtaccaaagaggtttgacagcatcccataccgtgactatacataaacatattaatttactctggaaatgataaatacctctccaagtagttgccatggaggggttggctcctcttaatttattcaccatacatagaaaaaagaacttggaaggaaaaaaaaggccaaggccagcccttatgccttaagttattattttctggatcagggaggtcatttcctggagcaggacatttaagtacttgggctttatgaaagagaatgtcattttctcttaactagttttaaagttttaaatatttctgggcatttgggagacactaatgtcattaaaatgtttcagagatttatattttctattggggattttggttgagcactttaatttcctgttttgtgatcgcaggaaaaaagtactcttgaggaagaagatgatctgtcattttaatcctgaataccctataaaataccacatgtgagatgttagtgaatatctattgcagaaactacttcatccactattcaaagaggcatcttacaaagtcagtaatggcccactgatcctatggtgccatgctgctatgtctcagaataacaagggaggaacaagcattttaggtgtcttttggctgattgtcaagcaggagactgagcctcatgacctctgctgagtttgcagtcagtccaaattgttagaagtagttaaggcaaaggtaacgttcaaaaaattacttttcatctaaaaagatcattgactttgctgtgactttcttgttatatgccatgtagctaaccagtacaagcgcctatctatccagaatacatccaccaatgaagactctgtcactattttaccataactttgtttttctttatcgcctcttagcagattcacatatattttaatatatatttaaattaaataaaagaatatacactagttaggacttaaagtcagaggaagctttacaatagctttcagtttcaaagtatagagggcccttgtggcaatactgttgttttagacattatgtttaattgtcaagaaagatccactatgtatttctctgtaaatggaagagagagagaagggggcaggactcaatctgaatgcaagacaatccaaggagattgaagctccttaggactggatttagcggattaaactagacaactacatctcttccctgactttactatcacgcagggtaagaactatatggattttgaattcccagagcttagcatattctctcacctagaaaatctggacatggcaaaataatctgaaagttctcatccaaaggaataatggtttgtagggagaagtgagtcattgatttctatgcctaaagtaaattgtttaccaaagcgtagatacagatttagggacatagtggtttggaatatattgatgtttccttttatggaagctgtctaggcatcaatatggttttaacattattactttattggcacgaactttcctccattcttgtaatgacttgacagtctctttgtttgtggcaggagctgctttttttttcgattatttggggccgtcttactctttccctgttttataggaaaagcttttagttttttgtttcctaacattggggtgtggactattactcacaagctggctttttcagctacaacctgtgagtatagatagtactaattaccatgaagtatgaagggtagtgaagatatatgacaaggaaatgaggcagttggaagcctagacaaaaatgtattcagaaggaaatataacaatgaggtgtaagaagtgacgtaatgagtctagatgagtcaacagcttaagtcctcttgttattgtgtggttggggtagtgttttattttttatttaaaaatttttaacttctccagtgaatgtgttgttgaatttaacaggaagttagtgtcagctatgcctgtgtatcagggactaggtactggggatgctaggatactgcagatgagatgcagtctctaacttcaaagaattccacagatgatcagccaataattacaatgcaaagtgaaaactcctatcctagagacatgcgtcctgccatgtgagcatgaaggaacacactggatcgtgtagggtcatggtggtcatggggagtgctcaggggatatcttctcagacagagtttgagctgagtctgaaggacaagtatgttttagatggatgaacgatggaagcacattcgagagcttggcttaattgggaatctacaagaagctcaatgtggctgaaataatgtgtgtggggggatatgatagcacatgaaatgggagtggtaggatagagacaggtaatgacagacttttcctgtaaggagttggactttatcccaaggatgctgtgaggaggacagagatttgggttggattttcattttatcaggatcactctgacactagaatggagaaaggatgatgcagacagaaactagaaacagagagcagattcaggagtgaagcagcatattccaagacagagggaagagacatgcccccagtgcctgttacttgacttggtcaaggaggtaaacaagtttccctttcacatgaaacctcaaagagcaagaaagaaagtgaactctttctcctgtttgctgcacacaccctctccactgctacactgttattctggttagtagcacatgtattttcacattatgacaaaagatatcaagaaagaagtttaccgactttcctggtttcaggccagaatctacatctctctaggtcaacacaggagacaggagctctccacggtactcctgtgatccacgggagggaggttgccttgctgagcagtgcagtctttgtatcagtgtaccttggacagaatgacagcttctacagaacattcagaagtaactttctaattcctttttgtttttaagaagggtattagtggaaaggaagagatttcctaaaagcctattcatggaagaaaggagctgcagaactataaaagaaatattaagattgacctgtttggtgtgaggcagatgacataaattatgagaaataaaagaataactcttttttgtattaggtgattaattagaatcttcctattccatctttaattataacttctcttagcaggttttatttctgatgtttaatgactttttttctagaaatgtaaggtgtccctctgcccagatggtgaacacgtggtcaggggatccaggatccattggatctgggtgctaagtgctggctattttgagaaagtcaatcaatgtattgggttcagatgccttggaaatctcaagattctttaaaggcattttagaacagagttagaattagtcaaacacctttagttaggtaaaggaaattttaattccccaactgtctttactatgatgaatattgtcctccacctcattttctccgaaactgaagattgtatcacattctccattgtattttttgttataaaatatagtacttgacctactataagttcctcaaaatgctttctattgtggaaaataataagagagacataaattgcagtgaacttcccattattgttcttgtgtccttttcctccacattatacgagagaggcgtacaacacaactgtgtcagtgtggcacactaccaaaatgcatcttgtttctggactcctcatcaactgtacacccaacttaagtgggaggaggaaacctgattattgtcctttctagcagaattgctgatgatctttattgagagtctccttgatgaaggcatacactaaggacttggcaggttgtatctccattgtgactacaaccttagctgatagatactgttgtctgtttcataggtgactttataggtcttgcatatgttctttcatttaatcttcacaccatatgatgcagtagaaatacatatctcccttatacagatggggacactgaggtttagagtttaatatcaccagcccaaggtcacattactagtaagtgattaaactggattttaaagcccatgacctttcgcctattatgccgtatggtgtgagtctgggtttgcttatttccaaagcagaaagagtacatagatgaccagagagtatctgagagtgtcctccatgctgactttatggtagatggttttcatatcaacaccatttcgaaaagttctagataatatttgcacaatgttagagcaaagtattttaaattacctctttttttgttgttgttgagactgggctttgaaactccttctctctctcttttaaagtatattccactgccccagcagacccctacatcagtgcctagaaaacaaggaaaagcagacagactcctcagtttacattttctaaagaatcattgacttatgagggattgtgtatcactttgaaaagagttatttgacctttgtgacccaggcatcccatgaaaatagggtgggttgaggaagaaggcttcatgctaccagccatcctctcactcttacaaataccctacctgcagcaagtatcaactcccacctctctactgtcatggaaggtgctgtgggtaaatcactttactcttaagctgtaattattctttttagatcattgaccatcaagagcagtgctgtgctagagctggcactggcacaggaatttctaggaattttgtaagccagtttacatgaggcaacatgttatggcttgaaattggctatgaggggagtactaataaaaccaacacatgttacaaatcagttttattttccttttcctggggtgctggttgttaaacatttactagtgatatatcaccaataaaaggccactggggataaagataccatgaagccatctcagtcaaccaattcccatccatggccataaccaattttatacccaacgtattatgagagggttgaagtggttgaagagaaaagggtgttagtgaaactgctccaaatgttagattttattctttgtctttttcactgatcactctaatcatgtgacctttttaaaacctctgtttgagaagaggaagccataagcatctgaacatgcttgagaagagtggttttgatgccttgcttagctttggtaaggcataggtcctgacttcaagacaaaaagcatgatcttgggaatacagccacccttaggtctctctgacaatgagattttataataagatttaggaccctattctctggcattgccttatgttctataaaatgtgacctagagtattcgcgtctcagtggattcacttgacatttttaagtgatcattgctttcttattttaaagctaaatataagtgaatttggcttcctccagttaaaatgaatagatcttatgttgtctgtaaatgactctcttcagaaaagccaaggggactcaacactgtaaatttagaaatactctgaaagctatggaagtagctttgctgaagggtccaagacatatattcagctaagtaaataggctatccttattatcaggaataccctctgtattagttagggttctccagagaggtatcatatatatcatatataggatatatgcatcttatatataatatataaaatatatattatttagatatatacatcttatatataatatattatataaaatatatattatttatatacatatgtataaaaataggaattggctcacatgattatggaggccaagaaactccacagtccgctgtctgtatgctggagaataaaacagttggattctaaagccctgggaatgggggtggcaggggcagaagtggcatgatagtgtaagttctgctctgattcgaaaagcccaagaaccaggagcacaagtgtccaatgtctgagggctagagaatatggctatctcacctcaagcaaagaaagcgaattcctccttcctctgcctttttcttctattcagaataggaccacaacagattggatgatgcctactcacactggggaccatctgctttattctcttcaccagttaaaatgctaatctcatttgtaaataccctcaaagacatacctggaaataatatttcattattattatatataatgaccaggtatctgggcatcccttacctcagtcattttgacacataaaattaaccatcacattctcctgaagactctcaactctttaatttttatattttagcagtcgagactatagattgctcaggtaggcagtaagagtctttcataatccatttgcattttcaaaaatttccctgtagggtttctatagacttatttatatgagacttatataaatacacacacatatacataaatctatgtatattcatcttttttctgtacttttttccttccacccaactactgttcactcatttttttcctataaaacaatgtaaattttaaaatgtgaaagtagaaagattaggcacttaccaggggtagaaaattaaactaaagttggaagatctctttagacagttcatggcatgtattattctgttctcatgctgctaataaaaatatacccaagactgagtaatttataaagaaaaagagacttaatgtactcatagttccatgtggctgggcaggcctcacaatcatggcagaaggcaaacgaggagcaaagtcacgtcttacatggaggcaggcaagagagaacttgtgtaggggaactcccctttataaacccatcagatctcatgagacttattcactatcgtgagaacagcatgggaaagacctacccccatgattcaattacctcccaccgggcccctcccacaacatgtgggaattaagggagctacaattcaagatgagatttgggtggggacacagccaacaatatcagcaactcttataatgctccttcccatggaagctgtggtttgttgggacaggcaaaccctttggttaacacggaattctactatgataacttcacatttaggttacaccgatagagtctaagccctttgacttaagcccttcactccttgtgattaaagttagtgaatgttgatagatcagcctcacctggtccccactcctgggtcaccagccttggccctctaaaggaatggacattgagaagacaaacttgatatggcctccaggcctgtcacttctccttttctcccttaccctctgcctgctgcaccctacatttctccacccacttcttgtctggctagaaccaggtggtgctgctttagcactatttatgaatttcaaattggggtgtttgagacataggtttggttaagtcttatttgggcaataacagagggaaagtgcattctgatactagtgttgtgagctttaggaagaaagtctatttcaaggacctacaaacaataaaaaatactctatcaactttggttttctaggccatgaagaggaattgactaaatcagtgtacacgtgctgtaagggtggattagagcagtaacaggcataaaatggttgtatcagacaattcttaatgagaagaacaatcccaccatcaagaaaaatgataggaaattttggcagccatcagaattatctgataaataaaatgataagggaatgagatgcaatttcatgttttccagcaaaccaaaagcagggctggaaattagaaaccaaagtactaacaccattgacatcttattcagtctttccagacacatttctgttgtcttgtcactttctgtagtatacaaagaaagtcaccatcttttctcaaagggatatgtgactattttcgtgagagttattcacatatcaagagcaaaaataacttataccattcctatacaggaacttcctaaggcctttggatgttttaagatattaataattaataatgacaatgataaaaaaagacttcataaatatgtaattaaacaaatttgtgctgtcttagaatgtctggaattttatgttggtttggaagagtgttttatgaaaaattatgattattaagtccccagaattgtctgtcatgcttataaacgtaacatttgatacagatttctgttcataaaattggacaaaatgagatcttcctgtttaactgaattgaaatggtatttgaaagttttccttgtaaaaaacaaaaacaaatccttacatcaagacgtcatcttttcccagttgtaggtcagaaataccttaagttactcttattaatccaatgacaccacacatgcacattccccactctggcttacacacatccgtgagaggttaggtgagtgggctgcacaattagcaagcttgggtttgagacctcaccctctcacttgccacctatggattttggggaaaattatgcaacttttctgtgtctcagtttacttttctgaagtctttgccttttgattcaatcaacattttaaaaattacttaaatttgaaattatggagatctcctatgagaaaataatttgtttctctgattctttactacttttaattatatttgcttcatcatgtgcttatgaagattaattgaattaatatcttaaaagcatttagtatagtgtctggctcataataagcactaggtaagctgtgtctattgttatatcctctttctgatttgtacaagattattttatatcaatagatgtttagtgggaagcactgttgaagcttttggtttttctcccccaagacatgtttttctaatttctttgacacactgctatgtgaaatgcatacattaaatacattgacataaaataggctctgtttaggaaaggatgtacttaaacaggttgaagtaagaataggagctcacaaaatgatcatctagaaattgttctagagtctagcccagactctcattcattcaatagttattacatactgtacttgggcttgggaataccaaagagttcttgtcagcatctggtgagtctgaaatcaaaggacacacggccaattaaataccaccaccccacccaccctaagaaaaaaatgtaaataaaaacagtttcaagtaagagattacttatgtgagctcttattggtaaattctagggataaatttttacaagaaccattttgctttaaattctaaatgaatggctttatttctttattttttctttgttatttagttctttcttttattcaataatattttgaatattttgaatagaaccctcacgctataccaaatacaatatcagaaattagagatgtaaaggtgaccaagacagacaaggcttctgcccttgagaggcttacggtccagtaggatttgaaagacagtgaggaacttaatagttctgacaaaaaacggatgcactgaccagtggaacaggatagagacccccaaaataaacttatgcattatggttaactgattttttttttaacaaaggtgccacaagtatgcaatggagaaaggatggtctcttcaataaatgatattggacaaaatggatatttacacgcagaaaaataaaattgtaccctttttataccatatacaaacatcatctcaaaacatattaaagattcaaatgttagacctgaaactataaaactactagaagaaaacgtacaggaagtgctccattgcattgtttctgggcaaggatttcttggatgtgacttcaaaaccacaggcaacataaacaaatgagattgcatgaagccaaaaaggttctgcacatcaagaaaacaattaatagagtgaagaagtaacccatagattgggagaaaatatttgtgaagtgtatatctgataaggcactattatccaaaatatataagaaacacaaacaactcaaaataagaaaacaaataccccaatcaaaaaatgagcaaagaatctaactagacacttcttaaaagaagatatgcagatggccaacatatatatgaaaaaaatgctcaacatcactcatctttgggaaaatgcaaactgaaaccatgatgagatatcaccttgcacctattaaaatagctactatcaaaaagacaaaaacaacaacaacaacaagtattggcaaaggcttggagaaaagggaacacttgtgcatttttggtgggaatgtaaattaatataaccattatggaaaacagaatggaggttcctcagaaaactaaaaatagaattaccatatgattcagcaatcctgcttctgggtttcagtccaaaataattgaaggcagtacgccaaagagatatctgcattcccatgttcattgcagcattaatcacaatagctaaaaattagaagaaacctgggtgttcatcctcagatgaatggataaagaaaatgtggtatatgtacacgatgcaatacatttgctcattttttgattggggtatttgttttcttactattgagttgtttgagtttcttacatattttagataatagtcccttaacagattgttttattcagccttaaaaaaaagtgggaaggctgggtgtggtggctcatgcctgtaatcccagcactttgggaggccgaggcaggtagatcacgaggtcaagagactgagaccatcctggccaacatggtgaaaccctatctctactaaaaatacaaaaattagccaggcatggtggtgtgtgcctgtagtaccagctacttgggaggctgaggcaggagaattgcttgaacccaggatgcagaggttgcagtgagccgagatcatgccactgcactccagcctggtgacagagcaagattccatttaaaaaaaaaaaaaaaaaagaaaaaaaaagaaaaaaaggctggaaattctcttatttgcaacaacatggatgaacccggaggatattatgccaagtgaaataagccaggcacagaaagacagataccacatgatctcacttatatgtggaatctaagaaatttgaactcatagaaatagagaatagaatagtggctataggaggcggggggaggggatggatggaaaaataagagatgttgatcaatgggtacaaagtttcaattagacaagaggaataggctttggtaatctattgcatagaatggtgactacagcaaataatagcgtattttaaatttcaaatcattagaagaatagatgttaaatgtttttaccacaaaaaagtgctaagtatgtgaggtgattgatttgttaattagcctgatttaccattccgtgttgtaagcatatattaaaacataacattgtatcccataaatataaacaactattatctttcaatttaaaagaaattaatttaattacagtccacgtaattgttattagttaagtaaataggaagacatgatgaagagtaaaagttctgctaatgggggcttccttaagtaggatagtttggagaaagctcattttgagctgaaactcaaagaataaaaatgaaacagtcatttgaatctggagaaagcacagttaaggccaagggtccagcaggaagcgcaaaggaactcgaagataggggtgggcatgaagtattaaggcagtggtccaggaatatgagcaggcatctgaaccacctggagggcttgttacaactcagattcctcaattctgcccccagtcagtaggtctgggtacagccttaaagtgtttttctcataagcttccaggagatgcagatgctgctggtttaggagcaacactctgggaatcattgtgttaggaactaaaaacaggagagggctgtagcactgtgagctagggacatatggtaagaaatgagactggagaaggaggcaggggctcctaggagctcaatcttgaaaggaggttcaaggttagttccagattgttgagaagttgaaagttctattaagtccttagtgacaatactgttgttcttggatgcttacaatgtagtcagtcttccggtactatctgattctacatggcctttgccccttaatgcaagtgaagcaaattcagtggaattgataaataacctataatccccgccctgtatttggtccctgatgaacttctgacaaatggaaaagattgcatactttgcagagtgcagacatgctcctacactcaggttttggaagcatgatatagcaaatcaagggtggttacaattcagatcaccctaacatttactggaacactttctgcatcttcacaatagacttagtgccacaaggacctaaccagagaatattacctgatttctaatagcaagcagctttcaaacttttgatgataaaatagtaaaaacataaagcaattagaggattatatgaggagaagacagtgcaatgcgtaataaagtgctaaactgaatattatatgcaaaaattaatgacgcagataataattgctatggccacaacaaagcgggagaattattgtttgaagttattgactaatgtttcatttgaagaaggcattcaggctggtccttagaaaaatggttaaaatttggcagttagagggaaggcgaaagatatggaaaaggcttcgtctttagattcaatcaacattcaaagaattattgtgttttcccagagtttttgctgttttactgccttttacagtaaaactttccataaaccttccatgtgtttctgattattgagtacaattgaattactagccaattgtatggtgagagctgtttggccagggagcccctgtggacttctcagaagcttttatcctttgaaagaagctgtcctgatttaccattgttaatgaaacttgtataacacaatgcttgagtttaagacccactgagaacatgaccacatacctcctttcatctctacatgggggaaccacatggccaataggagctgcagaaagccagcagcagtactgtaaccccagtgttagtaattgttttgaactttcttatgtcatatcctcatagcattgtcttatgagtgatggcctgtcctgcttccacccttcatgaataaatacaaaatgccttgccacccagaagacgaaccctttgtagtcgtgcatctcttttgaacatgcgtctttaggaccctgtgttctttcatttcagtattcttgcttttgtgaggcttacgttagaaactgtgaaatatgctgttattgcaatggtaatatgttttaccctgtcaagtgcttttatgcattagttcctgactaatacatttggtgagtcaaagggctcatctcgtttgctgagattctctgggaaattcatggagttatactgaatattaagatatttcctgtgagctcagataatcctaaatgtatagatttatctttaatcccaaagttaaggcagaaaatgtcagtaaaagagagagaatggttgaagagaagtgccaggcggaccgaaagagtttaatggcaatctgtaagagagagatcatcaaaaaaattttaatgcccccacatgtcagtaaaagatttggagaatgccttcaaaataggtaaatttacttgtaagttatatacatgtactattattcttatatattaacatatgaaagacacacagaaatagaaataatttagaattaattaaaagaaacacaatttctaatattttctttctatagcacaaatgattctcttttgcatgctccagcgcatgcacactccatttaagagaatccatttttagcttggtgcagtggttcacacctgtaatcccagcactttgggaggctgaggtgggcagatcacgaggtcaggagatcgagacgatcttggccaacatggtgaaaccctgtctctactaaaaatacaaaaaaattagctgagtgtagtggcgtgtgcctgtaatcccaactactcgggaggctgaggcaggagaattgcttgaagctgggaggtggagattgcagtgagccaagatcgtgccactgcactccagtctagcaacagagcgagactgtctcaaaaaaaaaaaaaaaaaaaaaaaagaattcatttttagaatacctagagcagcagtgtgctgtagtgcaacggctttcaaacttcagactgcatttgaatgtcctggaagcttgtaaaaacagatgtgtgcctccctgcaaaagtttctaattcaatgggtctggggtgagctccaagcgtttgcattcctgacacattcccaggttgtggtcgtctgagaactacacattgagaaccactggtatagtccacagcatgcgttttagagttactttacctaagttggacatcagcatccttcaattaccaaatgtgtgaccttgagtaaattactgtgtcttcccgagctcagtttcttaaaatctgtaaagtggaggtaatcataattacttacctcttagagtacctggagagctcagcaagataatgtaaatacattgtttagtacccagtactcgccccctaaaaaacatcaatacatgttggctgctaaatcctccttcttctccttctcttccttctcttcatcattatcaatatcattaaacatctttttttatgtcacgaagtagatatagggactgttggtttcaggattaaaaaaacactgtgccttaatttataagaatcatgggaatgattttttttttctgagttagcattctacattaaaaaaagctataatccaaatgagatatctttctagttgaaaggtagagatgaagctattttgcaaagtcaacccgaaggagaacagtgtgttcagccctctcccttctgtgtataactgttgatagtttgtggctaagtgtgtatttccgtcatcttttgtatatactgagttcttgttgcatgagattgagttgacaattttggtggtgtgtcttcaaatgtttgggggcatgagaatggtaaattcaggtgatttccttgaatctaatttttaacatttcttctctctctcctttttctttttttcccctcttcttgtgcattactaggacccagtaccacctgccaggaagattcatgtgccaaccagggggtctgcatgcaacaatgggagggcttcacctgtgattgttctatgacctcttattctggaaaccagtgcaatgatcgtaagtacaacaacctttcatactggaactttgtgaagatgtttggagatttggagaatcttaaaggacaatatgtaaaaggatggctcttctgaaagattcataagtaattctctcctccagaaacttgggaaataaatgactagtgctcttatgagaagagtgaagagatgtgtcttgcttaacaacactaaatattctcccacttgctcactccctgtgttttttctttagattagaatagcgactgagaaacaataaccacagcagcaaaccatttcaggcaatatttttgttgtaagggcttcagttcttcatgaattaaatcaccttatcttattgaatttaactccaaattggttaataattttgagactctccccttttgcattgcctagaattttgaggctatttaaagggtatagctgttttctcaaaaagtttgagttctctgaatttcttaggccttacaaatgacaaagacattcaagagtttattttttacaattagcaaagcttaaagcgttcttgggtatctttcagatatagggtagaaattctctctgactaaatttattggtatctggtttatatacacatagctattctgtatgtatgtgtgtatatatatgtgtgtgtgtgtgtatatatatgtatgtatgtattttctattttgtgagtatattttatatgtatatattatgtatttggtttttattggaagagagtcttgtgattgttaattgtgtccactagtgatgcttctggctcgtgggtttagttctgacttcatgaaggtgcttctagcactgatggtggagacacctcaatgctgtgggcatctataacctgtgtctccacttctttctcatgttattttcttgatgtgaccatagtaaagatgagcacacacttgaaatttctgaataaccgtggcaaagagatttgttgaaaatccctgactctgtgggtcctgctaaccttctgactttctaaatgcagcctttgttttataatccagactcatttgacctcttggttttagaaaaatgatgcatgatgttatctgagaaaatagtaaagtcacattatggtgtgaccacatgggagcagacaccaattacaatgctatgccccccagatctatgtggtttttttgattctttatttctcagctttttatctgtgtgcagctgtctgttgttgttctttttcccgttttttctcagtagttttggtcccatatgctctttcattctcttaaggtacactgaggagaaacaagtggagaagttggcaatatagagagaaaattatgtaatacgcattcatctaattacataagcatatgtctctgtatctgtcatgtgaaggatacgatgtctggagaaagttttggtataagactgctcttaccaagtcttttggtattattgaaagtcatgttgccatatttatgatgtggaaatactgtttcactctgaaacaggtagttataaacccagccagccagagaacctgaggaattatactatatgctctttctttttcctccaatttgtcagtatagcactcactaggaaggcttttttctctaaatggtggcataatgcttctttatcctcacaagtttatttcttgtcgcatatacgtccctttctgggtagaaaatggtcaggaagagactctccacacagaacaggtataaaggtaagttatcgtaacgtggtgagcacgcacaattttcagaaggtaggtatgtctttttctgtctttgacaagttcctgtctgtcacccaatgccaggcattattttctggtaaaaatcaggaaggattctttctagcattctgtgactgtttctggttttatcaagagcagattgtgtctcattctgggatgtggagtatcacactgtctgacttggggaatttgttgggatataatgaagcactagaacttacattgggaaaatgtcagctttcctttgtggcaacagcttatcacagttcaaaaacatttctagtaaatctaggtttagggcaatacattttgaattttattctgtaacaatgcagctaaatcttttcattatagcagacttgggaaactgcctctctaacaggagctacttgcctagtcccccacctggagattggaccacggcttctgtgattggatagatacatagatacatgcaaatgatgaagttcacatctatttttttttttttttttttttttttgagacggagtctcattctgctattgcccgggctggagtgcagtggcacaatctcggctcactgcaacctccacctcccaggttcaagcgattctcctgcctcagcctcctgagtagctgggattacaggtgcctgccactacgctcagctaattttttgtatttttagtagagacagggtttcatcatgttggccaggctggtcttgaactcctgacctcgtgatccgccctcctcagcctcccaaagtgctgggattacagggaagtacacatcttagttgtggagtgtgataagtatatagaattgagacatataggatgtgactgtgaagtttgaatataaacttttaatgaaatccaaccaaatatagcagaatggtagattgtttaaaattattacattggacgtttctgtttccaataattggtattcaagttatctggaagaccttctgttttggaactagcagcaaagccagtttgttctacctagaaaaagcagtctcactatatcatagaccattattttctatagcagccttgacccttagagttataattggctatttcatctcacaaacatcttcaaaatgaagttacctgcatgatattctatatgcttacctttgttgataaatttttggtggcgtagcctgtatcaggactcaagtgttaaccttcatcatcaccggcagacttgaataggctcatgcttatcatcagcaaaaagtggtgggggaaattgcaaagaaagataagctcatggaggaggaagaataatgatgaaaaggaatatagagaaaatcagaaagtgggtcttatatggaagagcacagaggtcatcagcaattgctttggtaacatgcctgccacaagtggcctgcctttgacctaaataacagaaatgggtcacagcattaaaagtcgagtgccatcaaggaaacctggcttttacctaattaattcctgcaaagagagtgttctatagaatgttgcatatagctcaaacaaattgtatccatttaaatgctatcataggaccatgcaaataggttagagatgaaatttaattgtaaaaagcattttgtgggggaaaaatggttatggatatctcattttccagaagctgtttctcagggcaacagattgatcctcaattaatgaacatgaaaacacttcagtttattactacatatccaaaaactgaaacttactcaacagggaaatagctaggtcttatattttccaaaataaggtactaaatccatcatgtgtaaaaaagttaatcatatgtaggcatgacttgtaaggctctaaaaatgtctgcattttagggtattcctttttcctagcattggttcttttatgacctttgtgtttttcttgcctgtttaccaaatatgattgcctgacaatgttaatgtgctgttacatagatgttgcctctatgagtacagcgtacattttaaaacttagtctcatttagtgtgagttggccaagcctggatgttttcactttatttctttattctttgtgtgaccctggtgggttgatggaggcagtgggatgaatttcagtttcactcttataaacatagctgtgcaaagctgatattctttagagctgattgtcttgtataagagtgactcccttgtatggggttaggaaacaaaaatcctctgattggaaatccaagtgtaattgatttgctaattgtcttacatagttttagatatgaccttccacaatgttatgtaatggtaaagtcatggggagtttcttttgggttgacttttagggctgttttgattctgcaatctaatcatcccagaagaaatgttgagttaatgtagaagtcagtatgatctgtggaagaaaacataagtaacattctccaagataatcttcagttctcgtgaaacatttaaaattgagggagctggctattcagagggtgagcaccacctgaaaatcaacttaatgaaagctgtcttgggctacattttaagaacaacaaaagaaatggaaccttacaaaggttcttgataggcatattcttttttgatattgggttcttattagtattttaaatcaggactgagaacctgggaaattctagcatgttgtagccatggcagcaccaggcaaatccagaatctccttcctgtattttgtggtaatattgtcactgtcagcctgctgttgagtttttctttccttcaaacatcgaaaaatgttgtgtagaatagaaccctcctgcatgcacccacacatgtgcaaaagggttgtcatttttatggactttgtgaaaatagcagttttaaacatttcatacctatccttaacaacattgttggcttttaccatgtacatgacaactgttttgagtggcatacaatttgggggtttggttattgcttctggtgccctggagaagcacatataggacagtctttggcacatgagtccttaacacacatcaagttcctgactttatgaggtgggtgctcatcatggctttgtggggtgaagtaaagggaatgaacgtgggtcctcagcccacccttaggagctggccaccctgtgctacattgctggtcacacactgcaggatgcctgttggagaaattcctaggttcacactggcatgtggtaatagatgttctttgcttgcaacaaatcaatagcaagcagctgtggatagtgcagatagtggagtgtaaagcgtctttttcagacagttttctgcaggagtggctattaagctgcagtgttggctattgattggccttttgctttttatttattgtgtgggtttatttatttttttaatgtaggttggtgtattgattaaatctgttaaaaacacatttcccattcaagcttcagaaaatacaagcaatgtatgcattactcagtgtgcaaagaaggggacagatatgtgtatactgattctgtctcttgggtccatataggtacatagacattatgttaaaaacctatgttgttatgaacctatgttgttccagacctattggtatagcagtaatttttaaggatatcatagtatagtacatccatgtttttggttatgtgttcattccccgccattgttttcagactctacctgcccagcgaataggccatatgtaagaagttcacttgtaaaacaattgtttgttgcttagaatgcactttatcatgtattgattcattcactcaccaaacatttcttatttgcagatataatcatgaataagagagttttgttctcaaagaccttctagtctaatggggaaagacacatatgaaggtgcttcagtagaaacatgaacagtgtatagcgaggagtcataaggtggagtaatggcagctgtccccagggttgagactctatgaagagcagctgcttttaggatggttttcattgaagatgagccttgaaatttttttttttttttttttttttttttttttttgagacagaatctctctctgttgcccaggctggattgcagtggtgcgatctcagttcactgcaacctccgcctcttgggttcaagtgattctcttgcctcagtctcctgagtagctgggattacaggtgtgtgccacacaccacgtccagctaatttttgtatttttttagtagagacggggtttcaccttgttggccaggctggtctcgaattcctgaccttgtgatccgcctgcctcggcctcccaaagtgctgggattacaggtgtgagccactgcgcctggctgccttgaaaatttacaagtaggttcaaagcaaacatggtatggaagagggctggaaaggaaaggtagcgtgccagcaggcaagcagggaaaatatatgctgcagtcactgttaacattctgcatgtttccttccggtcttcattttaagcattagcatggttcagatcacattctgtttgacatttttgccctgctttgtttggtttaacactataggctatgcatttttcaagatataaaaaaaaattagatttcccaacttctttcaatagaatgcatgttatggtgcccaactcttggggagaaactcccctatgttgaaatcattgctgagtcctaaatgtaggcctcatagggctcaaatctggatttatttcattgagtcgttggtggagatcgatcttgaaaatttatttataaagaatccaatttttaaaagtttgatttgtaatgtgtataacttattaaatgataaaagaaatcaaagcatagtcattaatttaattggctctagaatcaaactgctttaaatgccagtcctgagtctttctatctgtgaagttgaattgttcacttagcttcctgaaactttggtgtaacataaggagtgtaataggtacttggtaaataggattagtggtagtttttattgtagctaattataatatttgacaactgttaagtccttatcatggtcctgacactctactaggacctttataaggatatcattcttttaatcatccccaaattcttaagaaaatattatagtacgatactcctgattttaattatgacaaaactgagatcacactgttagaatatagctgattgagggtttggtcccaggtttgtctgacataaaagttcacattcttattcgatttgctgccacttagtcattattagaaataacagtttaacatctgtactgatattagactaggatgcttaattccatgtgggcaagtcttcacagacaatcaaactgcataaaaacatagaactgggaaagggaaattgtgttcttgatgattatttgcatcatattgtggaattcagaacatttcaggtcttccttcttaacactcagatgaggccatttagaattaaaatgtctttagccattatagaattagagtatcttgcccatactccaaactatttatattttcattctctgttgacctagatcttctgatttttatgtgtttgctttatttcaattccaacatatgtcatacagcacggtggacgagaccactaatgtgtaatggggtggcctgtgttcaaatcatgactctgtcccttaatatctatgttaccttggacatgataattacagtgcttctaaagtgcagatattttgtaggtcctatcttgtaagaataaattttacaaacataaattgaataataataaattgaatgtgtagtggtgaagtttaggagatatggcacatgatggccctgccggctactcttcgatattactttcaaaaagttaaaaacatgactcatacaaatataattattataaagttaaaaacaaaacactcatgcaaatatagaatgaatgtgtgtcaaatttatttaactccataatgagagaaacaagatggtaacagtgtaaacaagatgacaaaagactatttgaagaactggatatttataggccttaagaatattaaaatacaaattttagatttaaaagtggtaaatgtcctacaaagcaaaaatctcttaacctttggtgttatcttttctatggaacatctgtgctgaacaaaaatctacaggttcagagggcatcttctgtactctgggcccccgctaacaataaatgtcagtgccagtcacaggttcttctcccatagagctaaatgtttctcgggtgggcctgttaaacagtgtccttttataacattagaaagacacatgatttttttcccctaacttttgccctatgttttggataatttttattaatttatattcagtttcatttttcttttttaccttgaatacctctttcatacacaattacgttttttaaccgcttaacagtgtgccccaatgtgctgaattcattgtcatttaaaccccacggcaaccctaaaagtagatactattgtgataccagtttcatagatgagagaactgagacagaaaagtcaagtgatttgctcaaggtgacaaaactattaggttgaggaacaaagattcagagttatgttagtctgactgcaaagtctgggctctggactgccaatatcttcttaatgcctcagggaaagtttcctgatgagaattcatctgaattcataggggtttagattcacattagccacagagcttaacgacttttgttagcatcaattatactgtaatttctagtgtctgtgttattcttttgggggggatgctattttattttattcactttaaatgagggcatttaaagtaggactgatttgctcggggaacaagatcagaatttccatcaaataagtgccattttgcaggtttggtacatctaagcagggaggaggctgagtcctgagaagtcagtgaggctgagaggggcagcatagctccatgataaccaggtcccagaaggcgagacagatgcaaaagaaacgtcaggagtggcagcaccaaaggttatttctctgcatctgtttttattctcgggcccacagatattccatggagccaaagggaagtcagaagataacaatgaaacccagggtcttctaagagcagaatgaagctagcggtactcttaggaacagttctatagatgtgggttgtagcttgttgcccatgggaatcacacttgcttttaagttccatcaatattaagaagggatgatttggagtattctcaagctttatcagggctaatattaatatgtgtgcaatactaaaccgattcagcaagagccaggactgcgtgcagctttgtttttcacaaccctccctgaaaataagctgggactcataggtgacacattggtttctacaaaccccagtagacacttggtcctatggttcaagaaaaaatagtctccataattcaaaggcatatagcttatcatggattatcataagctgttggagtttgtggcctcaataatttcatttccaccatcttccacatgctatatttgtagaccattttcattgctgtgtttaattatagcccattcatttctggtgtccttggctagttacttacttaaggtgacggcaataatccacttagagcctattgcttcacggaagacaatttttgtattaccatgttagtcacatacaggtgcaattccaacatatttttcaacatggacataatttcctatagttatttccacatctaaaggcacaagaaagatctaaattactttactttgtcttgtaaaatagaaataataaatataattttgttcttttcatttatttttctcctctactttctttttagggaaggaagagatcattttttgaaggtggtaaaatttacatccagcaaaatgcatagatcttacatgcattatcacaaatgcttatacccaagtaaccaacaccagttaagataaaggatagtttcatcttctcagaaacttttcttgttccctttccggttagttcttctctttaaggtcattgctgtttgaatttgtatcagcatttgttatttttgtctcttctggagtatatataaatggaatcatacaatatgtgatcttttaggtctgttttctccagctccatgtcagctctgcattctagccagctgagagtctcttctgagtcttagctccatctatataactgcaggagttggctggattccagctggaaccttcctgcctgctccatgatgcagaaattctctccaggcagtaagctggagcagtcttaaatctcacagtttatcttctctatttcagaaaccactgctcttctttgcctgatgtctcatgtctcatgagccattgtttcatgtgttgtcattttcccggttatatcaggtcagttgtagttccagtctttgttactccatttaggttgaaaattgatgccaacctattcttttttacctgacttcacctttgcactgtgagattagggtgaaggtagcaggagaagacataacatgtaatgggctgtgcttcaagccgcaaattctaagggttttctgaggctttacatcagtcccagagtgatctggcagtatgtaatattctacaactgttttatttattcatttattttagggaaaagccttcaactccagtgataatccctctgtagtcaaagaaccttcttggccaaagaaaacgttgcaagaagctgcgcaaagctagttaaagacttgccaatgtgtctctatcaagtatttattaatttgagtgtttctgttaggagggctacattaaatttttttttttttttttgagaaggaatcttgctctgtcacccagactggagtacagtggtgccatctcggctcactgcaacatccgcctaccaggttcaagcaattctcctgcctcagcctcctgaataactgagattacaggcaccagccaccatgcccagcttttttttttttttttttttcagtagagacggggtttcaccatgttggccaggctggtcttgaactcctgtcctgaagtgatcctcccacctctgcctcccaaagtgctgggattacaggcgtacattactttttacttccactccctctgaaaacacttgattaagctcagtgattgcaggcattgatttgacttgaaaagctagtggttcttattattttcttcacttagaattatagtttattttctcaacctacccttttcttgtggatctttgaccactgattcatgtccctttgccaagtgaaattaacaaatgttttcaaacaaagaatttggagacttcagaaaagtggagttgtttctataccttgtagtgttttggccattgactgtccttattttgatcaccaggcactggtttgcatttatgattttgctacatgcctacggaagaaatgaaggaaccttgcattattggtacctttgatttaactgagtttttttggatatggaaattataaaagctcactgctgaaaatgtggaaaacacataaaagtatgaggcagtaggaaaaaaacatgcttaatttcatcaactattaatatgaccttgtttcagaatatgcatgatgtcaggcacataacagatactcaaaatatatttgttggttgaatgactgagtcttgcatattttcagcatctgagttgtgcaaagatcttagctttcttttcatgaaaagaacactaacagttttactaggactaggtgttttcttgccagaagaaatgcttttaggcatatgggaattataataagtatcccaatatgaaatttccttcttcagataaaaaatgaaaatgtcaagatggttccatttcttttcaatcttgcccttctcctttctcaaagaaagccttgctgtttctgaacagtcattcatacatacatctatataaaagggaaatggttttacagcggatcatggttggagggaaaacaccgctataacataatatgggaaaagagcctcttggtcccagtttcttctgtggcactcacttccaaagtgatgttgtggtttatttcacaagatgagatttcttgtaacagtctagtactctagtgatcgagtgagatagtagaactttatcgtcaatcatcaaatcccacagttttatgttgaccaaaatcagtactacatgattgaagaagttggatgcattatatactgaaaatgtaaaacacaaaattcccctgatttttttcacaccctggattgcaaatttttatttccctgtaggagaattcagtcaaaccttgtaaactgtaacaactctcaggagcattggtaagaaacaatatcatctaacttcaggcattatttcctggtaaattaactacatgctctttgaaatcagccctttactaaatctaaaactgcagttttactcagatattcttatgtgagtgaaatcaaatgcatgtatgtgcatacatatgtaatataaataaatataagttttctttaggagttttcccaattcttctgagatgatttttctatccaaatacctttgtttctatgtcttaaggagttatagctttcggttgcatcttagtccattggcaagacttgtatttctgtaatttctgtaaaggtaaggtatctacttgggccacagatcaggtatctgtctgcctttgtggatgtttggcataaagcccctttattccacctaaattctcgatatttggggtatgattttatttctgtaaaaaaggatttaggcagggaggtgtcatctggattttatctgcccttaagagtaagtgttctttctcctctccctatctaaaatttccatgtgattccctcacactggcactaaagtgtgtcatctggttagagctcacatcagtgccctgctgctggtggaggttgcgggaggtgagctttagaaaagggcctgcagctcaacatacatgtcatggacacaatcgtattgtccccaactcatgaaaattcctgagaacagagcaaatcaaaaataatatgttaaaacaagaaagtttagtgaaacaaactctcggtattgttagaggctttattctaatccctacaacacagcacatgtattctcaacatctaacatatttaatttgcatttggattcctttagcatattgtcctattatataaagtttaatgaacaataaacacagctataaccaaatttcacagctatttctcagtgtggggtaagattttgcatttagttatatttggtttcctaggtaatatttgattgtggctctatttcctgaagctgcatctcttgtcacatggaatcttttggtggcggattctgccgaccgaggggaagccaggaaggagtaagttgctttgaaaccactgaagccatgatagtgaagaagacttcacagtccttgacagtctttgagctctccattgttgttctccaggcttgtatttctgaaatctactgtatgtactagttccagatcagtcttgcccaaataccatttttatcctgtcattcctctgctcgtgaaccttcaatgacctcttctcaatgtagtccaaaccctacacttggctttcaaggtcttccagaatctgtttttcaaaagctgtccctcgaaccacattttcttgaatattcatggctttctatattctaataaggtcaggtttctcgctgtcactagcacattctgtcgtcattatgctccatgcccttgcagctgtacttctttctccctggaaggcgctcttctctggatctatacccctttggggttcagcccaagtctcacctattttcccgagtcttctttggtcagttaaatccatactcatgccttatcccaaatcccactgcatttatattcagtgctgagagacactctggcttggcatctaaagggaattagcgtggacctgagagtaaaaggtcagttcaagttctggcttcttttctttctaatttttgtggcatttgtcaattaatagaaggtgatcttactatggaagtctcacaacagtctcagctttgttaacaaagattataaataatgggggcaaagcagagtattgggcctgggaaagagtttttgtaaagcttcaggtagaaccttatgttagaaatgtaaaacctcctctaaagaaaaatgttaccaataaataaagcaagtaggattttgagtagattatcatttttgttgtgtattcaccctgtttcctagagaatcaactttcctactttgtgcttactatagtttcctctagagtaggggctaactgtgtagaagaggttgtgtgtgggtcgtagggttactgggattagactattcaaatagcacaaatattctgtgtattctgatttcaaatgtaaacatattcctgattggaaatgtgtatatgtattttttatttttagttctggggtacatgtgcaggatgtacaggtttgttacataggtaaacatatactacggtggtttgctgcactatcagcctatcacctaggtattaagcccagcatccattaggtatttttcctaatgctctccctcctctgatcctatcccctgacaggccccagtgtgtgttgttcctctccctgtgtccacgtgttctctttgttcagctcccacttatgagtgagaatatgcagtgtttggtttactgttcctgggttagtttgctgagaataatggcttccagcttcatctacgtccctgcaaaggacatgatctcattcctttttatggctgcatagtattccgtggtgtatatgtatcacattttctttatccagtctctcgttgatgggcatgtgggttgattccctgtatttgctaatgtgaatagtgctgcaatgaacatacgcatgcatgtatctttgtaatagaatgacttatagtcctttgggtatatacccagtagtgggattgctgggtcaaacggtatttctggttctagatctttgaggaattgccacaccgtcttccacaatggttacacaatttacattcccaccaacagtgtaaacgtgttcctgtttctccacaaccttgccagcatctgttgtgttttgataagtccgtataatttaattagaaacctaagtaggttttggaggacctactacctttacttaaacatcctgaattttatttatttgtttattttagaattggggtcttgctctgtcaccaagactggagtgcagtggctattcacagctgtaatcatagtgtattacagcctcaagcttctgggctcaagcgatccttctgcctcagcctcccaagtagcttgaactacaggaacccatcacagtacccagtatatcctgaatttttaaggcagcctctccaagaacattctgaggtgttctggtgtctttagtaatcttatctcctaattttggttcttgcctggaatgaagaaaattactggtctgtgaatctttggctcttgtcattgtaagacttagggaacaatgctgcaatttttgcagcctctgtaatgaccagaactttcaatacacaatcttaactttgtagatattaacttatttttaaatctgctcatttaaagccataaaatgtaatctaatttagtctttacaatgaaatatttacagtagataatttcacagtcactgctccctaattcaaaacgctttgagcctgaagctctaaggccaggccagcttgagtctgatactgatgtgctttaacatgaaacgtgagaccaggaagtggaagacccgtagccaaactctcatccttattcacagtaaatttcttgacagaagaaaccagggaactatggggtttctggtttattatctgagtggtctaatgcaggaattattgcctgccatggggagatgattgcagatcactctccggtggagtttgactgaacaagaagccacatcccaggtctcaggaataatgttattccacaccctccctgttactcaggggtgctctatgatgggctcagctgccgaacattaggggattcgaccaaaaccttaatcatggcgattttgataatcagttccaatgagcagaatcctgtgggctctgtgaaacccgtgaagctgatagtattgaaggaaatgaaatgtgataagtgtgattgcttgacatgccagaagggggttggtggagaaagaattcaaaaaagaaaatttagctatcttaaaaactggcacttctgagaataattatgtagggaatttgcactttcatactctaggtgtttctgagaacaaacacatcttaagaatttagttagaatatgtagataataaagatttaaactgattgccaagggtcctcacacaggaatgatttttcttttatagttaatttattaatttgagtaaaatgtgattcatttacttctgagcctttgcatggtgttcatataaatagtgttgataatttctttctttctttttttttagactgtatctcactttatcatgcagtggcttgatctcggctcactgcaaactccacctcctgggctcaagtgatcctctcacctcagcctcccgagtagctgggactacaggcacatgccaccatgtccagctactttggcatttttggtagagatgagtttcaccatattgcccaggcaggtctcaaactcttggatgcaagtgatgtgcctgccttggcctcccaaagtgctgggattacaggtgtgagctactccacccagccaatagtgtttgtaatttctgatgacaaatatttcatgctaaataagtagccgaccaggaatgaacaagtaattaccaacagtggggcacactgttgtttgatggtatatgttttcctaacatgaacaaactcccttacaacttcaacatctgtgccttaactaaaatctggacatgctgcattgagagagcatctcttggaagtctcctttagtgaaggatgcttttttcctaatgttttaaattcctggagtcagaccttgattctacaatcattcttcagtgatgtttcttcttttaaggtcacgtattttttatatgctgtcgccccgtcctcatcattagcatttattgaccttcaggatgtaaaaaatactctgagttcttcccttgtagccttcttctcactccatcctttgcattgtccttggtgacttaagttttcatgttgtattttttcctaataacctgatttcctcaaatacctggccacgtagcaaagggagtttctattgctggtactgcttcctaagttttcagttctcccataccttaaacctcctgacactactttctgtgtcaataatctcaaatgtttcactagcctccatgtggcagttggagtttctagtctagaatacaaatggtattcccactaatacgcaggagctcttgcctcatgacttgatacactatccaaattccaaagacattcccttgctcggtttcttggcccctgccttacagctagaaaaagtcatgtacttggcaattacttcctgtaaatccatatcctcttaccttagcaatgccctcagtatgttcttttttgtggccatctaagctttgtccctaaattgtgaccattttcttttctactcaataatatctcattttctacgttggtagttagtacttactcagtagaagttatctgatgagagtctttcttcatatttctttgtgtcaaaatgcatttttatgtttaaacatctcaaacctccctggcaattaagacattttgggacttttctccaaacataacattccatttaagtctgggactcactttcataaacccatgcacctgtgggaaaactctcttccccaacgtgccctaaactttattgatttgggcttaccttccttaccttgttcatctagatatgttcaatgggccttgtactgaatatttgtgtggtgtttacatgtttatacatgtttacctgtgtgtgactttttttttctaatttgaaccaggactatgtgattattttacttgtacatttcttagaacagtgtcggtcctcaaaaaaaacgagtgggtttcttactctctttcctttctttcactaaatatttcatcattgtagcactgatcttacacatatttgttaatttttctggctcattgtcaactgtgagttctacagggtaggtacaatgcctcgtttatttttatattcccggtctctgtatcaaacctacataggatttgcaggaaatgagccactgggagtttttgagcaagtgtgtgatatgcccaaagatatgccttagaaagattcctcctggcagagtgtgagaagcaggttgagagaaaatagtaagctttgttgagagaagattgtaagcctttctgagagcagacaacacgtggctgcataaacagaccctagtgcaatgtctgatatatagtgcagattcaatgaatattttggggaagaatgagcaaaatcaagaaagctattaggaggctcttgaaaataggtgtggtaaatggcaaaaaacaaacaaacaaacaaacaaacaaaaaccccaaaagcatgaactaaagtgtcagtactggtaattttagggttagcctcaactttaaaaatagaatataagctgctacatacacatgggcacagccaattatagtagtcaaagtatagtagtcaaagaactggtgaaatggcaaacatttaagaaatttactccatttttaactttataagatttgattattattcctttatagccttagctttttttttgtttttacaattaaagatgtttttaagttaaaataatccacttatattagagcctctttttctattatccagacagcacatattattctatccattaaaaaatgtgaccattaaaaatggctagaatagcttaataatataatatcatatttattctatgatttccagtggaatgaactgttatggtctccctgattgattataattttaataaacttggttgtgtgtggctaggaacaagttcattccaagttcattttttccctgatgtagataaaattccatcagctaagttctgctactgtgccccatctccagacttctagctaaatgaagtactacagggctctgattcttgctcaaactcactactgctaaactgaaatgcttgaggtattcaaaactgttattttctgcgtcaatttgatatatgtgcagcatttcttttttaaaaggacatgttctgaatgtttagagtgtgtagataaccactcccaccccccaacacactcacgtaacagaagaaactttggatacttttattgtgtaaacttacagaatttgtgtcaaagaagttcatgtggcaaagacatcaggtgtatcaaatattttggtggttttgtttaaattcagagtgagaattaaccaagcatctacaatacgtacacctgctctgtattctaacccttttgttcatggcatgcacattaaaacacgtagctccacttcgctgcattgttgattgcagttgatgatgagggttgtcgtttctgtcaacttttagtattgaagagaagcctcatgtgtagtgatgttagggacagttcagccatgttacatacctagaattgtctctgaaaaaaaaaagtcatgaactttttttttttaaaggcaatagaaagcaatcaaccaaccaaacaaacaaacaaaaaaaaacaaaaagtctgggcgtggtggctcacacctgcaattccagcactttgggaggccaaggcaggcagatcacacggtcaggagatcgagaccatcctggctaacacggtgaaaccccgtctctactaaaaaataaagaaaattagccaggtgtggtggtgggcatctatagtcccagctacttgggaggctgaggcagaagaatggcgtgaacccgggaggcagagcttgcagtgagccgagatcatgccactgctctccagcctggatgacagagctagactccatctcaaaaaaaaaaaaaaaaaaaaaaagcagaaaaatgtgttgattacagagttaagggggagaaacttataaatcatggttatttaccacccctgagaaggtaggtacaaggttgactactacttacctcttaatcctatgattttctggttctgtggcttagaaggtttaagctctgtcaagtggctcaagcaggacagcccaaggtgactccaattctctgtgactttgttttcccatgtgggaagtaaaccctaccgctgtgttgtaaactgtttagatatccacataagaaggggttattcggtattttgggggggcttaagataaaagctatctccatttgagaaattagaaaaccatttctacaaatcaactctgttaaaccttgtcgccccaaatcaatttaggacaaaaagcagcagcacattacttttttaaaagcccaattcaattttaaagttttgaaaaatttcaagcaaacataaaggacagaaaatgttaaacatccttgtactcaccactcttaacaagcgtcaacattttgccacatttgctgaatactataacttacttttttgctttttaaagtttttattattgaacacagacaagtactatatgttaatatgtgcaatgtacaagaataatgaaatagtcatatgtctactacccaacttaagagttatagatttattttttaaagaaaaagtataattactttgagcttgccagcgtaagtttcctcctactctctccctgcaaaaaaaatagttgtgtacaaaataaaattcctggggttgacattcagatgaccccaatgaatctgattttttttcttttctttttttctctttgctttttttttttttttttgacagagtttcgctcttttgcctaggcaggagtgaagtgatgtaatctcagcttcctgcaacctccaccccttgggttaaactgattctcctgcctcagcctcccgagtagctgggattataggcgcccaccaccacacctggctaatttttgtatttttagtagagatggggtttcaccatcttggccaggctggtcttgaactcctgacctcatgatccacccgccttggcctcccaaagtgctaggattaaagacgtgagccaccacgcctggcctgaattttttttctgttgctcttcaagttagatggtttaagtaatgatgtttgccgggaagagatttgaggacctaaccgtgagatagtcctgccctgttcaggtctcccgtgtttcctcattagaccttccagcttattactggaaaagcattcttttctccatgttttaaacacctattgagtatgaatgttttaagtgcttattaaatactggttcataactctttgtaagagttaggggagaatcatcaatatctggaacaacaccattcttcatgatattggttttgagagccacgtgggcagagaaataaattctagaaaaaaagaaatggtaatctgacatgcagacttggattataaatatggtcaaaggtgtacttaaaaacaagatattttgcttcttggttagctttactgagaatccagggatcaagtaaaatcattgccattggtactgacggttgagagtcagtgcgatgctaaaccacaggaactccttacttctatgcatgattaaatccagttgtcaggtttgggcagaagagagccctccttttcctcaagtctatagggaggtgctgtgggggagttttctcattttccagaatatacagagcaaggatcatccatcataatcagacaggggtatttcatatcatccatttccagtgagaactgtggtaaaattctgtcctttttcccatttttggctgctgtgattgaaacccgtcttataaacagaaaagggtagtttgagttattttaaaaaataagaatccttcagtctctgttgcccattttctcctctatgaataatttctgcagacaggtgaccagttcaaccatctctctcggttacaaatgcctgtggttggtccacttccttcagccttggagtaaaataaaggcttcttttgcaagatcacgaaataattcagcaaatactgtgggactataaggtattcctgtgttgtcaccttttcttttgaagaatatagagaatatgcttttcttcctctaattcaaatacatagattccttatgcttgtataatgaaagaataagggctctgatacatacatatcattgaacaactattatcagtattaggcaatttagaaaacaaaaaataagacttcagaatttatatcagctccttcaatacttcatttagctggatccatttaaatatttcattttttagcctatgttgtagtagattgcttgattggtccaaggtagtctctaaatccaattagagaaaatgaaattcaggaagcacatcactgtagattttggtacagtgacttgagtatataattgccatctctttctatgttagctcaggggtgggttttgtgccataaaccaaccatccaaccaccagtctacccacctacccacccaactaaccatcatttgggctatatctatctgcatatcatacataatatccttgcaggaattaatccagcatccatatgagtgtaactcatacctaggctgataacaaaatctgaaaggtttttcactgaaatatatcaggtgactaaagaatttcacaacccaaaagaggagggtatatcgatcctagtggaattctatttcatggattttgttctgcctttattgacacagttagacattaaagagaataagtataataacaaaatttataagaaatgcttatggaatattttctaattttagctacaatgatgggttgtttatattctgtggtttgatttttatatcaatctttatgcagctattatcattacccaaacaagtagatattattgcccctttaataacagtgaaggaaactggaatgtaagaattgaggtaactggcccacacaccacaaagcgaggaagtaggaagctggaattcacatccaggtttgtctgttagaagcccatccccttgacctttctgccatattatctttccttatgctgtggcacaaaaaaagaattgtgaccataccatcttcccagagagggattagacaaagtccagagaacgtctagatggtcaggaactctagtcatggcgatgctagttactataagaggatacttggcaaacagcattgcacccagatggtgcgcaacccacacgtctctatttacgtagaggtctcaagtgtttgtattaacaggtttggaggataataaaaggagttgttgtttgttctttctttgtacgtctgaaattaatttttagcataaatttaaaaggggagtttgtaaattcactagacactgagagactggagatccaagcaaacatttgtctgttgagtttaaaaagatctggtgtaaaagtgattgttttctattttgcccactaggtggcgctttggtctcacaggttccttttaatgggctggatttccccgcccccccacctccccccaacccacctccccccaaccccaccccatacctagatgttggtccaggaaaaaaaaaaaaaaaaaacaattcaagactgattaagaggactatgtcagttgagtttgttcagtttgggttttctctatcattatccatgttgataacaaagataattaaacttatttgaaaattttggacactcctttttcaaccttcttgcaataaactgtattcacttattttggaaaaaagcatcaataaatggaactagtgagttatcttctcagcatgtctccacaggctacacttacaacagtctttcctcctacagagcggggcaagtcataggaagtgactaaaaccatgtcatttgggtgttcatattaagcacactggctatgagatcgccccggaatgtatacacagcccaacatgtcattttcttaacaccttaacatcagtgtggacaaaaacaataaggaacaatgttttaaacatgtttacatcaaagaggactggggtcataaggaagcagttcgatgggagaataaataacattattccaaattcaataaaactgatcagtcattctacaaatgtacactgatttgactcattccattaccatgcaagaattttatttgttgactgttgtgaagacattcctgtcatcaagaaggaattttctaaaattataacctgagatagtagtaagtgatagaaaaattcactaaatggcttttccatgaaataatatttatttatacctacttctgaatacctactatgtgctgagcaggtgcagggtgatgtgaaacatatattaaatcccttaaggagcctacagacaaagattaagagatggctgaaagatagtgtatccaaggtcacgttggcacagattactgaagtgagtggggtggcctggaagaacattaagtggacatttaagatggaacagctaataagacaaaggtaaaatgagtctagaagaatgactagactgagaagagaggaaaggaaagaggcagaaatagtagaatgtagaaaagctttaggcccatggtgattatggagaattgcagaagtccagtaatctagagcataataatgcatatgtggaaagagtgggaaattggggccataggtagaagccagaatcagggactttgagtactaaattgagcatgatctattttctagaaggtataggagagactttgaagaaggctgtcacttgctccccacgtaaccctctaagaaggcatgccattcacttccactttccagaagacacaggtgtgtttccccagaagaccatctggatccagaatctgtgcagactgaccatctatcatggtctttccttgtgggaattttaagtcttgactttccttctggagctttccatgcgaccgaggaagtgattatacaatagcagatgagatccttggtataattaaggattgcttgtcactttcaacatttccccccatcaaaccgtggacagagaggccttggaagggtttagttctgctaccatactcatttaaccctgctaagcatattttcttcagcattttgcaagcagaaatttatagtaatgttttttgacactaactctgagtcctgcattctctgcctgacttgctgtatttgaaggtggtagcgaaacacatggtgtatgtgtatgtatgaagtaggaggcatggtggtacagatttagctatgggacttttcagctttgcctgtatgaaattcatttactaagtatatgtaagtgaaattccagcaattcagaaagggttctggaattgcttaaagcccatcactgcttgtgaattcttcccacattaaaatgttatcttacagaaggtcaaaatgtctttcctgcatgaatataataatgacttacaccttagactgtaaccattgtgaatttattctatgtgtatctatctctggttttctttgttggagtggcaagatttaaagcaggccaattttatgcctcattctatgtgcaccaaaactacttacatgatattggttttcagtgcctgctacaacaaaaacaatatcccagtaacagcccactttactttctgtgggtagacaatgccctcacaggggttattaacttctcccagagaagcttttgtctttgcaatcctgaatgcatttctcttcatattagattttaccagtcaccttgttgattatgaaatgctaagtcagggtctttattagactgactttgctttccctttaataattcaggtaattattatatttacagaatttgcctattttttgaaatcaacactttgttaatcaccagacccatgacaatctataagtagccactttacgtggcttatagatctaaagtgaatgttggttttcacacattcattcataactattatttttactgatatattaggcaaaatataagattcatttatgagtttgttcatcagctagttataaaattcctgttgcatggtaagtgctgtctgtattgggcaacagagataaaatgggaaacaaaacaaaaatcttccctactgtcatggggtttacaacacctggacttctcaaaggacactgaatcaaaggttcttctctaagactttgtatgaagtcttagtcagaatcaaagatggttggcaccatcattcactaaagtggcctgagaagtaaaaaacctctgtatggcaaggagcagtgggacctctctttttttaaacttttattttaggttcaggggtacatgtgcaggtttcttacttaggtaaattgcgtgtcacagggatttggcatacagattattttgttagccagataataaacatagtacccaatagcttttcaatcctcaccctcctcccaacctccaccctcaagaaagccatagttcctgtcattcccttctttgtatctctatgtactcaatgcttagctcccattttttaagtgagaacatgcagtattgggttttcttttcttgtgttagttcacttagcataatagcctctaactccattcatgttgctgcagacatgatctcattctttttatggctgcgtagtattccatggcatatatgtatcacattttctttatccagtctactattgatgggcatttaggttgattccatgtctttgctattgtgaatagtgctgcaatgaatgtatgtgtgcatgtgtcttcatggtagaataatttatatttctttcagtatatatccaataatgggattgctggctggaatagtaattctgttttaagttctttgagaaactgccacaaccattggtggggagctagtgcagttgtttggaggtaagaaaatactctggcttgttgagtttccagagttcttgtgaaggttctttctcatttgtgtaggtggatgttccttcaatctttgaagttgctgtcccttggatggatttttgttgctttcatcttctttgatgcccttgggggcttgattgtggtataaggtaggttcagtcaactcatttaagttcgcttttccaggagtcactggggaccaggaatgagtcctggtgcatggtaatcccatgcagagttcccagccatccctctgtcagcccagcacctgtgtcttcccacatccactgtcaatgccttccctctgagatttgctcagagtgcgcctgtcttcgcaatgtccccatctcttggtgacagatgttcctcttggctgcatctagtcagccatcttgaatcaatctctggacctctacttaatatccctgagaatctccttctctgttgtcaccggtgcaccaactgccaaagacaccatttttgcagtgtttggtggggggtttgtttacctctacaattgcgtaactgaatgaccctgagcaaacggtttaacctttctataattaacaggatttcttcttacatccaagccctccctgctgctctgacccagctgtgggtgatagatcattttcaattctgcaaaccacggctgagaaagatggcagtgtgtaaggctcctctgatagattaggaatcatggaaggaagggacattggctgctagctatggctgctcagacagacaacccatgggtcttggttctctctagtggatctctacagggcttccttaaagtcagaggctggctttgccttaagattcttgagcatgagtagaactcccaacccaaagtaaagagagcaaaatccagagaaggacttttctccattctaaggcccgcctcccaagtccttaatttctgttttaaggtctggctcatctcaagaagaatgacacttgaaattatgacacagaaagaccctgtcttctacccaaaggggtgtggcattgtctggtgatgtgggctgcttaagcacgtttaaacacagtagtccaacaccagtaaatgataccctacagcagggagatgtttccttatggttctgttgaattctctggcagaatgtgaattctatccaacctcaagatttgttgcttatctagtacgattggctgccttgtccacaacatcctaaaggccctctgctcttttctcttaaagggcactctaaagtgccttcccagtgtgtaggaacaggactgaaagggccgtttttcttggctgctggtgactttccaaagcaagtgtctttcccttctcaccttgtccatggccccttgtgccctttatttgctctttctgcctgatgtagcagccacaagctgagagggctttctgtgaagtggcaggacctgacataagcagctttgtgcagtgggaaggaaatgtttatgttattatacacctgggacctctaagtccacaaggttcactttttattgtacacctgggccatccttttctacacttctggctcaatttgtttttggtttggtttagaaggttttcttctccctaaaatctcccttaagtcttaggccctttttatgcagaaatgcctgatctccaggctcaaaaaaagcatcttgtgcaagggaaatcgttttagatttaggaaacctcttacacagtaaatttgaattttcaaggtgactgaaaacttaaattcaacaaatatttttatccacctagtttatactcaaagtgtgctagatgcaagggatagcacggtggtaacgatagacatggtcccagctctagtagagcctgtgatctggtggagaaacaggcactaaatcaatagctacaagagtgatgaatgttacaaaagaagagattccagatgctacaggtacatagagcaggaggatttaacctaatctaggggatttggggagttttcatttaactctgctgttgtctaactgaatgaccctgagcaaatgttttaacctttctataattaatagcatttcttcttactcgccaagctctccctgctccagccaaggctcctgggtctatgaactgtaacgtcaagagagaatactgtcaacaacagtaagcctgactgcagagagtaaacacaaggagaaaatggccttggaaccacagagtagactccagagtatcaggaccatttggaggagagaatggggaaaaggctcgtgggcagacagcagtaaaccctgtgatagacattccatctgtccattagtataaacctggcacttagcccagtgatcctcaaatatttgtggaatgaatgaaatgcaaagcaatgtcaatttctgtccacagctgcttgactcttaaggttagtgttgatccctttggggaatataggcgagcagatgaccccatacattggctaactatgaattgagtggatccaatgaccactgccctccttgtgcagatcgccccacggatcactggctgtgtgtgcccatctacccctttctacaagaacttttctagccctgccaagcaactggttctgttcatgatgctgtggggttaccacaaaatacgtaatagctccattcacttagaaagactcatcctagataagaattatcctgcctcatctacccctccctcatagtttttcatctcatccattccctcctcctccccatgccgttatcaactttatacattggaccccatcctgggactcatactctgctaatcctgttcttggagttagggaggttattcaagtggcttggagaggagatggggaaagtcactctagacaagaaacattcagactctacctaggactaaggtcaatcacaatactccaagcattactggagcaaattataaccgtagtcgggtcagcttgcacattctatgctatatatataatgagggagatatagttttcatggcaggttctctgttaacaatgggcaaagactttggggattgatgtctgcagggaaaggatagaaggaactgaaacttctctccacagaagcacctgaaacccagtctgtgggcctttcgtgtcagaatctagtgaaatgattttgacaccacacacggcaaatctgtgcatgtttttctgtaacaaagaactgagaaaatcaggagtccttatcaaagggaacctttgatgaccctctggtggtcaccttttatagtgaaaatgtttggtaaatagagaaaaaggggccaggcatggtggctcatgactgtaatcctcgcactttgggaggctgaggcgggaggatcacctgaggtcaggagttcaagaccagcctggctaacatggtgaaaccccatctctactaaaaatacaaaaattagctgtgcatggtggtaggcacctgaaatcccagctactcgggaggctgaggcagaacagttgcttgaacctgggagacgaaggttgtagtgagccaagatcatgccacggcactccagcctgggtgacaagagcaaaactctgtctcaaaaaaaaaaaaaaaaaaaaaaaaaaaaaaaaaaaagagagagagcaagaagagtgaaagttataaatgaaaacaataaaaaaaaatccaagaaactcaaggaacctttgatgggaaaactgggtttttctctgacctcactactttcccttaaccatcatagccctgccacttctacatgcattggaggaagtgatttctccactttctgagatcctagaggacttaatttgcatctctatgataagaattttaccattatgatctttttattctcatctgttttattgctacaggattatgggctcctctggacagtgttttattcatcttcctctctcactctcctttacagagtaggcccctaataaatatatgcagaatgaataagcaaaatcaataattaatagatagcaaatacattcatgctgacttctatgattctttttctcttttctgtcttaggtttttaaaagtagtacaataaacctattgctagtgtctcaatatttgcctccaagagaataaattgtccttttaagaaacaaaactatctttatctaaatcaaggctgaaaaagatatctaggtacttccaagttactgagcacccctgccctggctttcaggaattacagctgctgattaaacatctgtttccctgccttttctctacttattatccttctctacttattcatccttcaagactacttgaatttttatcttcttactcagtaaaggctttctctgtctaccaaagctggaaacgtttttttcttttctgatatctagcatgactcattactattcccattcattcagtacagatgatgtagggacaagcactttggagacagtaccttggttcaagtcctactgtgctactcagtgatggtcagtgaccctttgatcttgagtttcctcgtgatgttgataaactcctgtgttgggatgactggtctagagggtgagatgaggatatgcatagaagatgcctattccaacacctggtgcttattgagggctccattaaaggcaactgctcttattatttgcatatatcttatgccatgctctagattgtaaattcaagtattatgtatctttccaaataacagcatctgacttcttgctttcagtgagagagatagtcaataaataaacatattatatcatgaaagatagtgataagggctatgaagacaaataaagcagggtaaggagagaaagaaaagggccagggataatgtaattgaggaagacttctgggagaaaggtgcacttgaatagagattgaatgaagtgaggaaaagaattatgtccgtgctcgggtggaagcaatgcacttgataggtacaggaaaggaaactccaaaaggtgtagaagaattacagcatcctagtgacacagaggcccatggagtggagttttgcaaggaggaaagtaatcctcagtttcaaatgcagttgagagggctgggagggcaactgcagagaacacttcctggattgagtaagtaagagagcaagaccaatgacagtggattggtgagaacagcagacttggggatgccctgagtaatccaatgagggaaaccaagacaggactgtaaccagagagagaaatggattgaaaggggagttagactttcatctgaaagacttggttatgtgtctggtagagaaaaaaagaaaagttaaaaatttaggagagagataataactgacagcatggtcttgaagaaggcaggaactgatggtttggtcttaagaaaagaagtgataccaccacatgcagggtaaagagggaaatactggatatggataaggctagggatggcttcaaggttgctttcttttcctttcccttcccttcccttcccttcccttcccttcccttcccttcccttcccttcccttcccttcccttccctcccctcccctcccctcccctcccctcccctcccctcccctcccctcccctcccctcccctcccctcccctccccttcccttcccttctagatggatttccgctcttgttgcctaggctggagtgcaatggctcgatcttgtctcaccgcaacctccgcttcccaggttcaagcgattctcctgcctcagcctcccaagtagctgggattacaggcatgtgccaccacgcctggctatttttttttttttaatagagatggggtttctccttgttggtcaggctggtcttgaattctcaacctcaggtgatccacctgcctctgcctcccaaagtgctgggattacaggtgtgagccaccacgcctggccgacttcaaggtttctaattaaatatatggcagagtttgcagctgagactgcgggtcagggtggtgagcttgattagaggggtggaagtttaagctagaatgaataagaaaagaaacccatcaaggaacatttaaaaaacaaagtttgttctctttgatcttggggaaagtaagtcatgtactccatttagtacaaataacaacccctaaccacattgtccatattgcagggtttcctaagttcacaccaatgaaccaatctctgtttatgaaatgcgctctgcctgtgcttgcattttacacacacacacacacacacacacacacacacaccactctacatctttgccaattcataaccaatcacctcaattatggagggtgatagtcttttctttctttaattaatgagtttccagtttagatgtgtgatctttacacagtactatttaatactgtgcagtttagattcaggtaataccacagtggcagttatttctagcagcaggtgtggttggttacttttatagacatatgctcactgtgatccagggactatgttggacacttgatacctatgttatcatattgaaaatccttacaaccatactgtaagctgactgatggggaaactgaaatgtattgatattaaggaatttgctcagggtcgcctggcttgttaaggtaaactttgaggttgcaggtgcgggtctgggaccttaaacatcatcatgtcacctagctacagcaagagccagcagaacaatactcttcagcctggttttgatatggaagatgctcttcagcttcatgctggcttgaatttcctttgcagtgaagggagaggagaaagtgcattttaataagcttcaattaaattaatttcattttacttcttttgatgtatggtctcttcaaaaaatccaattctactgatgtttattaagtgcctctacttacttggagagtgccaggcacttcaggggatctatggatgagtgtgattcagccctgcttcaagagctcacaatctagtggagaggatgggagtgtgcaatttgctctaatactagattgaatgtaataagtaccatcagaagtggcccaaactgtggttttttaattctgaaatgcaaggttatgtgactaattagaaaattggcttggcagtgcctaaacaccggaagcatcacacaatagaactcttataaagggtctttatttcaaacatgattatgcatttgttcaaatctatggcatacaatgagtgaagaatgtattgatggtggtgacatcatctgccaggctgtgaaggtcaacagtgccagcccaagttgtggcatagtgttgggtgatttaaaactcaggggcaagacagtaaactcacaacaatcccagtggtggtgcatgacctgcagctgttcttggttctttgtgtgttttggcaagcaacagctgttcaagacattgaactgcaattgcacaaaaatatatgttatgtgaagttgttggtttttcttcttttattactatagggtgcttttttgaagttaacttcggaaatattgtgaactcagaataggtcaagtcctatatattccagctaaacaattgtttaatacatttttaaggagatttaaaagtagggcagtagatactgccataaaattcttttccaggtttactgcaagcttttggaagaaagaaataggagctagagaacatgagctagtacaatgtaccatgtgcaaataggaatttaataaatgcttcccaattcttttttttaaattggtctcctaggtgtgttaggttctgtaatagtcacttccaaaatacacagctgaaaaaagcattgcttttgtcttctaaggttttatatctaaatagaaaggctggggaaatggtccactgacaggtcaaaagcaagatttctagtgtcatattattgggaacacacacgaagccagaaaatccatcatttcataacttttgtagcacttcacactattctaccaccacatagatgtttgcttccatatttgtctgaacatccttgcattttctttgccacactcccctgctgcaatcagtccatgcctccctgatggattggttgcagcagcatttggtgttgcttggatgaggtgatggatgcttctctctcttcttcagctacttggagccaaaatacaaaagtgctggttaaaaggtgattaatcttccctaatggttttgtgcattgcaaacaggactgcagccaccatgtcttcattagccttaatcagggcccacattacctcagatcaggtaatcggttatttattatagaacagcaggcaaaggccttttgagcaagtgtcaactgtataaagtctatttggaaaggaaaaatagtggggttccagttgccaagcatccatagggaaggaattaaagctggagtgtatttctgggcacctctcctgctaagcactttggttgatggagggcagcgggtggctttgaggtcatcaggatggacactcagtaacagccctttgccttttttttttttttttaacttcttttttgcttccagggtgacattatctgggtctagggactgaaacagtttgggaaatgttgtcttctgaaaatggaagatggatttttagtatctttgggggtttggtgtacttcttaaaatatgagtttagaacttgctgtatgcccagtaatattcagggtactggggatacagagatgagcacaacagaccaagctccaagcttttgaagcttacattgaatggaaaagacaggtaataagcaagtaaacacatgcaatagaataaaatattagcactttctgaaaaaaagcaaagcaggtaaggaaagaaagagtggggcagggactgatcagggaagtcttccctgaggaaaaaacatttgtgttgggattaagtgaagggaggtgtattagtccattctcacactgctataaagaaatacctgggactgggtactttaaaaagaaaagaggtttaattgactcacagttctgcattgctgggaaagcctcaggaaacttacaatcatggtggaaggtgaaggggaagaaaggcatcttcttcacaaggcgacaggaaggagaagtgccgagcaaaggggaaaggccccttagaaaaccatcagatctcaagagaactcactgtcacaagaacagcatggggtaactggccccatgattcagttacctcccatcaggttcctcccacaacacatggggattagggaactacaattcaaaatgagatttggatggggatgcagccaaaccattatcaggaggggtgcccagcattgtaagaagggccttctgtgcagagggaacagccagtgcagaattcattcttcaagtggctatgttccttttatttattttatattttgcacttcctaagaatcattccatggaatcaatccattccatcccttccataaagtacaagcaaagttaaacgagctgaagtaggtgaatcactagaacggtgtctggcatatcattcatgttcaaaaaaaatgtgagctgcttcctttcaatgtgcaactcaagaaaatgacttgccatccattcttacatacagagggtggctaccatttgccactgaaacaccatattctataacttcaggccatcaatgggaagcatcttccttttgcttccctctctcctttctctctttttttcttctcacctgtgtgctgaaacacaagtgcctcaaattcaggtttttaaataaataaaattcaataaaatcaaattcaggtttttaaataaataaaataaatgtaatctgcagatcacagagtgaacagctgatgactctgtgataacatcatatcacatccacatattccataccatgatccttaaagaatacatgcacacacagaacagtgggaacagctgaattaggtattaaagtggagtataaatagaaatgggtaagttttgtgggtagctgagaatttagagcatttaggagttcagaacatcattttagtgcaggaatgttggtctttcttgctaggatctgtagagacacatgataatgatggcctttcagggcttggtaaaacattgtaatctgtataatattgtgattatctccaaagctatccttaaaatgtttggggccctaacatcagtgttcaaaatcccaaaatattattctcatcagcaaaatattgctcctacacacaaggtacctcttctccttttttcacttgctaataataatagcaagtattaatataaggtatttgttgagcaattattaaatatgtcatctctaacacaacagtccaaaaagacaggcctaagttcttctactttatagatattgagactcatagaggcataaagtcctacagtataaatgagaagctgggatggccctggatgtgactgcctgtaaagccagttcttcactcatactatttgttatttttcaaaacattcaaccattctcttccctttgagagtttatcatttttctccctaagtcctggagaatctttcttggcaatgtcctgatattctattcattattttcctaccctagttctttcttttcatagtctttatcctttcaaatctagactgctgttcttttctgttggtcctccagactccaaataccttccagtatcagctagtcttatgcactgtgattggatagttaaatactactttgacacaaggctgccatcttactgttggaactctccactgttcttatagtaatcatcaggctctgaacactggcttcccagccctgtataatctcccccactttatttatccaaacttatttcagcagcatggctgaagtcactatccatggaactcactgcgtgtgttcccccgataccttgtctcaaactgtatgccctactaaaagggcctccaccttttctttacattctaaaaggtccagatcaatttttccctctaccgtgaaatttattttcccttctcctggcatattgatctttccctgtgaacactttctgtaaacttgaaaggtctataaaatggtcctttttatatagtctttcaatagaaacattttatcttacaaaagatgccccttactgaaaatggattattttctttggcgatgggtgactgttcagctgaaactaacagaaaacacaacaaatgttgacttaaccagttagaggttgaagacattaagtaagaaaaagttgagaagtatgctcgccagggtgaggcagctgtttaacgatgccatttgggagccactctcttctatctttctgtttcatcatccttgatgtatatgctttcagcctccagtttgttgcctcttagtcacagtatagttgctgcacctccaggcaagaggaatggaacagcagaagtccaggtatgtctcatcggtcagcattggtcagaattacataacatgttacccctagctgcaagggaagctaggaaattgagttttgagcttttaagcttgtatagagaaagtaggactggaaaaatgtgctcaagaactgatcttaagtaaataagcctatagtataaggcgcagcaaagcttaatgaatagatttttatattcatataatgctccattcttttatgatgggaaagatattagagtgaagaaaatggaatactggagtcagattcaattgttactgaatattggcactgtcctcttgtagtcttgagtaagtgactgttctttctgagacagatttcctcatctaaacatttggcttaataataacactgcctcttagagttactgtgatgattaaaagaggcgatgcctgcagcctatgatgtggcacatgtcaattctttttccctcttccatttgaggccctggtaggtgtggagaaaatcctaaaaacaataaaacaaaccaacaaacaaaccagaaaaattgaatcaatgaagacaatatctgccaccagctagtcccataaactcatttcaataaggaaaaaatatcaccccagtaacggaactgcaggagtgttttagatttatttatcttgtaattgagtggaaaggaaatctctgaatgtttgtgaaggtgttgacccatggatactaaggtatgtgaaaataactcacacatctcaggtgtttaatgaggatcaataacaatttgtgggcccatcagctctacagtcctatcacctcaaatcacacacaggaaccctgcttctgaaaagtggcacttgggagagagaatggcagagtgaaatccaattagcaagatctgcaaaagaggcacatgtgccagaatcatgcgtgatcccagaaaaaaaagtatatatatatataactattataattttatatatatatatatatatatatatatatatatatatatatatatatatatatatcatagcacattcttagcctacccacctcccactaccccaaaaagcaggacaacattttccatatattctattgaagttttttttttttttaaaacttgttggcacagaagcctatatctgtagatattttaaaaactttacttatatctatttgaaatgtgttaaaaagccatatattctttttttttcttttgataaaaggaaaagcaacaccctaccagatgttgggaggaatagtaagcaagtgattcaatcagatttctcctatggggacatagactctctcggtcaatgtcacagaatgaaatagtctcagattcacccagcagtgagttattccatctggttgtggcaattaggagctgaagatgacgggaagttaaatgactatctttatgaaacaaagcaaaatagaaaagggaacagctgggggactggatggcttggggatgcagaattggatctagaataaagaatctgttacttcgagttgctagttataatgccagtgcaggttaatacaaattgaaggttgctgctgtgtgctagcagttagctgtcgcttgcctgaaatatgaccataacatttacagtactgtctggattgaggtctctagaatgtaatgtcctttttacttaagggccaagccaccagattaactacatagacagggagtcattgaacttcagctctggaaaggatgttgttaccaagttcagtttgtgaattgccaggaatgttatgtgtcttttctttgcatgtgttatagtctaaaaagatgcatagcttttatcaaatccaaaggaaagaatgtgaatccaccagtccttttctaccctcttcccctcttcccccacaaaatgtgaagaacttgctttagaccttgtctttggagttgggtagtctagaacataagcttttggcttactgcttactagctgtgtggccttgggcaagttatttaatctctactagatttattttttctaatttatacaatggggatgataatattgtttatcctattccataatgttttatgaggaaaatttgaaataatatatgtaaatcgttttactgtaacatgtacgaaggatccaataaatattggctcttattattatgttgaggtatgctgaaagttagtggcagaaacaggaccagaacattgatacccaactcactactctggcctttggaaaacatggtgagcctatctctcttcttatttgtcacacccttcatgttttggcaggactcaagagctaacataaggtactgaaatcaaataattacttctaccattacagcgctaagtggtctacttctgcattttgagctctttttcagaattctttaaacatcttatctgcactgcagtctggaaagggaaatcacagagagaagggaaatcatactttggctttccaacaccctctacccaagttgcccaagacaaaactgtgagcaaggttaaacgtctgactcattagtaagaggaagtctttttaggcagttcctctgttgaatagataaagtggatcaaacaaaagagatgacagattagaaactgtctggtggctaatgtactgtttactgcagtataaatgactggtgtttgggaaatgacagatgagagagaatacaaatgtggacgtaaataatttccaggtttctacagtggaggagagtcatggttggttaggatgttgacagggaagggggaagtcattggttggagtttcagggaaatgagaagagcatggagaggacttttgaattaatccattgatccacgagttaccatagcctccgtgctgcatacagaaggtaccatgaaggggtatagttcttttgctcttttctcactgcctgatccattctaaatgtaactcttgttccagaccaagtgcagaaatctttacagagagaaagcattgggatggggatgaggctatgctcagccagtctgggagatctctaggggaaaatgtcataggaaaaaatagtgataaatatgcttaaaagaaggcaaggaagaaagcaaggaaggaagaaataaagaaaaagagagagaggaagaaagagagaatgaaaagaagggggttgggagggaggaaataaaagaaaaaagaatggaaaggaagaaaggaaagagagaggaaatatggtatatcagttattctgcatgatatgtttgagttgagtttgtggtggttacttgccccagggtatcaaaagaagtctccaattaatttgtagccagtgtaaccatatagcatctatttgcttagttttcaataataataatactggttctgattaaataaagcatattgtcaaacttattatttgcaaacatattactgttgtaactggtaattgctcagatctctttcggttcctgccccgacacccaaaagtcaagagggtggaaggtgaccctttctaagactttgacatggaaattctttattctgtttcaggaatggcaaattccagtttacagatggatggaaaagatttcttccttgtgataatagaatgcaggacagtatttctcaatagccatgccaatgacattttttgactggttaattctttgaggggattgtactatgcattataggatatttaacagcatccctagcctctacacagtagctgccagtagtagcctccccaacactaattgtcacaataaaaatatctccagatgttgccaaataccccttgtagaggcccaaaaatgccccttggagagggctataattgacatttttgaccggataattctttggggcaattgtatggtgcattatggtttgtttgtttgtttgtttatttatttatttataaaacagggactcatttttttcacccaggcctgagtgcattggcatgatctcagttcactgcaacctctgcctctgaggcttaattgatcctactgtcttagcccccccaagtagctgggactacaggcatgaccactgtgcccgtctaattttttttcttctttttttttttctttctttctttctttttttttttttgtagaaacagggtttcaccatgttgctcaagctggtcttgaactcctgagctcaagcgacccacctgcctcagcctcccaaagaatagaattgcaggtgtgagccaccacgcctggcccattatagaacatttagcagcattcttagcctctacatagtagatgccagtagtagcccccccaacataattgtcacaataaaaaaatctctaaacattgccaaatgtcttttggagagggccacaattgttcccagttgagaatcacttcttcaggatagactgttgttaaaccattgattcagattcccagggaaagactggacactcagcagccgagcatcctgctgacccccagaaccctgccttgacacctgctcacaaacccctcctctccaccctcaagggcaaggtgtaatttagctgcagccttttcccaaatgcctgtagcttctacaattcaatcttttttatttgtaagtatctttgcagttttctactttcaaaagactcttagtgatttctaatacctcaaattgtacaggtacatggctttttgtctctttctctgtgtctttttttttttttttttttttttagcttttcattgtagaggttcctactttttattttttctttccatgtttattgcttttgtgtctctgtcttcctgatttcattttggtgtggaaactgtctttctctgctattatcaatatcttactacctagatctcaatttcattttatggtttagccttttggtgtttatctccccagtcgctatcatccttttaatgactatttgtgtttctgggtcttttttcgtgtggcagcttgtcttttggactgcctctctctgtttgtatctttccagctattttttatagtctcctcctacttttggagaatagcgatatgttgttatgacatttctatttgtgactgcctttttcctctattgacttcccttcccctttctgcctttcttttgaaaatggcccatctggattaagtttctatcaagatctctttctataagcaggatttttctcaggtatgtaatggaaaccttttacttctgttgaatggtaatcctaaggggaggtcagggaatggacttttcagttaactgctcagaggcaattgtttgttttactttatataatcgaacttttataaaacttagaatattaaatccagcaaggttaaatatttagccttttgttaactttgtaaaataaaaatagaacttaaatgattcattataaagcaattatcttagaaaatgaataggtaacacattattagaatcaatttgttctcaaagctatgagaaataaaatcaataatttttagagatagataaagtgttttaggtaatgtttgggaataagaaactataagagtaggatttggctatttgcaaagtacctgacttttcccttggttcctaaagaatttcgaaacaaaatgagggcactataaggttcacaaggactgaaaactatttgatcttctcatttttggaagaaagtgagaatcgtaatatacttgcgaaacagattggattccatctggtgtagccaaattaatccttctttaatgattgtttatattgtgtatccaaaatcaaactcagtatcaagagttaattacaatttataatcattttggctcaacaaaacaagagggaattgtaaacagtaaagtttattttatagtataaacatgttaaaaacatggatcttcattggaccatatgtaaattaatcaaattatctccagtttttgttgttgttgtctgtttgtttaaacgtggtgcaggaaaaagcaatggctgctgagactgcagaggtttgtgaagaagtctgttaggttttctgaacattcctcccctccgaccaaaaaaataacccaaccggactaagacaaaaaactgagaaaaccaggatggaaatttgacagaggtgtaggaactaaacaaggaaagggaatgtttctcttctctctagtgcaggataaatttcatcagttccctgtctgaacctcattaaccttaataatacactatcaaaaagtcaactctatgcaattagtatttaaaggtacttgatattttaggtgggaaatttattttctctgaaaaatcacacatgcctccaacaacttgaagcttgctaaaatttatagcaataacattgaattcaattacattcaatcaaattccaggcatcaagtcgttattaaacatttacctctatggtcattgtgctatggttgggaataagaataatactaaggcaagatcttctcctttacaaagctctcagctgattaggaatctcataaattgtcaaatgtcactgtttcagctaacaatgtttctaccataaacagaactgactcaaaggggcaaaaagtaaataaagtacatgacatgggagcatactctcacctgagccttagagaggaaactgacatctgtcaattcacttgttctgttaattccactttgatatttcttaaatatatccactcactagggctaagccacaccataactgacttctaggcattcatctttcttccacttaaattcattctccaccttgcagctatttagttagttcttctagcaatacattggttaaaactagtcaatgacttttcatttctttcaggataaaatgcagtatagtatgcagtggtaggaaattaagcactagaatttgtgtttaaatcctaatttcctctcttatctatctctttgccctggagcaagtaattttactgctctatggttcagttattttatctgtgaaacagggataataacatcacttacttcatagggttactagtaggaaaaattagttaataccagttaagatgatttgtagagaaatggcaccttcaattaatgttaactgttactattgttgccacctctagacactcatcccttcgcactgcccttttctcatttttccctggattgttttgagtttcttagaacgtgtacatgctgttccctttgtccccatcactagactgactcctacttgactttcaggacttctgactttttcttcctccaggaatcatcttctaccactcctctgcatggcaggttagatgcccctcttaaatgcagggttaacctctatcgtacatttcacaccttgtatttacttgtttgcttccctattcttccttctacaatgcatacactttgagggcagaaactcagctctgtttgtctttgcagctctgtcacctggcacagtacctggttcattctctgcagaatgaggaaacctcaagcatccactgaagggaacagtgtagcatagctcatattaccaaatatctgcatgttagaggcttatgtgtttatgagtaggcaggtgtcttcatggaactctggtatcttccagatgttcataggtatatctggaacgatgagtatctggccaagtaatatatggaatcaggaatatgtctctcctaaagagttatattttgatcaacctcactcttactgcagtgggcaagcaggtacaacctagagttttccaaaccgttcagattatgaaacctgtcgttagtaatatattggaaaactcaattatagtgccctaaagagctataataagaaacacagtttggaaaatacaagtctgagttagtaaccaagatgtctttttttcctcttgattctaggattatttcaggaggttgtgagagacacaatgaggccttcagctctgggtagactagtttcagccggagctcttaatgggcatcaaccatcacaagttgaagccattcagggatgagaattcttttagctattagaacctgtctccatataaatatttctacctttctcctccagtggtattctctgagcagaggagatgggttgcatagtggccttaaaaggcacagccccaaatttcactggttatgtggacataatatgactttaggatttcttatcacccacttcaaaaaccccagggtcacttaattaaaatgactgattcctggagcctcaacatgtgccttctaaatcagacagtctatgaatgtgagactaaagccaaagtttgtactgagttctcctgtgactcttatgctccctcatgtttaagattctaccctgagtagaggccacttcaaaaatagaaactttttaatagttctctgtttacaaggtcaattctgttaagccataaaccatcccatttggaattagtactataattatggttcttatttcttacacacacacacacacacacacacacacaggttttttggaaaaaaaacatgttaagagaagacatttaaaagtttaaagaacttagatgttttattttgtgagaagaacaattttggggcaagtcgcttaactgtctgagccccgttgtaccatctgggaaataggaaaagtggcatctgcccttgctccgcacttgggatgggagagtcaaatgagaaagactgaaagcaggtgtaaaatctaaagtactaggaaaaacaaggtgttatgatgtcttgataaacatttggtaagataggagtcttgttacacataataacatttttctgagtaatctagtttggtttatttttctgtggggtttaagagtacattttgataactgagagtttaaaacaataatttcagatgtattaaaaattgtacgtgattattagaagtgacgaaaacttctgggattatataaaattgagttttatacaacattctctttgactctaacaagagttaaatgttaggaatcattgatgtaaactattcttaaatgattccacattccaagcaaatgctctggagaacaaataggagaatcatctgtgagattaactttttactgatgccatgtggagtaagattatcgaagcatcttacatttaagaattttacctcagacttaaatagcacgttaaataaaacaggcagaactaacaaatcctgatatcaactttaatttcaactttagctcttttacacttttataaggccctttcctcttataaatgtaaacctattttttaaatggaagctaatttgttaagtccattctatcagaggtaaattgaaaaatgccagcaggcaagataaatttgacagaaaataggtaaaatcaaagttttattcatgtacagtggttaagaatgaagatattaagataaattattttaagtgaggactgtccttttaataggcctcactctatagccttgtctcatttttcattttcacaaggttcttgatgtattcttttcattatataaaacgtgccatatttggtcttttcatgaaatgtatctgatattctcctttgacagccattcacgtgaaaagaaaaggtcctatttctgtccatcacctacatgcacatattcatagaaatcatagatttttggtaaaatatgctatatacttatacagcatcttaatctcagaaacccaaagggtttagatccataactgtaccatatttcctttctgtatgttgagagatacacatggtcaaatttcctaaaacctgaatctaactcaatctaaattatatgatttccgtttctacacagtggaacaagtgtgtgtgaaataaaatcaccagcccagaggcattcacccaaataaatcttggagattttctgcaacatttcatccctctacttctatatctaagtattgctacttctagttggatgtaaaatgcatccttctcaatttatttttgtttgtgggggatggatggaactaactgttcccccactactttataaacaaatataaaatgtggatgtgtaggtattttaaatgctaacagtagaattttagtatctagttaataaccctattggttggaatttaaatcttttcaggaggaaaaattaatcatccattatatcattcatcttgatgctgtcactttcttcttgaaatcagaaaaacatcgtagtttttacatggtagtttttccttgttggaggacagttgcattttactccacactgttaaatgcattaggccatgtaagagaaatataattctgtaattattcagaactcagttggttgtttatatggtattcagcaagatacttcccccccacctccaacttcttataacacaatttcaaagcaccaatcgtcttcctcttttaaagtaacaccatgactgattgccttaaatttatatatgatcttgttctaatgtcctttctaaaaataagaaaaaaatattccacaagtaaaacgagagtatgatagatacttcaccatggtgctggtgtatgtagacttgcgtgagggggaggacatggaatggtatgttctccattcatctctagttttatttcctagatgagttatgggtgaatactgtgacaaaaacaaaacaacaactaaaatggaaaagtcccaggagtgaacagaaaccaggacttaaactgcttcatcattattttattgtattgttttcgttttgggtttttttttttttttttttttttttttttttttaaggaagttacaacaaggagcagctaaggacagataaattggtagcagattgtggtttatgataacgacagtcccgaaggaacttggctttcttggtgacgttgaagtaaattgcattactcaagatgtatactaagaaggatagataatgaggtgtatgggggaaaggcatgatgactatttttatagtattgttgactaccaaaatgaatggaagggaaggcgggaccaggtggagttccttgggttaatttcgatgtaccttataaatgacaaaatttccacccacttctcttagagggataaaaatatttgaaagtgtctgaaacaattgccgaccactatttcaattccttttcctaacttctagtacctttgatttactctgaattcctaatttcttgttaaatgggaccatatttgtttataattcacctgggttaaaaataatgttttcttctgagaagaggaaagaggaagggagtgctctagcttcttcatccagaaacagactcttatgtaaaacccccaggagattctataagatatcagggaagattcacctaaagattaggaccctttgagcctgacaaatctcctgttgaatgccttgctttcaaccaaagctgagataaaaagtgcgcgcatgtgcacacatgctcaaatacacaggcagaaagctctcagctacaagacctgcttccgtagtttacagagcacctgtagcccatttcccctgtgttttttaggcaaatctttgttatcatggtgtatgacagccacatataatctgagtaccacttcctcccttcttaattttccaccatttatgccaattagaagcaaaataaaagggatgatttctggtcacttaaaatcggggtgaagcaaggatggaggttgtcctgcaaaggcattttaattctaaagaaaaaggagattagtggcctctacccatcttagagaatagagtgtcctgacaccttcccttcctccttgctcagtattctccctctccctagtgccacattgagaggagattcactcctaaaagagtgtgtcattttaagttgactttcttggagctgagctaagagccattgccaaggccagtgggcgtaaattcagtccgcctgacgggagatgaagggttgtgggatttatgacttatttgagttctcatatatcaccctctgtgtcgctcgcttatgatggccctgccaaaagataaagaagtgtaggacgctggtacgggctgtggtgacaggccagggacaaatgtctctgttgggtaaattgatttgaatgactctagtgaaatatcaggttaggctgaaaatatgattgggtttaatgatcctgctgactttgtagactgttgggattccaaatcctggacaagttaattaaggcattctatgaagggggtgtgtatgaatatttgtaaatccatgtaattattaatgtcaataaataccaccatgtaaaaactcagacctgttctttcacataatatattgaatgtccattgaatacagggaacattacttacaatttatagagtatttatctgggaaaaactgttgagaacgttattttttctccacatcccagagtcaacaagcagagaccgaaaggcataaaaatgtggaatgaaaagatagagaagagataagcagtttattctctcctggcaaaatttagtagccttacccttaatagtggagaagaaatttttatgtgaaattggggttgttttaggccactaacccaaagatcaaatggattgctttttcaattacaaaaacacatatattgttaccttattttttgaatgtggctattcagttaaaaataatagagtttagatttctttgtaggaccaaaattttttcagcaggtttctgtttttccacttaaaattgcttccaaatttctgagtttacttctaataatgggtatgctctccttgctatttttatctctaggtaattgttgactgcttgtagttttttcttgttgggcatgaatgactggcttcatcttccaaaagtgttacaaaacaccagttatttctttgagctttagacttttcctttgcagaaaggagccttatttacatccaaatgaattcccaggagagttttccactgatgccgactggttaacagaagtacaggcgagcaggaatccctcgctacctggcctttcgttccctggttccatctggatctctgggaaaattttccatctttatttgccataaagtatgatttatttatttcaacgagtggctaagagccctggaatgccatctttaatgagtgtagggaggatggtaaattgggtttagagaagaatattgttaaatatgttcaacttttagaacccaaacaaaaacacaaccagtgtcagtgtttgagagtgctgtactcatctgtgaacgtaacagagaggaaaggtgtctccgaaagaactcttcattcttaggagaggccccagaataatcacaaaacttggaactgtatctatggaatatagaggtttccttgtcttggagtggattcttagagtaaaacatgcctatatccttctgttcttttatcaacttcaactgactgtgaatgatgtactcactgagaaaaatccatttgctcaggtctaattttaggtaatttctctttctgtatgttaatggaacccataactgttttgcctactggtttccaactgaggattaatataacagtttccactcaacaattgtattgcttttttatcccccttatttccttttctttcttcatatgagaatattgagaataagagagattaggaaatttacactgcttctgagggacaaggcagcttttggacccaattatgcatgcctctgaaacacatgttctgcaccacaccattttttctgttatgtttgagagataaaaagttgtccgtctgtctacctctccaggctaatgtctcaccacattcaatcaaacttctccttccccaggccaggattcatgcagtccctacctgtaatgtgctttttcatattcttttttattttaaatagagacagggtcttgctctgttgcccaggctagagtgcggtggtgcagtcatacttcactttaatctcaaactagactcctgggctcaagcaatcctctcatttcggccttccaagtagctaggactataggtgcatgccaccatatctggctaaatatatattttgtgtgtgtactttttgtagagacaggatcttgctaggttgcccaggctggtctcaaactactgacctcaaatgatcttcctgcctcagcctcccaaagtgctatgattataggcctgagccatcttttcattatctttcttcagatctcaaattatttgtcactcactggaagtgtacagctaatctgaagtggccttccacagttcccatctcgctcattacctggataatttcctttatagcaatgaccacattttggtattgttttggatattggttaccttgttaaatgcctgtctgtcttatctcctccaaccaaaagtaaactctctaagatcaggaatcctgcctaagtttttggcctgcatatcatcagtgtcctgcatatagcaggcccaatagttgttctaaaaattaatgtatacctgaatgaataaaagctcttagagtgacagaaatgtaaacaaatacttctaacgctaagaaaagtttgttacatgttctaacaaagatttaaccaaaatgttgtggctacaaagaaaaagatgggtgaagaagaatggacaaacactaggggaacatgagaaagttcctggaagaatattgtcatatatgaattgagactggtgcatggtacaatttcatatataaagatagtggggaaagcattcttggaaaagtctcttgttgtgaggcattacccagagttctttgtcttaaaaccaagagaattaaggagcatggacagaaagggtgaggttggagtgaaagtttaataagtgaagaaagaaagctttccaccacagagaggggtcccggaagagggttgccatttttacagttgaatgcaaaagaaactgatgagggctgggtgtctcatgtgcataaggtgtgaatttctggtagctccaccttgtcctcctaatgcgcatgtgggctcttagcttgagttactccatattgctttgttccccttactgcacatgtgttgaggtggaatttttcattgcaggcatgtctgggcaagtcacctgtttagcctttcttatctgtgtggctgtgggcatgtcctagttaggcaagtcccattttccaagttcccttatctgtgcctgcaggctgttctttcctttgagagaattcagccaaggacccaccctaactgcctgcctgaccactttcttcctttctcctctctcataatgatgtaacagtaaaaatacctgagttcaaatcctgatttttccttttaatagctgttgactttgggctatgtgcttaaaaaacattttttgcagagctttctcaatacttggcacattattgtcactgtttctccctggatcttagttttttgggttgctaagtgagcataataatccatagttcagaaatttttgtgaaataatgtatgtcaaagagcatggtttttagcaggtactttcattcatagagatagtagctgagtttaggtgacccgttaaatttgggaaaggattatttaaagtcaaggagcagatccattatgacaccataattagaatggataaccacatccgcagaaagtgcgctgcactatgagtaaatgtaattttgttcgtaaagtgctgggcctagggttaggggagataagttcttaatatgtcttaatatagccttgggttctgggatatgctaaaaaattattcaactcattagtgtctcagtatccttgtgcttaaaattattattataaaaatacctgaatgtgaacttaacctcttcttgagagtttcagtaaggaaagtgaggctcacttctttctggaacattaaacttaagcaggaaggtgccacatgaagtattatatcataatggaagcaatgtaaaaagaagagtgagtcacttcatcaacttcacaatgcaaaggtgctaccataagtcataattctaatacaaagatttatataaataatgattctgggattagccagatctcctaatgttctagggtttgtcatcatgaattgtggtatcacttagtaagtacatacttaaagagaagaataggaggggagggaatgttagaagaatagtgaacaactaaaaaaatgtgagagatagcctggagagaaaagcaaaaggacaaggcaacacaggaaaaagcaaagtggagaaacagatatgcctagcaagaggaaaccaaagttagcccggtagggtattgttgcaaaaggaaagccggccttgtcatttatctaaccaaacattccactcctcagtgatggggtagctgctctttgaaagacaagcaactgtgatggggacctgtcagtcttccttacatgcagctggttctctaaatattccaacgattcctatcattttctgtaggagtacctgcaaaactggaaggctaggctgatggctttttctccattaagcagtaaacacgttaagcaagcttgagccaggttctggaggaggtcatcttgcaaggataaaaaacattgcatttattggatgaatacttaatgcacggtttgccttatccctaccttagagatgagaaaactgaggctaagactagctaagtaatttacccatgtttgcatggcttgctgatgatggatccggatttgaattccattttgtctgactccataaatcatactcatgctagtacactgccctggcctggatgggccattttacattgtgtttttcttttatagacattaatatgtgtaataaatagaatgggagtatgtattattaaatgttaattttgaaatataagattgttttcagatggaatatccttttcattctttatgatccttaatgctgatttgaaaattagaataggaaaggtatggcaagtgtgtatttgtgatgggagtagctaacactgctcactttaacagtaaagctctgccatctgggttattgcaaattcttgtaaattggtatggcctgtcctgctgtcctggaaagggagcaactagcacaagagaaaccaatcaaaatgcagcaaaaggattttttttttttggtaagattttgcttaattatcactgcagtagaatggctagccaaagtcagaaatcttttatttctgctcagtgagcagcccaataaagcttcagaacatacagcacaaacaaatgccatttcatttttctttacttcttaaaaaaagttaatcaggaatttgttagaataatcctgtgttaaatcaagcagccagacaatgaaataggaattaaagaaaatgaaagtggtgggaattatagaaatattaaattatttcaaaaaccctaccaagtgaattggttaataagcatgtacaatttattgccctatgggtcctctttttacaggcatctttatggttcatcagtttgctcccatctacaccacctgcctataattcttgacaaaagtctgttttagatactgaaagtatccactagatttgagaacaaagcaaccctgtagcgtgagcccagagtccagaaggatgtgggtggaggcggatcaggatccaagattttagcaaaagatggcttgcttaagtgaagcagtttgcactctgcctctttattcagttaggcctggtgtcccttccagcaagaaaagcaactggaggtcctgaaattgcacactcacccaatttccccaaattctttacttctgaggactattgaatcacagagatacagcagtagacttcatgaagttcatctagcacctaggatcttgggatctatggcccgggacagctcctgctgtacaggtcttgggtaggctgccatcctctaggtggtggcggcagtgtggcttgtggttctttttgagtgtacactggctgccttacttgcgagaatctagttctatcaagtgtcagttaaaggccgtttttgtctctgattgcataacagggtatgtttgagagagacatcgctgagagaaattcaaagctaccatgtgaagatcctttcctgaatatagtgtggctacctcagatcaggattctcaagcttggcagttttgacattttggactggattcttttttgatgtggggaaactacctgtgcactgaaggatgctttgcagcatctgaggatgacccactagatattagtagcacctttctcccatggtaacaaacaaaaatgtctccagacatttccacatgtcttctgtagggcaaaatcccactggctaaaagccagtgatggagtttgtactctttgaaataagaccactgactttttgtcttccacctaattacgctcagtaagataaggccttcttttgaggtagactttcaacatctatctctgattctttttgagaaaacacgttgcattttaatcttttagtgaccgattgtccccaaatgtaaaatagaaagttgagggaggcagtagttatatgcacatattttttgagccagagttccctgagtttgagttaaggtgtcctgagttttgagttaaagttccctgagtttgctaccaattagctatgaaacctgggccgagttaaaagttagacctttacagtcttaagtctccctttttcatgtgtaagacaagggagaataatgattgtacctttttcataggttttgatgatggttaaatgagttgaagtagtgaaagctcatagcacaatggctggcccatgttgaatgcctaatgaatgtttgctataattactactgttgatgataatacttttgaaaacatagttgacttgttataattaagccagtgtttacatctgctttaccaaatacttcccatggtttttatctcagaaaatagactcaaaagtgaacacacacacacacacacacacacatatataccacacatatgtacaacctgcatcgtctaataagctcagtggttccatatactatatctttggccaaatccggggctttctgattagcacctctagttttttttttttttttcttcccactcctgctataaccattctcagcattttcttccagttttttccttctagaactactgccaggtgaactacaaattattttcttgatttgcagcccatgcaccaatgagaaaatgcctatggtgtcttttgattttatggttcattgcttaggccttgtcataaaaaccatggcgtctcttaaaagaaaatataaaacaaaaacaactttctcttggccagagtttatcaaacctatgcccataatggcatagaaatataggaaatgagacaatcctactcccccaatccccgttttctgtttatttgtttgattcctgccaaagcaaagtgaccttgagggggcaccggctcagtgtttgctttttctggcgctacccacacccctccttcttcatctcctactgctccccattcagctcctcaacaatcggcaatcactctgcccttctgctccaaatttatgaccgggagcaagccataaacagagaaggccaatcctgatcctaggcactgcaccttcctgtttgccagaggtatgacagcttgatgggactgtaaagaataagcctgcatccccacaagccgcatgaatcatgtcctaggataatgactagcaaaggctgctgcagagactgcaggtgactcagagccctgaggcagggctttccctaaaccacctagaacaaagggttcccatggatgttctctctgtggcgtcatctcacaaatgagaagacctcacccactctctgatctataaaagcagcctttttattctgtgatccatgtgaaatggcaaagatcactccagcttattgatgctcagagaattatgaaggtgccacctgaatgatactcctataggaaatatttggtgaacaagataacgttttttcatggatactatttgcctcctccagttgccgcttggtgtgtatattattcgccagtgattgataatgcctcgggaccacctagtgatcttgttcagtttctaatttagttgatctgaggtggggcctgagaatttgcatattttaaaaactcccaagtgatgctgatgcaaaacagctagaagagaataataattcaaataaatgttcctggtgtaaaggaaagataaatatttcaggtgatggatatcctaattaccctgatgtgattgtatgaatgtatcaaattattccaggtaccctgaaaatatgtatatctaatgggtaccaaaaacaataaataaataataaaaatctgctttcaccaactgatctaggtttaagcaatggagtaacatgacaccagtataacaccttttgcatttctgaaagcttccttcccctcctctttcccctcccctcctctcctttcctttccttctagatctgacagtagtagctgcagcttatgctttagatttgagatacacagttgggatctatgatggtccctgagaaaggacaatgagtagaagaagcaaggtgcagagaggatctaacaatttttgcatggacatgagatttggagcaaggtctagaagctcatatcagcaaggagtaagtatgcttgtggcttaaagattatggtcttcaagacttgctcctggactggaaatattcccctaattttttgcctaaatgaaatgtgctacaggcctgagtatacctaaatcagcttcatttttctgtcaaatccctccctgtatgcttcttccagtgatatgtcatgcagatgtccacaggggacataggatcttgtagtgcaaaaaacatgagactttcatcagacaatcagtcttgactctcagactcactgttgattctatgacctagctcaagctacttaactctctaaggttaaatatcctcctctataaaaacctgatagtatgtactaaagagggtatttttgaaaattacatgagataaaacagcctagaatgctatctgatgcaatagtcatccagtaaattttaatatcattctactttgaaccaggttgtttatattaaatttaacagaattaagcaacatacagtagcgatttattctgtgggctctggagtctgcctgtaagggtttgagctctagctcagcgacttctttactgtgtgaacattgatatgtttactttaatctctctaggccttagttttctggattttgaggcttaaatgagttattacttgtaaaacacttaggagagtctctgctatgtaataagtgttcccaatatatagattttatttcatctagttgaatttagagagtagcaagccactcccttcccgccccacccccgaaaaaaaaaaaaaacacaccaccaccaacaacccacttttagtgtggcaccatatctaagaaggtattctccaagacttctttatgtgaagtagttcagccttggcagagttaaaagttttcagttataatcttgacaaaaattaattgggatgtatcatcaatctagacaatagctaaaattataaagcttctaggagaaaacatgggaaaatatctttgaaagtgtgaaataggcaacaatattttagaatacaaaagcactaagtatataaaagaaagtatcaatagattcaacttaatgaaaacaaaaattcagctcatcaaaatatatacctaagaaaattaaagggtaaattttaaaatttttgttccccagacatagactgggagaaaatattttcaggatatatatctaaaaaaggacctgtattcacaacatatgaggatctcctgcaaatcaaaaataaacacaaacaataaaaataggcactttataaaaaagatacgtgaatggtcaatagtcccatgcaaagatattccacatctttagtaatcaagaaattgtatattaaaatcacagtgatgtatcattttataccaactaaaatagttaaaatttaaaagacggacaacaccaaatattggtgagcattagaactactgaaattgtcatactttgcacatgggaatgtaagatgataaaaccactttggaaaaattgcagtttttaatatagttaaacataaatctaaactaagacttcgtaagtttacttttacatatttatccaaaagaaatggaaacatatatacacaatgacataaaaatgttcacattagctctttaatagtctcaaaatgaaaacaagacaggtatccatcaagagtatggataaacaaaacacagtatattcctatgatggaatactaatattcaataaaaataataaactacaagtaaatgcaacaacatgtatgcatctcaaatacagtatatttttgtggagagaaagacaccaaagagtacatactatataatttcatttatatgaagttcaaaactaggcaaaattaacctgtgttattacagaaaacaatactaattgcctatgagtattggcaggaaggggcatgagagagctttgtgggatggcagaaatgctctacattctgatgggagtgttggtttcaggggtacattgatttgttaaaactcatccagttgtatataggcattccttggagatattacaagtttggctccagaccccataataaagaaaatatctcaataaattgattgacaccgattggcacacagctttatttcccagtgcatataaaagttatgttgacactattctgtagtcttttaagtgtgcaatagcattaagtctaaaaaagcaacatgcacaccttaatttaaaagtactttattgctaaaaaatgcgaatgattatctgaggcttcagtgagtctttttttttttttattttttgctggtggagggagggtcttgcttggatgttcacagctgctgactgatcagggtggtggctgctgaaggttggggtggctatggcaatttcttaaaataggccgggcgcggtggctcacgcctggaatcccagcactttgggaggccgagacgggcggatcacgaggtcaggagatcgagaccatcctggctaacacggtgaaaccccgtctctactaaaaatacaaaaattagccgggcatggtggcgcgtgcctgtagtcccagctacacaggaggctgaggcaggagaatggcgtgaacccgggaggcggagcttgcagtgagtcgagatcgcgccactgcactccagcctgggcgacagagcgaaactccgtctcaaaaaaaaaaaaaaaaaaaaaaaaaaaaaaaaaaaaaaaaaaaaaaaaaaaataataataataataataataatatgatggggtgtgctgcattgactgattcttctgtttacaaagaaagatttatctgtactatgtgatgctgtttgatagcattttacccaaagcaaaattttcaaaattggagctaatcctgttaagcccagcagctgcttcatcaactaactttatataatattctaaattatttgttgttatttctagaatgttcacagaatcttcaccaggaataaattccatctcaagaaaccactttctttgcttatcatacgaagcaactcctcattcattcatgttgtatcatgagattacagtaattcagtcacattttctcctgtacttctgttctagttctcttgctatttccaccacatctgcagttacttcctatgccaaagtcttgaaccccataaagccatctacgggggttgacatcaacttcttccaaactcccgtgaatgttgatattctgaccttctcccatgtatcatgaatgctcttaatggcatttaaaatgatgaatccttttcagaaggtttttaatttactttgcccatatccaacagaggaatcactacctatattagctatagccttacaaaatgtatttcttcaataagacttgaaaggtgaaattactcctcgatcccttcaatttgtaaaaaatacaatatatataaagcacgatgaaatgaagtgcaataagatgagatatacctatacctaaaatcatgggctccactctgtataaattgtaccacaatttaaaaatgtatatcatatatatatttaaatattataataaaactaattttgaattattcttgattctaggcagtctctctgcaggagtctcactctgtttgttagactcttttcttccaccagaatttctgtcctgcagctcaccattatctagaaaactgagaaacaggaatatcataacagtaaacaaaagtcacttagttgattacatgcatctctcaaaagcctgtaccttctgctatgattagattattccagaagcctcttctggaggaatctcttacatttgcccttcatctatgggattctgcactttcgcctttctgtttctgtgttgtcctgagatatctcatgtagaaatgaattgatggccctttatactgcggttggactcttcattcagattttttcaaagcacattataaactctaattcattaacgtcatcataaatggtaatgtcctgtgaaaaagagaggtggtggcaccaattaaaataatcttcttgtagtcacacatcaaatcaatgtcagtgcaaacacttgaaccaccagttaatgcagccccatttctttttatattgacaacagcacagtggttgaagctgaaatagaacctcagttcatacttatagaatatgccatgctgcacttaacacatggatctacagggagaaggaaacagaagtgaacatggactagatgagaatctgatggacgatatgtaccacgtgctttgaaatagccataaggatgtctgcacaagaatatccatgcattcgttcttagaatttcagggccggttgtagctcagtcattttgccattgacttaattgaaatccaaatcaatgcagacacttgctcaaggtcacatagcttgttctctcccagctcccctgactgccggcctcaagcccctgcctccacagactgtgggctacagattccccaagagatttccttattccctggattctcctaagtttgcataacagaagtacttaaatgcatcacttcatttgggtatgggattttaaataaataatatgatacaaattctctcacactgcagagagtctaataatagcttacagtaatagaatgaacactctgtgcccagaactcctttgaatattttacataacattaacttaatcttcacaatatcctatgaggggatactattgttatcctcattttattgctgtggatgctgacacatagggaggtttaaaaccctgccccacataatgcagtttgctagtgatagagccagaatcagaatgttgaaggttggttctagcagccacacagtaattgctctgacctatctcctttctacaggaaatggggtagaggagattcgtttcctctgaaaaaaaaatagctaaaacctcaatgatgaaaacctatgagtgactaatgagtatgacagctaatactaaatggacaattgtcactgtgctaagtggtttatttcatttgaattatcacaactcaacaaaaaaaagttattttcatctttctcttatacataaagaaactgaggcaggcggtgttaaaggaacatgcctttagccgcacaggtggaaaagagcatgaacccagacaggctggctccagggactgcggcaatgttgtaataaaatggcatttgttcagtccagttttaattgatgagatactaaacagagtcggcactaaagaaaatttccttggagaaacatttatgcttagctatttcagagctggaaagtccctttggtttgatataaacggccttcatttttatggagctggcatcaaactgattttagaaagaactggcctttctccaagttagccctggtcagaggaacctaacacatttctcagtttaaactagtaattctcaaggaagggcaaggtttggagagagagcagtgcaccgctaagggaggtatcagtacctggaagaggggaagcaaatacatgttctgaaaacaaaacattgctggaagacggatatcgaacttgacctaagattttcttttccatctcccctggctaagatgaacaagtttgcattgggcaagtagagtcagcatttacactggtatcttgtgcttggagtgaaaagcaaaatgaaacaaaaagaggtttctttttctaaaattgttttggttttgatttgcgtttagtcataattcttaatttatgtaatttttaacatttcataagacagcatgaggattttgtttttgaggaacatccattttaagtttgaagaaaatccatttaaatgcagttgggcagagctgccacatgcctatcccatccctgttctgatggtggccctaagacgtttcgaagagcttggattctacttatccaaaactaattctgtacatttacgggatcatcagaatcatgaaaaatgtttctagggattctaggtttttagtagagagagaaaatgatttctaggataaaattcagataagccttgagctaggaaactcatagttcatgttgttacaaagaactaaagctgatttttcagagtaccagcttctcagaggacctgagacttgcggatctcatttacagattccaaaacccctcgcagttacactggactgatttttggcttggaaagagcagtgggatacatcctgcactagcccttgtcctgatggattgagacacaaagcttggcctgagcctctgtgtcaccagtgttagagatgatctttgtttctcctgcagggagctttctcactgccaaatggcgtggggctttcctagctttaagatgaaacaaagagaatgcattctcccatagtcttgtctcatagactcccatctcatgaggaattatctcaagtaagtatcactttctaaacaggttgcaaaaatccattagacaggtaggattcacctcgcctgcccattagggatcagaggctgcctgctgagagcccatatctgcagtgttttctgggtttccttttttgcaatggctctcataccctgatgtcacttgtttggtgtgcatgattgtgcttagccaaaaagaatgtgcagtagtcacttggcctttaagtagcaggtagtgaaagacagcagggagagtgtaacgaatcttattctttcagaaaatactaagattattttatttcatgtttcactctcatcaactatttaattacattcattcattcattgatttaaaactcatcatgttgccactatttgcctgttctatgctagcactggagatctatggatgaagaagacaaacaaggatgctattctcatgtgcattacatttaattgtggataggaaattaaagcaactaaactcactgagaatcagagctaacatttgcccagcacttagtacatggcaggtgcagttttacagcttgatgtatgttaactcatttaattcttctaataagcctataaggcataagctattatctgcttttagagataagaaaatgaaggactagagactttagttaactttcctagggtcacacaggtaggaagtgacagagctgggatttgatccagggctccctggctccaaagctcttgcttttagccatgatactataatgcattgaataatgggcgatatctacctttccttgatggtcaggaagaaaggtcaaaagaaaggttgttagagctaaaatctgaaagaggagaaaagtttttcagataaagagagtgtgcgtgtgtattttgtatgtgagtattgtgcgtgttctatgtgtgctgtatgccgtgtgtgtgtgttgtgtgtgtgtgtattgtgttgggatagagcagcaacacaacagtgtccctagcggaagaagtaatgtctgtgatggtaagggaaaagagggtgaaagtgagaaaagagtgagagagaggctcggacaacttaaacaactggaaggccagcaggataatggttatggtagaggtggagagaaatatgaagttggaatgggatgggatcagggacacatcatgccaagtcttctatgccacattgggaatggaaagtcatgaaaagattttaagctggagagttacctaatttatcatagattttaaaaagattcctcttgcagctgggtcttaagaattagtggctcttcattgatgagttcatgtcctttgtagtgacatggatgaagctggaaaccatcattctcagcaaactatcgcaaggacaaaaaaccaaacaccgcatgttctcactcataggtaggaattgaacaatgaaaacacatggacacaggaaggggaacatcacacaccggggcctgttgtggggtggggggaggggagagggatagcattaggagatatatctaatgttaaatgatgagttaatgggtgcagcacaccaacatgccacatgtatacatatgtaagaaacctgcacgttatgcacatgtaccctaaaacttaaagtatataaaagaaaaaaagaattagtggctcttgcagttgttcaggcaagagatgaaggaggcttgcccttggatgaatggcaagattctgtgtgtggtatgaaagtctagagcttccttgatgaccatctcctaccccatgcatttacagctttctctccttagaaaaggatttttgacataagcaaaaacttttcacaaaaatttgtgtgaaatcttatttggggatttgctctctgtgcaaggagtcctactccagcaggtttcccagtcaaaatatgcctttgggaatgcagagaactgaaggccctggctgagcaaaccccagctggagagacagactggggattctatctgtgtatagcatgaagaatttattctaaacacttggatatagagccaatgccacttacaagctttcctttaagaatcctaggccagttgttaacagtttttaatctccttaatttctttatccatagatacctgacaggaacagtttggactgtggaaagacaataatggtccctttctgaaacagtctcctacttgctgaaggctactggaatagaagagaaaatatagtattttctgaaaatgtaaacagatgttagtttaccatttgtgagctgcagggttcagttaaagtggatgttgtatgtaaatacagtggtagcttgggagctgcagatgtctctaataagcattcccaagtgcactgtgttccattagtatgtgggattccactaccctaatcccactactgtggcttactctgggctccttctgtttctattcctgcaggacacataaagacaccttaggcgttagctgtctctatgtttccattccaccaaatcggaacttcatgactttttcaccttctctctcagtcataagaagacggctttttaaaggatgccaagacaggtggatcatggtaatagtatactccattatagcagttgttattcattgaacacctactgtttgtcaggattgggcaagtggcagtatacatcatcttatttagtctgcacagcaggtttaaagggagataatattactccgactgtacaggtgaataaatggaagttaaaataatctcggcttggtagtgatggaatcaaatgatgtaattgcctcattgtgaccagctaagggcaattctgttaggatctgtgtaacacattttaagagaaacattggcaaatgaagaaaggttagaggaaaacatctaaggtcatttaagtatacctatatacatttctctcatatgatatgacaggcttgaaaaattacacagctcattacgagcaagagagcagtatatatatattaacattctaatcttaataggaaaaactaaaggatgctgtgggaataaatggaaggatcatcatacctagccaagaaaatgataacttaggtcctggataaataaattttaagtagggaaaggtgggctggagttaggagcattctaaactcaatgaacaacatgcacatgcacttggagacagtgcaggtcaatttaggagctcacaggccatttagagtgacagaagcagagtgtgcaggtcaggcagtaataagacatgaggctggagaaatgagtaggaagcagatcaaaggccttgaaatgtcaagaactttgtaccttatgggtactgaagaagtgaaatgtttaaagaagccgaattatatgatttcttttgacttcaaaatggaaaatacatgtcgatattgggggagaaattaggaggttcttgccataatacaggtggcaaatgatggtagtcttcaggtaatggcagtaggaatgcatagaagaacacagatatgaaagattcttagtctggcagacacctggaagcaagggtgcataggaatagctaacagttaaaaaagtatttggagagctatcatgtgaaacagagagatgatttattttttctgttcatttactgagggcatagtaaggactaattggagaaagtcatagggaaacatattttaatttcaataaaatctgatgctccaaaaattgaaaacataacttaccattcatctctgaatgtatccgtgcattttttttttcattcaagttacatttttaaatgatgtgcaagttctatagactgggtaacagtgtacataacacttaacaactaactaaaatcagtgaaacacatatcaatataaacaaagagctatggaaattaatcctgtccggggttcagaggagttattaattaagatggtaaaactagctgaagggataattagagggaagagttgtgtggggtctgcaggatctacaagtggaattgcccacagaacctttagatcttatgaatctagagcttagaaaatagtcagggctggtgaagtatactggggaattttcagtgtaagcaaagaccatcaaagcaaatgtctctgaagaataagcaagtaatacaaataagtgagatggacaaggcataaggcaataagtactgggactatggaaaattggcaagcaggtgccccttccaaatggcaccactgccagtcagctccagtaaattgttgctctgtgctctcagatctccacagtttctaaataaaaacaaaacattggatatttatgtgatgcttctagttaatatgatatctcacagcatgtccttgatctaactatagcccaaaggctgtcagattgccttgtatgttataagatgattgttgaagctgtgagtaagactgaaattttctcaagcgagtagaccactggaatgtatacatgggtaatctttctcaagtgggtaaccaaatgttatttggtatgtaaacttttctatttccacatctgaggattcatgctgctataagtgatgtctgagaaagtcatgcagcacattagccagcaaggcataaaaggcaaagagagagataagaaagatgatgttaatctagagcctaatgaaaatgtgggagttcataaggagtgatcaaatacgtaaggtgataattgtggatatgtttcgatatcagaaaacattgcttttctgtgtgatagtgctttctttataattaatgtggatttagtgtgtgttatttttagccttttaatccctataaatgtgccacttcatattctacgactgaaaatggcactataaacaaaatggtttaggaaccagtgtagagagcaggagccaaagatggaatccagagtcacagcatgagggatgagtaaggaagatgactaaactggtagattttagaatgagctatagcagtatcaccaaaaccaagagtggagagaacttcaagaggaaagacacatttggaccttttaggtaactgaaaaatggcaagtccattgggtttaaaaggtaaaggcttctggtgacctctgagagggcactctaaggggagagttggcaagaatccagtttgcactgcactgggcagtgaacgggaggtcagtgagtggagtgattgccaactgctccttgggcaagtttggcaggaaagggaaggagagatgtggtgccattccaaggatgagacgaggttaaaaaaaaggctttactcattttttttctagtggagtagaatttataatatattaagactaggagtgataattgatgaagcaaggtacggaatgaggcataaaatggagagatcagagttagagcaattgataattatttttctttcagacaggttaaaaatatgaatctttggatgtaaccgagaggaaaattgagggagcttatgcctgatgcctctacattttctctaaagtaggagatgcgggaaggggtcagtagagagttgtgggctggaaaaaaaaagtttggaggagctgctgtagggaatttaacaggggtgattaaaaggattgctgaggttcaaactgaggttggaaaccattaagcagcaatgatcagtacagttgtgagcatttctccaacagtatcaggaagtccaggaacaggaaggggaaaaaagagggtctgtgttgctccaggtttttagaataacaaaccaaattcagcagaagatcaaagtgaaacagacaagcagtatgtaagtggagaaatagacaatggaacacaggcttgagaaggacataaaaggagtcaggagaagactgattttctgagagcaaagagaatccctgagatatatatatatatttttaatattagaatgagagattcttgcactgggtaggactttgacctgagtgaactttgaggttcctcctaattccaagattctttgattctagacatgagaaaacaaagctagtccctatgctgttgtcataactgtcatggtatgtgatatggtttaactctgtgtccccacccaaatctcatctcaaattgaaattcctacatgtcaagggagggacctgtagtccgcaagtgttgagggagggaggtgatcggatcatgagggcggttctctccatgctgttctcatgatagtgagttctcaggagatctgatggttttatgaacgtgtggcatttcccctgcttacacttctctctcctgctaccatgtgagaaggtccaagattgctttccattcaccttacgccgtgattgtaactttcctgaggcttccccagccatgtggatctgtgagtcaattaaacctttttcttttataaattacccagtttcaggtagtatcttcatagcagtgtgaaaatgaactaatacagtatgtaaaaatggaagtcctgtatatacctgtctctctcaggattggcctcaaggaaccttaccaagtagatgacatttctcacttgttcctctcacttgttcctctcacttcctgttgtagtatcatcttctatttattctccttatcaccagcagatcaaaacaatgagggcattgatctatcataagaaggctgccttcaggccctattctttttttttttttttttttttttttgagatggagtctcactctgtcgcccaggctggagtacagtggcaccatctcggctcactgcaagctccgcctcccgggttcatgccattctcctgcctcagcctcccaagtagctgagactacaggcgcccgccaccacacccagctaattttttgtatttttagtagagacggggtttcaccgtgttagccaggatggtctcgatctcctgacctcgtgatcccccagccttgacctcccaaagtgctgggattacaggcatgagccaccgcgcctggcctcaggccctattctaataaaacttccaggtagatgcttgttctccttctctgtgagtccaaacaaggtctctagttattgattctcatgttattgcagcttctacaaatttcaccctcaagtcagctttttggcttttctgactcaagtcacaagataaccatccttttgtttcatttttgtaaattctcataaccccaactggatggtagatgaatatgaggaagaggggaaatcaaaagaatgagagcaatgagcctattactcttgagatgaacagagggagagattcaacaccaaatgcgtccctcttctgaatcccatctctcgaatcagacagcacttctgtgtacttcccaatatccatacaaataccaggaaacttattttacttgcctctggccttggtttgcaggtttggggaaacacaggagtcaaacagaatttttttgggtgaacccacagatttcactctgaggaacagctcccttgctgttgagacagctgggtgcactaagcaacacatttgaaatatgcctcagactttgtggaaccaggtagtctgaaatcttgccaggactttagtgcctcttgggatacttctgaggtagggcaaagtcccattcaatgttctgttggaggagagaatctttagtgaaatctcaagaatgaaagccaagaagccttaagataagagcgagagattcaacagcaagtactatctgtaagaactttgatttcattgcatttaagcttcttttcctagtggactgtttttagttgaatacttcttgaggataagtgttgtgtcttctatacttatatctgcagcttagcacagttcctgccctatggtacatgttccttatatgtacatggaaattagccaaatgtcaggatgccactttttcatctccatctctattcctatgatggatgactggtaaatacttctctgactatgtatgtgtagttcaaatactctagtttttttttagcataaagtgctgtgaaatcccaccatcaaaagagccaaagtaatatgatgaaaagaatttggtttcagaattaaaaagaaagcacacatttttgagttctcgctcaaaaacaattttgtgagggtaagttatttaacttctccgtgtctcagcttcctataaaactagaattatgagatctctcttataggtttgaaataggatgaaaattcctccctctttttttttcttataacctctctcaaaaccttgcctgtgtctctatgagtgtgttgtgttacagttactgctataatttctctactagattagggtggagaagttcccatggctgttcgctctctcagaggaccctgggcaaagttggtgctcactgtgcatcactgattatatcaaatactgtgtggcatgctcaggccttgttggtctctctgtaccagtgtctatcgtgggacataataattcatgatgaacagtcaggcatctacttagtggcttatacgtagaagtggctctcctttcagaagccagaaattaataaatggtctacagtcagaaggagatccttaattgattaattaattcaataagaatttattaagtaccttctatgtgctaaacactggggagacaacagtgcataaagagatcccatctttgttcatatgaaactatattctagaggaagagacacacactaattgaatactctcacaagcaaaagtacttttgtaatggtaattcatgctacaaagctgtagaccttggtgctatctgatacagagatctgatggaatcagaaagttcaggaagagatcgtctgagagttcctggctagagataggaaggaggggcagagttaaccaggaaggggaggcaaaagtatcacagtcacagagaacagtgtgcaaagcacccatggcaagggggaatgtgataagggtgtgtagtgaatgaagccatagtgactggaatataggggacaagattgaaagtaaaacttacaaggacgaccattgcttgggagtttgggttttattagcactgcagtggaatgctgtgaaacaatgaactggcattgtagaagctggcatagcctgcttttttgaggacatccaacacccatgacaaggtctacggcatcaaggattaccttggtttgtctttgctaaccaaactgggttatacacaagttacgagttgtccttgtcccaactcacaccctcaccattggagaagaatgtggagtgcccctccccatcccggcccatcccttatgtcggtggactaacgcagcatgcctaatgccagagtgggcagaaagaataatagctgttgtttcagtttacctgtactaatttatcacaccttacccagagactccagctccactttctgagttttctctgtctggaggtgaaacacacaagcacataaataagtaggaagctgttaggaaatcctctttgtcactactgaagcatgttcatttatttagtaaaacgtccataatttttaaattgctttatttagccactggctatttggtatcttcaaggggtccccattaggagctgtacttccccattacctgcaaaaacaaggcaggcttttgatccctggaattaattacatgcaaagattttcattgcttggagcagcaagcagctggttcctacgggacccaggctgaactctcttgccaatttccctctcatgcttgtccctccctccacacctacaccctttctttctttcattatgctcaatgggttcaatctaatgagggaaattgtaattaaacatttacaaggttccagttttctctatgactgcccttaagactgtgaacattcacagttcactctttttccaaatacagcacaatggcaaagtttccaggaatgtccttactgactcaggccccccagaatggtattaatccatttgaaaacaacttcacttgagttattagagctggggcaaaagcagggagggagagatctactcgttagggatgagggagcaagagcaatgatgactagcttttgtcaggacacaaagtgcgtctctggtgcttgtgcagatcagttgacaatggtttatagcttttctaccttcctccctttcctattaattattcatacttctcctaccaagagaggggtcttgttttccttttaggtgtaattagagtaatcaaagggtttgtaacactcatgtgttttatttctcattctctattcaattttgtttttcatgcaagagaaaaatataaaacacgaaacaaaaaccccaagtctctgggtgttgtgaattcttgcagggaaaattggttttaccatattagcaattggcagcaataattctgaggtgaaaaacctgaaattactcccttaaaggcagtaatttgtatagtatgtattttgagaaagggggggaggagtaggtgataatttaggtgaatgttagcagtttatctttatattttgtgataaacgaggaagccaagtgttggtgtgttcaactgtggacatacatttgcatatggttttgtttctattgaatagattttggtttgaatgacaaattaaactcccagcttccaaacactgaattcttttgttcagactttacacattcttgaaaggaaaggtgcccacatgcacttatcctttaagggtgaggttaggcaagcaaggaattgacagttattttatgtttttttgttttttgtttttgtttttgagatggagtctcgctcttattgcccaggctggagtccaatggcatgatcttggctcactgcaacctctgcctcccgggttcaagctcttcttttgtctcagcttcctgagtagctgggattacaggtgcataccaccatgcccggctaatttttgtatttttagtagagatgaggtttcatcatgttggtcaggctggtctcgaactcctgacctcaggtgatgtacctgccttggcctcccaaagtgctgtattttaccttttatattaacaaaaccttcttcttgcagttcagaacccataggaaatattattggaaaggtatttcaccacatcatcacaggcatttctatggtgacgaagcgatgtgccatgaacaaagttatgccattttttaatacaagccgaggaaagagaaaaaaaccaggagcaagccactgcttcagggattggcaacctctttatgtttgctcaagatagagcgaaaaactcctaaggttttaccattaaagaaccaaataaaattgtttaacatgttggaattgtgggtcctttttgtatattgacttgagaaaaaataaaaatattgatacagaaaaaagagaatgcatatgatctttttatcttagccaatatattatgttttcttgtttttgtatatctacatattcataaaaacaagtatgtgtgaagaagtttacatcacagtgcaagtgtgatccttcatataaaactaaagcaagtgaggatgaattcctaaataattaaacggtaaattacttgtgtttgtatcagctcttgagccatcttaaactactaatcaatttctcataatcatcagtgcttttcatctgtgagcggattatttggtcaaacatggagacaatggcacagccgtgagtagagcccaggtgtttttctccgatttctccacagaactacaatgccagcagaaaggtagagtggagtaataataaaaaccaggtttaagagaacactaagtttttttttcagtgttgttcacggaactgcaagtggtatagaggttcaggaagtcattacagtcttcataggggtgcaatagttctcacttctcctttcaagaagagttgtaatggaaagttgaggaagaacagtagggacacagggacaggtggtgtctccaattggtcatattctccaagttatttttggtctatagttggttccctaaatctcacttcttctcttcctctagctttagggactggactcagcattttggtttcatttcttttttgaaaagtaaaaagaaaatttacaaaactataaaacaagttatatatgtatatataaaactagcatattaacaaatatatatgggtaattatataaaattatttatacatatataattacccatatatatttttcataattacccatatatatgtatatgtatatatatatataattacccatatatatgtatgtgtgtatatatatataattacccatatatatgtgtgtgtgtgtgtgtgtgtatatataattacccagaattaaacacctttaggtgtaattagagtacattaaaatttggcatactttcctttagttcttttctaaattataaaagtaacatatagtatatttttcttctctaaaaatattgaaaagttaaagtttccttatccactttctcctcaaccagagctgcttctcccaaaatcccaagggaatcattattttgagtttgctgtagatacttcaaacgtttaaaatatgtatttacatgcatatatatatatacatctagaaaaatactagcatatgttattttatgtagtttattcagttacttacatagtacagtgtactatgtaagtataattcacatcttgcttttttctttcaacactgcatttttgatgtataggtccctgatacactgggtattcttcagacggataacatttgatttagattctgaaagagggataagattttgccaggtcaagaaaggaaccggtcaggtagaacattagtttacgtattagcacttacttcataaaggcatggaatagactgcggaaaatcaaggttgctggactttagggtggaactggtgagagaagagacaggagactgagtaaatgcagaaagggtggccatgtagcctatggcagatattttgaattttcactgagaggcagggatattataagtgaaggtgaagtgtatcactttgctagagctgctgtgacaaagtgccacaaaccaggtggcttaaacagaaaatgtgttgttctggagactagaagtatgagataaaggtgctggcggggttggtttattctgagaaccataaagaagaacctgccttgttctctctcctcttcttatggtttgccagtaatctctgccattctttatagacaagtcaccccaatctcggccttgatgttttcgtgacattctctctgtgtgcatgcctctgtccaaatttaccttcctttatttttacaatttttattttaagttcaggggtacaggtgcagtatgttcagatttgttacctaggtaaacgtgtgccatggtggtttactgcacaaaccatcccatcatccagatattaagcctggcatccattagctcttctttctgatgctctccctctgcctccccttttgctgtgcagaagctctttagcttaattagatcccatttgtcaatttctgctttggttgcaattgcttttggcgtttttgtcatgaaatttttgcccacgcctaattcctgaatggtattgcctagattttcttctagagtttttatagtttgggattttacattttttaacccatcttgagttaatttttgtatgtggtgtaaagaagaggcccagtttcagttttctgcatatggctagctagttctcccagcacaatttattaattagggaatcctttccccattgcttgtttttgtcagatttgtcaaagatcacatggttgtaggtgtgcggtcttatgtctgagttctctgtgcttttccattgatctatttgtctgttcttataccagtaccatgctgttttggttactgtagccttgtagaatagtttaaagtcaggtagtgtgatgtctccagctttgttctttttgcttaggattgacttggctattcaggctcttttttggttccatataaatttaaattttttttctaattctgtgaagaatgtcaatggtagtttaatgggaatagcattgaatctataaattactttgggcagtatggccattttcatgatattgattctccctagtcgtttatttttatcctctctgatttctcagagcagtggtttgtaattctccttaaagagttccttcacttcccttgttagttgtattcctaggtattgtattctttctgtagtaattgtgaatgggagttcattcatgatttggctctctgcttgccttttattggtgtataggaatgctagcaatttttgcacattgattttatattctgagactttactgaaattgcttatcagcttacgaagcctttgagctgagccgatggggttttctgggtgtaggatcaatgtcatctgcaaacaaagataatttgactccctctctttttattcaaataccttttattttttcctcttgcctggttgccctgactagaacttccaatactatgttgaataagagtggtgaggaaaggcatcgttgtcttgtgccagttttcagggggaatgtttccagcttttgccctgcagtatgatattgactgtgggtttgtcatatatgactcttactattttgagatatgtttctttaatagctagtttattgagaattttaaacatgaagggatgttgaattttttgaagtacttttctgcatctattgagataatcatgtgatttttgtctttagttctgttaatatgatgtatcacatttattgatttgcatatgttgaaccaaacttgcatcccagtgatgaagccaacttgatcgtggtggataagctttttgatgtgctgccgaattcagtttgtcagtattttattgaggatttttgcatcaatatttatcaagtatattggcctgaatttttctttttttgttgtgtctctgccaggttttggtatctggatgatgctggcctcatagaatgagttagggaggagtccctcctcttcaattttttgaatagtttcagtagaaatgtgtactagctcttctttctacctctggtagaattcagctgtgaatctatctggtcctgggcttttttagttggtaggctattctctactgcctcaatttcagaacgtggtctattcagggattcagtatttttcctggttcaaatttacctttcttataaggaaggcaatcatgttggatttgagtccagtctaatgacctcattttaactttgttaccttggtaaagactctaccttcaaataagttcacaatgtctaactgtgagttaggaatttaacacatgaacccattcaacacatgaacctttgggggcaggacttaatttgacccttaacatgaagtgataaaaatattttttagacttgataattgtagctcttgtttgatggctgaagtatcaagaggattatgagaacagacatgaggctatgaatatgttgaaggattggaattttggatcactcaaatgtgatccaaaacctctggacacccttaccctttctagatatattttttccccttaaagaactcaaaggagaacagagacctggaaaaatatctgtggatatctggaagtaagcactgtactagaggttatcttgtatttgtctctagtttttatgttcgattctcagaggcaggtatttcattgtacaaggtgcaataattatggagtatacattttatttaatcacataggaagtggtttattataaaagagaaagaatactttaactttaaacctgttggacaaaagggttaagtataactttctcaattacttaggcaaatatattcttgaaaataaaaagttagaaaagagggaaagactgagaccctcaatgttaaataacattttataatgatcacatgctgagtcaaaggcaaaagcaatttctaagtcgcctacttaattctctagaccatgcctgctatcttatatttatatcttaataaatgtacatatgctgccttgctgttttggggacaatgggaagtataaatttgatctttcttgaattctccacatttaaagtctccacttgtcacttgaattaacatagtattttagcatttaatttcctggggataccagatgttttattttgtgagtttcttttatttatgttatagttgtggtttaaacaactatatgttcatttaaaatgaaactcaaaaaagaggaaagaatggcacaactcaataaatatgtagtttaataatattcagtgaatacgtatgcacagtgaatggaagtctaaataacgtactccagtgaagaattattagatgttgcccgtctcagctggattttcagttatactattcaagctggtgggaggtttcaggggaagaacaggggagaagacaaagcagaaacagccttaggcagtataaattctgaatacctttaatttgattaacttgttaatactagcaggagagttactttgttgtattctagggattataacatggcatcatttgaaatgatatggttcccactgataaggggaggatgaatagaagcatacactgaatttctctccagggcattgagttcctttggcgacagcactgttggctaaatatgaaaggctgtgagatgaaatggcagcaagagaacagcagaggaaaatgtaaggcaaggatgggaaacacatgagaagtttatacctgaccatctcttttctatcattggcttcctatctcctattcttcttctttgtcaatctctgtagcctccacctttgctcaaattggctcagtgatatgattttaatactaagcccacacccagttggtatgaagacattaagtaattaattaattcaataactatttgctgatctgaacaaagtggacaaaaaaccctgtctctgtggaattttcttccaggcatgaggggcttgggaatgggtaacaagtaagtaaattatgtaacttgtttgacagtgctaagtgctacaaagagaaactaggtagataaaagaaatagggacttgggaggttgaaattttataaaaaaaaaaaaaggtcagagaaaataccacttttctgatgagttaaaaagctatgacctgctaatttttatgtatttattctgtgtccattaaaacttccagaaactttctcttgaagtgacatttgagtctcaagatctggccctggtgattatattgtgacacactgtgatcattacaaaaatttttatcatcatgtataactgtgatgctattttgcttgcagcccagacaatgtgatggatttattaaaacattctgataatcataagacagtgattctaggacatgtattatcaggacctcttctgtacctgtgtttggagttgccatagatgaaagtcatatgataagagaaaagcaatatgataatttgtaagtgagctgcttataataagcaggatatgacagtcaacatttttcctttttacctttccttccatctctacctgttttctttgttatagactttgagttttgtatgtgtcaggtttcattcatttgggaaaccaatgtcacatcaaattaggaaggatgttatgaccctctaattggcctttgcattgtacacaagcctcctatgtttgttcgggatagcaccacgcatccttttaaattggtagtttgactgtcagtttccgtaatgcccttgacagtaaaacaaacacaactctatgtgattctattatgaaacattaatcttctgactgtatggtaaaaggaaggggtgagagtttctctccattcccccaaaggaaggaagagtaagaaagaaattaaaaatgtaaaagcactcccaataacaggtcatcaagtcacagcttttcattgtggccactctttgtcagctgtgtgtgtgacaagaaacaaatcacagctccatgatatttgatagccttgagtaattaaagagtcttcaatgctttttggaaaatgttgtccaatattccagccacatgcagtgctcccttaataactcaataactccacatttctctccctgtgtgtgtttgactattgctatcccttttagagatatttgcatgtaatcaagatagagttcaaagatttaccattttccttactattattctatatttgaatatccctcccacttccatttttttcttccgataggggaaataagttaaccaaaattcaaacaaaaatcagttttaaataaatattcctaataagaattattataactactaccacacatacatttatggtaggaaaatttagaatctgtcctggaaaaaaatacgtccagattatttacaaagatttgctttcagaatccctcttgagataaatagacatgttgggggtgattctgggatggagcaaacatgtagtttgggtcgcagtttaacgatgtagccgtagtgtattaaggctatgcatagcaatttctcttgccctggagtagttagtgtcaaactctttttacccattaaacatttgaagtagatttattagctctaaggattcttggttcttcctgaaaaggaattaagaatctttggacagtggacttcttgaaaatcctatcaaatacccctaagtatgtttctggtagcctctcggttgtgctattcagtgatgaataacacagagcttgattgttctaatttagcggaagaaacacattttttttaatgtggtttttgccattttctattatactttaagttctgtgatacatgtgcagaacatgcaggtttgttacataggtatacatgtgccatggtggtttgctgcactcatgaacctgtcatctacattaggtatttctcctaatgctatccctctgctagccccccactacccaacaggccccagcgtgtgaggttcccctccctgtgtccatgtgttctcattgagaaacacattttttaaatacataaataaatatcacccttttgtcatgtatcttcataagcaattgacccaaccaatggatttgcagtcagtgaaaacaactttggatagatgggtggatggatgaatgaatggatctcatttatttgtgggagctaaaaatttaaacaattgaactcatggagagagagagagtagaaggatggttaccagaggctgggaaggttaaggaacttggagggaaaagtggggacggttcattggtaccaaaaaatagttagaaagaataaataagatttaggatttgatagcctatcagggtgactataatcaataatatcttcattgcacatgtcaaaataactaaaaaagcataattggattgcttgtaataggataaatgcttgaggtgatggctaccccatttaccctgatgtgattattacacatttatgcccatatcaaaatataacttatgccccataaatatgtacacctactatgtacctacaaaaattttaaagaatgtgaatggttgaatagataggcagatagataataaagtaattactatttatttttgatttcagaagattttaacagggcccttgattatcattcatctgagatctacccttgtctgtatggcttatttgggttgtaggtaagagtcattcttgaatgagtgggggtttctgattatttttaaacagccattcaagaccaatgcagatacctaggaggaaaatgtttctgatttttatgaatgtgtatgaaaccggtaaatattcataacatagctaccaatatatgcttctgcaagccaatctaaacaaattgccagtatcaaagattctgttgatgaggaatagacagcctgtgtttgcagtcttgttaaggtggttaacagtggtgtcctgattttttccaaaaccttccagatttgggctgctgagtagatgatgctgacttccgatactgcttgttgttgttgtttaaaccattgagcaggttacgaacctctgaacttaaacgaaagaaatcagtggtttcagctggaataaaaaagtaatactatggtatagcataacggagataatacaatttttgtggttttaaaacagagaaaaaagtccctcttttaatgcaaaatcacctgtaaccttgaatgtatcaaccagtgtgacttagctgataatttaggcctatttcatagagctgttatgagaactaagtaaaatcatgcacatacaaatgattagttacttttaaaaactgtaaaatgcttgctgttattgttgctggattgaagagttcattgtgatggtgccattcaatgactatatgactaagatgatcatcctttgtactctgtctccccatctctcctccctcccttgtttttccatgtggtatgtgttttctctctctctctctcttttttttttttttgagacggatagtttcattcctgtcgcccaggctggagtgcagtggtgcaatctcggctcactgcaacctccccctcccagggttcaagtgattttcctgcctcagcttcctgagtagctggaattacaggtgcccaccaccacgcctggctaatttttgtatttttagtacagacagtgtttcaccatcttgaccaggctggtcttgaacttctgacctcaggtgatccactcgcctccgcctcccaaagtgcttggattacaggcatgagccaccgcgcccggcccgtctctaagttattttctaagctaaaagtcatgctactgcaaccaacggatatccccccttttttggagatacttggtaatgtagaaactatttcagagagtcaaaattctacagatagagtttagaatgcacaaaatctagacatggcattgaggcatctagatattgcctttacctatttcctgtaggaacttgctccagattagtatcttaaagacaaattggcatttatttttcttacacacattgcattgtgccatgtaagaaaattacagattaaatcagcattttcctcctgcttgatgtgaataaaatcaatgctgaaatgggagtcctagttaatctatgtgatagaagttactaggaccagtgtttggtggcttaggtccttaaagaaattggaaagctctttgcaatacagtgtgttaacaacagccttttctttttattcccttccctttgcaactgttcccagcccttctttaaaaatctaagtcagaaatatattgaagggctttatttctatccatttttttctatctgcacatggctgttgatattccttcactgtcttggagctatcaactatcagtcttttgtaaagtagcatacatagtaaagtatcaagaaaacattttctcaagccagactgcctgtgctcaaattgcagctctgctacttactggctgagtgaccttggacacgttatttaacctctctgtgcctagtaaccactacataggagggtattttataaggattaaatctctgtaacacacgtagaaaagtacctgccatatggtaggcacaatatacatttttgttaaataaaatgaagcttagtagtttacctgcattgttcacattatctaacacattaccttccacatcgtaggtacacaatgaatattattagtcatgacttatacatgactaaatgtattcttaaattggagtggtacaaaaaacatatgggtccattccacatttctacaaactagctctgcagtcttgcacatcaaattttagtgtctttggagcttccttctcatctttaaaataaaaatatttgcccaatgtatttcaaagggtaattttaatgatcaaaatgataatgtacttccaatgagttgaaaaaattatttctctatatgaaaggtattataacatttttatttctcaaattactaaatcagttctaggggaaatatgctagtaaaatagttaaggcttgacagatataactggtccagaggtcggtagtcatcatgagtactaagacctagatactaggggtctgtgtttgttcttgagaatacagcaaagtgtttcaaggaaggaggcttctcctttacttaccaggcctgttcagctgtatttggctacttcttgttatggaaggaaacctgagcagaccttgggaatccagtgttcctttatcacattcctcagatctgttaggctggacgccaaggacagtagtttgaaggtgtttgtcttgatgctgatggatgttgcagtctgtaatccacgaactgaaacagggcttctcttcattgcagctggcatatcttgttgtgtttatgagtctgacaggcaaacatatctgaagcatatctcatatgctgatctgtgagggagataagccccttgttttgcttgactggaaacaaaataagcaggtggcagaaaaccctgcattgatttctgcttgggctaaaacacccagaataagatcaagtcccccttgggcacactccagcctctgctatttgatcattgatcatttgacttaagtttgcaaattgttgtagggaagtgtaagtttctttctgctttaacaaagctacttttacttattttaattttataagctattagcactattttgtgatagaaaaaactaaaaatcaaatggtgtcagagcttaaaaatctcttacttcatttgccgtgtaatctttatgcatttgatttttgcttcaggatccttacctataaagcatacccatttcatttgaccactagatttttacagaataaaaatagttcctttctgaagaggaactatgaaagtgtatacatgggttaggagatggagctgaggactccaaagtaatcagtccctgataagaacttgagttttgatgcacacattattgcattttagagattttggtctcccagttagattgtaaacttattgaaggcagtaggacattgacaatgcataaatattagttaggaaaatgaaaaataaagtgttgcttaccaattcagagattcagaagaatgtggataggattttttccctctcacctgaaatttcgactttataaactctttttattactgtccttccttttctgatcccttgatgattattaattggttccagtggtgtatatttcagatatttaattaagtcttcctttctgtccaactctctgccaaaacatatttttcatttttatacctgcaatgctcaaacataagttgatgccaaatgcatgctgtttgattacattccatccagatttacttccaagcaggacgaggcctgtagcatttatttcaagtagctttacaaagagccattcttggccctcaatgtgtgtggcaggcggggaggcaggagaggaaaatgaggtagatgtccttcccataccttaactagtttttgagagaaatggaaaatggcagatcagatgccattggccgtttgcccaattaagccatagcagtgttagctaagatgtgatcaatatggaagacttggtctgcagagccttttttagctgtgctcctgtactagtcaagcacctcctgcaactttgtggtaaattcaagcacctcgtgcaactttgtggtaaaaaccatcctcatgagttagagccttgtcttataagaaggaagaggacagcttctgggtgagacacgtgctggccatcatgctgttgcctaatctgtcacctcaactattgattcccagctcttgattctcattgttcattcatggagttgtttctaaataatggtgactagagaggaggaaatggtgttatattagttctctattgctgcataacaaataactccaaaacgtagcagctcaaaaatcaacaaggcattacctcctaatttttgcaggtcaggaatccagatgtggcttagctgggtgcctctggcttagagtccctccataaggctgcaaccgaggtgacagccagggcttcagtcacctcaacttgggagagatctgcttccaagcccttacctatggctggtggcaggccttagtcattgtggactgttggccacagataatacttcattggcacaagagcctttctacaggacagcttacaacttaatagctgtctttgattgagggttggggagaaggtggaagccattgttgttttcaatctaatcttgaaagtgacatcctgtcacctctactgtattctattcatcacttagaagtgagtcaataagtataggacatttaaggggagggaataatcaagggtatgaataccaggaggctgagacagttgggagccaccttatagactgccttacacaggtgtaaaaagcatgaaatagacattagacaaatgcagggtctgctgagatggcgtgtaaaaagttctatcacagggcttgccacagagtagagaagcattgcatttatttcttgccacccccagcacattgcctggtgcattgtgggcactcaagtacctacatgcccatgaaactgtgtctagtttactaaaaacaaagagtctctctgttccaaaagagattaatgtttggtgttatcctttctggacaattttcttcctatgcttcatttctccagttatcgtcaagggaatggatttaagtctgaaataaaatcactcaaaaataaggaatagctgaagcagacctagaattaccttggtggaattaccttcttaagaacaattagaagtttattctttaggtcaggaatgctgttgccaatcttccacagcaggtgataagaattaaattccctcatgaccgaggaaacgttctttctgctaatctggttccacctggaggttcaacaaatagaagatagagcacacggtgtgtttagtcttaaccacatagcccgaggcactggggaagtgtccacacgatgtttgccttctgtgaacctggaaagcaatttttttctagttttcctttttttcctcttcttttcctattcatctgaattcttctgtagttaaattattaatttctctccctacagaatataataaattactatccttgttaattcttttatcaaagatatgtactaggcttctgcttccacatgggccatttgaaaaacagtgcttcatatgatccctgaactttttggcaattataaagagagatcacaaatgagtaaggttgaaaattaaactataactggaatgaaatgtcctataggactaaacctatcagttgtattgcagatcagccccttataattggtgatgtggtatgagacattttatataactataatatataggccataaattattattatatcagtctgtggtataatattgcaccttagggtagaatttgctccatttacattatattcaggcagaaaaaatgaaaacatctgtcagggagagtatagccctattgatcaggtatatataagtaaggtttacttatataaggctgagaaaaggggctttccatttgatttcagttgttttatagacaagtttctagtttgagggagctatttagaaatgtatgtagccttatgtagaaattccaataaagctttcaaaaaataaagctggtatttatattggttgaaatggcaagataatgagtctaaaagattttcccttctgatgttattttttttgttgttcagaatgacacttgaaagatgcctaggatttctactgctgctcttagaatcacaggatctcagggtaaaatcaaactttagaggtcattaatttcaaccagccataaaggtctttttgtcaaacttatgaccattcaagatactttggtgtcaaagtagctcacaagataaaataaatcactcgcatgttaacccataggaggttaaacttttgacagcagatctgtggtggtagataccatgttttctactgtcctattggaaatgagtgttagaggcccatttccactacaaatactgcctagtggctgacttacatggtaaaaatccatccaaccttgctctgcatacattccagaactctaatgcaaaatgatgcctaaaccattttaactctatccatgcatgaggacactaagtaagatgaagcttgttttgatatatacactttttaaaaaggtagaagaataagaggtggtaaaataagttattcaatttattgactatagtaacaacttggctctgattgttaatgtttgtccctgccatgtgatatatagttgtgtgagattaaaaacccccttgggtataattttatttacaccaacacatatattttgaagagatgaatgaccaattctgggaatagttagaagtaaagaatttgaattttctgcagcactgctgcacgttaggtaaattcctctctttgggcctcacttgcaacaccaataaagagaggaagttatactagatgttctataagccccttccagccctaacatgctattagcccatgattcttgtgtagggataccagaagaagatgaaagagagaacctaactcattttctgtcaccagtccttataattcatggcattgtgtatttctccttgagtcaacattgcttcttttagtgacacaagcaagcctgctttctccagctcctcaggaggcaactctgctactgcagaacaaagatcattctcttcctggcactcttctgattcctggtacctgtattcagtttcacattccctttcttgttgaggatgccattgcctatagaaagatactttaggtgaattaccaggcaaacgttactaaagcaaagataactgataagggggactagaatcttggaatttgtgcaaataaattcctttgtgaaactgcagactgattagaaaactgtcatagtaaaatactttaagcatgtccttttctcattttaaaataacaactggaaggaaaatataaatatatcactgaaataatggtttctccatgaagaaaaagacatttagacaaaccaaaagtgtatattctatggtgtagtaaatcattaccttactatattaggttaatacttgataaaaccttgtagtgagataaatggtgatatggagaacttaaatcttcaaatgtatgttttaagccccattatagctattttttttcaaacttacctactataaagttttgtccagagatattccaaaaaagaataatagattggtattaatgtttctgcctcttttactctttggaagacgtgccaataggcaggtaaagagatcaaaaagaaaaagtcgggcagggtgcagtttctcacacttgtaatcccagcattttgggaggccgaggcgggtggatcacaaggtcaggagttcgagaccagtctgactaacatggagaaaccctgtctctactaaaaatacaaaaattagccgggcgtggtggtgcacacctgtaatcccagctactcaggaggctgaggcaggagaaatgcttgaacctgggaggcagaggttgtggtgagctgagatcatgccattgcactccagcctgggagacagagtgagactccatctcaaaagaaaaagtcaaactagatcaccatttacttaacaaggagctgttagtgtattaagagtattatgccattcagtctgattaaaccacctgaaggaacagtggaacctcttcctaatcattcccatgtgagacttcctgggagacagctgggggcagccagaagcaagtagctagagaggactgtggatttctttgtgaggaaatctgaaactggccactttaaggcccctgggttctactgaggttaagcgtctaaagtgtccttgactcactcaatttcaaagcaaattcaatttgatctcttgcctaataataaacactgggcagaagcagacatggaaggatttggaaaatggtgttaaaagatcaaagagatctaaataaactattttgtttgaactagagttaccaagtagaatagattgttttaccatagatggagactctttgagaaggagttaaaatttgtgggagatccccaaaataatggcagttcccacacacacttttcccccagagtgtatataggggatatataccactttctcacctccttttccacttcttatcattgttagatctctagaaagttcatgtagcttctttctcctttgtcgttatatgtttcagatacctcaccagcttcctttgctttcatttaccatatcatagtggtaatttcctcaattcctatatcctacaagagcttgatgaatgaaaagaaggaagcctgtgacaattattttattcaagcctccaaaacagagttttgccaaatgcttgtcctacttctccgtgcgcttgccatggtctttgttttgcctctttttcttttggcagttaccccaactataactggaatttcctgattgatgaagatttagtggtccaaacacagtcagttgtcttttggccagaaggaaatatacattatataatccggtggtttatcttcttatccctcccccattaacttttttttgttttgttttggtttttgaatctctgcttcccttctccatcccctaagcaaaagcataaccagcacgttttttagcatttagtagatacaagcctagcattgtgctaagtattttgcgtctattatctcactaacttttcagaaccatcaatgaagttagttcctttatcatccttattttgtagataatacaattgagatccagtgaaactatagttagcaagtgtaggtgcacatactaaaaccaaatgaatgacttgaaatcccaagtggttaacatttattccagaatactttcctaatctgtgcctggcactgcactagttaatgaaaacagagtgagaaaagatatgatgtgtccagccaggtgcggtggctcacgcctgtaatcccaactctttgggaggccgaggcgggcagatcatgaggtcaggagaccgagaccatcctgaccaacatggagaaaccgtatctctactaaaatacaaaaaagcagccaggtgtggtggcatgcacctgtagtatcagctactcaggaggctgaggcagaggaatcacttaaaccctgcccagaggcagaggttgcagtgagccaagatcgccactgcactccagcctgggcgacagagtgagactttatctcaaaaaaaaaaaaaaaaaaatgatatgatgtgtccaagctctttgtctaatgaaggagacagatgtcaaaaagataaattactatacggtacaaaaatgctcttatagaggtatgagcaatgttctatggcagacaaaaaattagaaagaagacacccattttcctcatagtaaaccaaaaatgatctaaaatattccatgtttgttaaaaagcaagatctttatggttactgttaggcactgcggtatgcctccctggattgtcaataccaatgccatatagatagaacaaatagtttgaaaagacatgaggacaaaacagtctccctgtctcccaaataatagatccaaagaattctctggatttgaatttaatgttcaagagaggggaaggcataaatatataaacatatatgtttcatacatatgtgtatacatatatatgtttcatacatatatatatacatatatacacatacttatatatacatacataaatatatttatatatccacttaaaacatatacaaaactacctatacatatatacatctatatatcacatgtttcaagaagctgttttctactaacatcttcatgtacgtaaaatttaggtgttttataaatttatttgacagagcacccctaaaccttttatatacacacctcatcagatggaagtaatatataaaggaaaggcactggcttcattcttctatttttaaaaggagtgaaaacatttttgcatttgccaaactcctgtgtatgcaaactaattgtgtgtgtgtgtgtgtgtgtgtgtgtgtagacacagcaccatttttggtgaggatggcacaggggctctcaaaagaaggagttctcagaatcatagcaccaaaacgttgtgagtttgcaataatcagagtcatggtgagcatcatggaaatttagaactaaaagagatgttacagattatctccagtctgagtccctgccacacatgagaaactaaggccaagagatgttaaatggcttgaacacagaatgatcagtggaacaatacctagagcttctgtcttccaaatgagttctttttccaccttatcatgcacgttacatcaggcatgaatactggaaatctttctaatgtagggacatccaagcaaaacaagttgcatacatgtcataaaaaactttaaaaaattcagatttacttctggcaaattcattcaggaattcaaactcagataattaaattaatttcttaatattcaaataaagaccagatacacattgacatcatctctcttgtatattcagagtaccagataaatgggatttttcactagggggacaggattgctacactacaccattgccatttgcattcacaacacgggatggcggaagagacattgatacaacattttttctgcctccttcatttttaaatggatggtgacatgcttcacagcagcatctccaaacaaaagatgacaaattcccatttattttccatcagtggtactgtgtgagatgttgtactaagtctaagcttgttgttcctgaggcacagaagtctttttcctgcagcatatagcattactgtaaaaataaccattccattgccagtcactctgtcaggagtattggcagagtgaagaagacttatttgatttcactaaagctattagtttgaaattctgatctgtaaatctggatgggaaccacacgagggaaaggatccctgccagaagcaatgggtcttgtacattctcaaaaacaaaggtcagatgaaaacactggattgaaaatagagccctagaaatgaagcaagaaggaaggaaacttatattgagcgtttgtaatgttccaagcattctgttaggctgtttacattatgtacttgaaaccgtcaactggattcatcttttccttcctttttccaccattgctggcatgtgtgcaagtgggggacccagggaatagagactacaatgtaaaaaatggtttcgctgttatcgttgtcatgttttcctatgtaaaaaataggataatgtgacttttgctgttgatagatgtttcttcaagatcccagtagagtattttgtgactggaaaatttctagaatcttgaaggcaaaaataagtgaaactgtagagaagtgtaggaaaagtcatcaggggttttacataaaacagtttttattaaatctcctttggaagggagaattacaactatctgagctaagttttgttgtgatatgaacgatagtgactgctaaaaggatagcatgggaaagttttttgtttatttgtttgtttttgagacaggatcttgctctgtcatccaggctggagtgcagtggcaggatcacagcctactgcagcctcgacccccacccctaagctcaagcgatcctcccacctcagcctcctgagtagctgagactacaggcctgtaccaccatgcctggttaatttatttatttttttttttgtagagatgggggcctctatattgcccaggctggtctcaaactcctggccttaagtgttcctcatgcctcagcctcctaaaatgttgggattatagatgtgagtcactgcacttggccagcaagggaaagttttgaggagtgatggaaatgttctatatcctaattgtggtgatggttacataaatctatacatgtgttaaaattcatagaactatacaccagaaggaaaaggaacccttcaatttcactgcatgataatttacaaaaataaaatttcaaaaattccagtagtcaactctaagccaataatatgttggactatgtctaacaaaagggatattatttaaaaatattgccaactgactatcattaaagcctaataaataataaaaaagtactgtcactccccacatgagacaaaattgtcatctttacatttatttcttaaaattattctttcctggcatctgtaatcatctatggcttcttcatttcctatgcccctctgctgtttggaaaatcagaaaatagaaggcattttggcattcagggtgataggtaaatgcccctattgtaccttctaataggtcaaatatggtgactttggttggttcttatttttgttatttctccagtcatcaatcgtattgatttttttaaaaacaaaggtcaagcacatgttcgtaggtgacaccagttgcttcagtgagttggtcccttctgcttactgttctggtttaaaccccttgtggcattttctactgcatggatagtggtaaatggggttgatagtgacatagaaatgaacttagaagtaagtttatagactgttggggaccatctgttaatgtaaatgtttaaggtaaaatgcattaaggcttaagagctgacgagacgttttatttgcctcctgcttttgggattatgcctggcacctgcttgagtctagagggttcctggttaaacttgggaaacctggtttcctcttttatctgcagctgttcgttttctgggatggaatcctaagcacttatttgaattgtatttgttgaagtcactgggttatacagtaaaaataaggagtcatgttggtttttgttcgaagttttaaagtatgtaaattaaatacatttatatggctaattgtcatttatggttacctactgttaaatagttgtttaatttgttgtcttcagcattgaaaagttaagcagtatcccttagcactatcaatgtcagtcaagataacagttcatttatttcatagattactttgattaaaatcactattaaagctatttgaattatattataattttctggtgatgtcataataaagaagtttttgaacgtgcccattttatttttaacgcttcaatgtgtattactggagaagaaattgaagtaacatatttttactgttaatgggaaaatggtcttcttcaaaaaggaaaaatcaaacttacctcctagatataaatcaataattttcatttctagcattaacttagtagtttaatgacttgggcttatggaatgattttttttagaccacatcagacctacccaagggaaaggaagcacaaaaaatagggaatgatacgtagaattagatggcgagaagaaacgaggagagagagggaaaaagtctgaatgcaagactattgaaataagtgagtaacacacttttccagaaaagattcatattggagttttctagaagcctctgagtatgatgaggaaaaagaagtgattaaaatttgaatggtttccctatgggcggataaaactacctgttcagctggaatgattctgatgaccttgcctctgaagcttatcctttgagatcagcaaaaaagttcatgttctcatctctcatttgagctggagttgattgatgcataattaagatccctaaggaacaggtgcaaaagctgcagcgcttctagattcatccatttctctctactttttaaagaccagtctcatgattctaatactataaacacttggtggcttggtattgggggcagagagcttccggtaggatgacatgagataggatgtcatcctgccacagggaataaattcttggatgaaattctacaggtcatttagcccatctcctatattgcacaggatagggagctggggactcctgaggcaaagtcattttctcaaggccgtgtatctggttagaggcagaggtaggaaggaaacccaaatctttctatttttagaccatttgcctctctactaggccatccctcgctttaacttgggatcttaagcttcccttgtaatttcttgagagtaggttttaatcttcctactgtatgctctagaaactatatgctgggggaaagctgaggggatagcatagagtaatatccaatcttgaatcctttctctcattttaaattgtggtgttttaaattagcataggtaacatagagattattactcagttgaccactttgcacttgatctgagggacattgcagagtcatcacagattcttgagttatgaggtcagtatttaatgaaaggatacgtcgaaggcttttccttaactttcaaggacctgtggggatagtttctactcaatgcttctttttattcgctttcctaataaaactaatatttaattataaaattaaaatgaaacaagtttggacttccgtatgaaaagtcttatacttgatctgtaactacaagatgttagatgttcttcatggagatgacaggcaaaggttacttttacagttctatgaaagtaaaaagcttttaaaacatttgaatgggaattggtaaaagaagcagttcttaattatgtcaattgtctgtaagagctcaggtgattatggtaaacacacctgataacaataacttaagagagcaacaataactttacagcagacacacctgaatgttggtgggagttctgagctaaggaacccagaagtggccaacctgaagatcaattccttgtctacgaggaacatctgatcccctggcctgtcccttggaacatgggccatacaaggagttgaggccctttgttttggattaaatgaaggtttccaagcggacgtggttaggaggagggtactaagtgaaaatgtgatgtaaactgcctgccttttgcaagtggttctcctgtctagcctgctacctctggactctctcccctgtatgcaaggccccagtaaaaccccaggtctcatttgctggctctgggtctctccttcagcctcttgaacatgctgccatccccggtggagtcaataggaagtcggcacaacagacaaggaagagctgtcaccttgcctgataaaataatattctaaaggggaaagtacatatttataacaactggcaagccttatgacttaaatgaacagagctctgctctatggaaacacagaaccaacagtgccaggtatgaatagggaaaacttcttggtagtggtgataccttattagagtcttgaagagggcatatttcctggtacagaaaagggggaacactcaagtagaagagtaaagcagaaaatatataactctccattttctcaggaggtctaactcattacagttccatttaacccaatcaaaaccaatgctcccctttccctcacatctttaccgcattcttttaaagaagcatacgcacaactctttgagcaagaaatatcaggcaaccgctgccatcttagctaaaaaatcttttatgtttgagaacttacctggaagagtcctctggagagagaataagaagatgctttcagttgcacttggagagaatgtgagaattaatcgcctgcttgtttgggaaataacaactagttgtttctggttaaagcaacaccagtatttggatgagttggagcaacgtcagaatgattggaaattgctcaaagctcacaatggtacttgaagtaaaaggatgaaccccttcaagaacaatgctaggttctcctttgctacatggagggcaatggcgcatgataggccagggagaaaagaatcaccagatcctttgcctacttctgccaaatctgttgcaatgtttcagataaatcacttgaactatctgagctttgaagtgcttcagcttccactcaataagaaaaattgtttgaacctctctcattctgctcaccatcttacccttctccttgaagatcagcttaaaataaagtgatttgaagccccaggtgaaatgggagccctttactacctcctgctaaaggtggtaaatgactgtgcccaactttgacctcctctagttagcaacatcattctaaacttagcccagacagaaaaggatgacagcaaaggtttgaacacttttaaaggcctctccctttccccagagttcttatatatctatgtatatgtgtataatatgtttgaatattttattataattatcctccttaagaaaaacaaatttcttggattttccctatgacttgggcttaagaagtctcttaacagttcctcagatgtagtacctgcggaagggaaggattaggttagaatatattcaaagtttgtataaaaaagagggtaaactagtcatttaaatgtaaacatataaacacttactttttactgtgttggctttgatattctttaatttctttgttatatcagccctttttttatgtcatgttgaaaatgtgccttcctggttaaaaggatggatatttggaaacaaggcagtttgaatcacagcacaactatttaattttaaaagacacttttttctaacctatataattcttaattgttctggacatgtaggctatttcagtgaaatttagaaagcaaggccatttcctacagctaagccctttaatgataattatgacaccaacccccaaagacatggtttcatggctaacagatcactctcagattttgtggggatagagtgttggtagcaggaagcggcagaggaattcaactccttcttgagcttcttgtgttttataatcctccctatgtcccacctgttttgtctcagaggggataagtcaatagagctgctgctgttcacaaagccatgcaggtaagagacatgtaccccttgcttcaaagtcttagtaaacttatagagaaaatatgatttgattgcctaacaatatatttataatttacataccaaataagtgaaacgtaaggaaaaaactgctttgagctcccgagaatgctagttgatagcaaacaaggaaggtgctttggtaagaaggttgtttgctttgagcttccatggatgagaagaaatcaagtaatcaaagaggaggaagaggaggaataaaaacatagttgagaatggaacagtcagagacatgtgggcactatcttttcagataggaattttatctttcttccttgttcaacagttatttcatacacgaatgagaaaggccaaacatagtcatgaacgtttgcttttttaccttctgcctcttcagtttttcaagaaacactaaactcgcacctaggaatattttgacaagcttagaaactttttcaaaaaataactcttgtatatggcaagatgttactaaaatcagattttttttttcccatggagacgatgactgcagaacttttcattcacaccctcaaactcgtgcagagagaagccaagatctttcttcttctgcacatttttggcatcattcagtggacttgaaagaaacacagaaaattccatggagaaatatcttaaactccagctcacctcttggcttctttcaggaatgcttatttgacctgaattaaaatgatgacttttcatctctcaatctgaagcataaataaagtaggaattttgcattaggattgtgttttttaaataatcataaaactcatattcaagtacttccttgaggcctctaaactaacacattttggattgctataaaaatagaatcagctttcctttgctaacatggataggtatttatatatcaattttatagaggactgactgtactgtaactttggaaacaccttctctttttaataataagaaatgttggctaagggcttgtctttcctggttctagattagctatgataatactcatccccttatgcagaaaagctgcttttagacttctcattgcttcccagttaatataacatagggattattaaagtctctgagtatgcatttctagatgtgtatagcattagatgaaaattccttaggcctttggaaattcttcctttcccttttagagaagaagatattatcctggctatcatacatagcaagttatatgcatataagataagttcccttttgccatgaaatcaatcttccagttacaccctgggtttgttctttcttttctcatcttgttcctttgcttttcacttctctaattttacccatcaagtgatcatgcatctgtttttcaccttgccctacaaacctctcttagttgctttattctccttccccagtgcttctgtcaccatggcttcatatctggccccacccctaccccatcctatgcactattcaaaatcttcattcccagccatccaccaactgtcagcagaagaaagtccaactctccagcctctttagaaagcagactttattccccacactacataatgcatagtaggggctcagtgataccaaatatgcagatcacataattaagtccatagcactgcctaaacatacatggtatttgaaggaaataagtcctgtcatggatgttgactgaaaatttcccagcatttacagcctagaatttttaatggaaacataaagccccaaatttggagataaaggagctacagaaaacagcagatgtcccagagcacacaaaccatgtggccaagagcaaaagggaactcacaaggaggtgtctgtattacgagaactcgtgcccaaattccttttctgtgagaaaacagtaccatataatccttttgtctcagtaaaaaaaaaaaaaaagtggtccaaagcagacagaatggaatatgcattctccctcctttacccctaaaacattctgtcttgatcaatttcatttttttttgtcaggtgcactagatgttataaaagcacttagcttattgcctggtacatagttatttgaaaaactttgaccatggaaaaggctgaagaaagctaagagtattctatataaggtctggaatgtcaagataagaaatttgcattgatctaacaggtaataagaagctccataccatattctttttacctgtatgtaaaaatcaagaggagttaatacaagtagtattttattaccaaaatagaagttgcatctggctcagactcagcctctgattcctcaggaggtttttcccacccctttccctattcctgctttccagctgatttgaccgaaggacagaaggattaagaaatcaagtagcttatctgagaggttccccatggggcgctttgtcccaggtgttcctgcttggagcttacataatcaggggctttctgcatgctgagggtattattgtaaaggtgattgtttaagtcagtgggtgacggtgtcaggataattatagccaggagatatatgatcataaagacctagttagtaccccaggagaccccaagacagggcttctgcccatacttttgcaatcacacattctgaagtaaggtggcaccatttaccaagtaggaacaaaagtgaatgattagggagaactgtttgttccagtgctctggggacaaaaaaaaaatccatgttaatcttttctaaagtgtccacttttgttatgtttatatttttgttgaggttctttgttcacttgcaactaaaccaacacgtagaactgaatgtgatttctactgatctagaaaaaaataaagttattattaaaaaggaaatctaaaggatgataaattagctgcatatttttctgttcgtctattgttttctattttctctatcttaaggttgtttataatagacagttctacatcaaacttgagatgaaattaaagttgtgaaagatttatgatgtgtgttccagttatggccaccagttctaatatgcagggaacacgtttgaaacgggatcacagttgactattaggatacaggactattcttttcagcagaactaaagagaagatcagagacctctctattttttctctccctgcctcttcttttgtaatcacatgattaatacatgctattgaaaaaggtttcaaaatgtaatgaagaatatcaagaaaaacatagaagtcctttctgactatctgcaaccttagtcgcctctcaagtgggaaccactgttaacatttcaatgtgcagatgtcaaaaaccatttgctctgactttacaaacaggaacgtgcatgcacacacacacacacccttgccctaaaagttttagttttaataaatggtgtatacagtcaacatatgtcctggatatctctccctgtctgtacttgtagaaatatgtaagttccatttaaattcaaagtcaaatacaatttgaagttttgctgaagcttctttctcaatacatgcttctagattgtagtgaataagtgactgaaatcagctagccagtttctaccacaacatgatagcttggttttatggctaaatgagccccaggaaggagtgtgagaaactcccaccttgctccattgttcatgaaggacttgcatggtgagagacccttgggtctcctttcatcccagttttatagtaaaaagatcaaagatcttccccaaagtctctgcccaactgggtccccaccctgttaccttctgaggagtctaaccctgagtactgctgggctttgcagatcctagagttgcgggttatgagtgtgtccagagaaccagagtatgtcatctggattcactcactcattcacacattcatttattcacactcaacaaatatttataccattattcatagggcagacagtgaacattaaaaatgtgaaacaataacatacagtccattcattgtcaaaggatactacagatcaaggaaagaggcaacttcaagaaagtatgattagtacattgaccagccaaatgtagaagcttctgtgtcagacttgacagggtgagggaaagcttcctggacaagaagacatctaattggaatatggaaggatgcttagaatctagccaggtgtggggacttaaagggtaaagcaagtgctacccagaaaacgtaagtaaggcagatctctttggcctgaagtcctcatcaaggagtttaagctttattctgagagtcatgggaaacaactgagaaattttaagaagcaaagggacctgatctgtaagatttatacaatggagaacaatatggaaaaggaaaaagacaccattaggatgctgctgcggatgctggggtgagtgatgttgatggctttaactaagggaatggccctgggaccaaagaagtgtgcatgttttcaaaagtcatttcttgctttctgcgagcgagcctactaaactgcctaagcacaccggttaagtgtggcaactttgagaaacagcataaaccatgggtgacattgcaaaactgaaagcacttggtgcagaggttagataaatatctgtttctagggggatatacatgtgtgcattcattgttttgttttcaagagacaattgtgcctgaggctggagcttgctcaccctatcttttggactcagagtatggggcctggtctattttctacatgaccgggctttagttcagaactgacgagtcatatatcattctgattgattttttttttcttttttctttttttcccctctcaaataaaggggttgcaggggtgagatagagattgctatgaaccatcagggcaactcaacccaaatatgcatttatcaggagccccctaagtcaagctctcctgtcctcacttggtttgtctactcagagctgagataaagaaataaagggttaaatgaggtcagttagtgggtaaaggacagagaaaatagatgaacagcccagcttggactgctctgatctctgccggggagaaatggttagaaggggacatggcagagttacaggattaccaatcagtgtcctaagcagtggggtagagctaacccctgaattgcctaccgtggcttaccttgcttctgaattcttgggtttggtttcatctgtatcctctgttttagccttctttttagtgccactccaaaggcaaggaccacaaagcataagcatccatttttattaaagcagaaaggtgaagacttaaaatgtgcttctgtatgtgtgcatttttaaagcaaccctttgtaagaatgagtggatttagcaaagtagatgcgattgaatcacaatggaatacatgcctcttactcggtctaaagtcccttggttctgcaaagttttttattctcttttcaaaccttatgcaattgtgacttcatctaaattattgatacagttctaagggattagtatcttctgacggcagtctgttcaatatatttgtattttttacccttgaaggaatatgggactgttagggttttaaaagaagtctgagtttttgtttgtttgtttgttttgttttgaatgacagtaaatatccattaaaaagctgtagatttgcagccttgatgattagctctctcttagactccagcaagccttactgaatttcctctggagatcaagtattgaggggcaaaatactggggtagagttgaaagcaatagagaagatttgttgacaatatcgatgattaaaaaaatgagcctttttaaacaagaaattcctgctcatacatttggcttctgagagagagaaagagagagagagagagagagagagagagagagtgtgtgtgtgtgtgtgtgtgtgtgtgtgtgaaatggggaaaaatatcaatgcatcaaaatggacaggtcattttgttgaatgtaactgaactcctaagcattcagagattaggagtattcataatttctgactggcatgcattatgctaatgtggctgtcctctgttgtatgcttctgctgagacagccactttactcctgcttaattttctccctaatggtagcagtagggacttgggtatctacagtgagcttttaccaatttaacttgctgccgctataggccgttataaattattattcttatttagcacttgaatctataatttctttctttccctcatgttctataaaatatagacttagacctaagttagctatgcttttcccttcttataaatctaaatctttcatttgcaacgagctaaagttttggatgctcaacaactgtaacccctgcttggcagactagagagttatcaaggaacttcattcattcattcattcattcacacgtgcttgccttcatacatttattcatctctgaatgcaataacatatttacagagcacctactattttttttttttaccaggcaatgctttaggtgttgaagataaaacagttaacaatatcgatttgtgggaagaagtactacctataatgtctagaaaatacatgtgagatttgaagaaaaatagcttctccatactgatattctcaaagtagtttttctccctaattatctgtacacctccactggaattcttgcgaaggttactttgccttctggattttgaaaagttgtctttgattttattactttctccctaatgtcctagggaaaatatttccttccttcctactgattattgttttagaatttgaaaattactggaaacctatatatgagtattttgttataaaaattcatgtgcatttgaacaagcacaagagtacttcctatgctggatgctagattctagaaaattttaaaaattttttaccagtctcccagttgtgatattcccagttagttaattgctttttctgtctctttctgtttcttcctgaggcccctcctccttccctgcctctctcttttttgattttttaattttattctattcttttttttttttgtagagccagaatctccctctgtcacccaggctggagtgcagtggcaccatctcggctcactgcaacctctgcctcccgggttcaagcagttctcctgcctcagcctcccgagtagctgggattacaggcacatgctgccacaacctgctaatttcttttgtattttagtagaggcggggtttcactgtgttgcccaggctggtctctaactcctgagctcaggcaatccgctcaccttggcctcccaaagtgctaggattacaggcatgagccaccgtgcccggcttccgcctctcttttttttaatgagcaatcataagttattatcaactagcatgcaggtaataattttcttatcttgttacttgtgttccaccactaataactatgagactgcaggcagtttttaacttctctgagccatggctccttccctgtagaattatgcagtacttcttgtgaaaattgagataatgtgtaaaaataaaaaaaaaaaactactagcactatatcagccaccatacttggctctcaccagcattctctgtgacccaatcgccagagctctgatacttattccagactcctggcaccatgtttctattgctgctgcccatattcccctcccccaacagatcccaatcacccttcttgcttgagcctattgctcaagctttctgttttgcctttcatacctgtcagttctaaatcttttccaggtattcttgatctctcatgtcgaccccattctgccactgacaaatctagttctgagagtgtgcttcagagaaatttagatttttgagataattttgatatatagtaatgagaatctcagccttatggcagcctttatgctttcagccaaggtggaatcctggccaaaatgattttttttttttttttactttctgccatggtgcctggaatttcttcaatatagactcatttcttagctcttcaaaggcttccaggtttttagattttccttctaagcctcaaatcctgttggtcatcaccctaaataatctatcacttatcacctgcaacatgctcaactgagataggtcttgtagaaatgaagcatagcctgaagttgagaacagaagaaacaggaggagaaaaagcaccagaagcaaatttattctcatatcccagttttgagaaaagctagcctactgtaaccctaggagtttggcggctgctaatatctaaaaatgcgctggctctgtagcttggaagaaaaagaggaacagccattctctttctgctttccaagggtaagcatggccaacctagtatcctgctgtgcaccatgaagcatcatcaggtgcagattaggaaatgaatttacattaagtttcaagaaagaatttctgacaatgtaagctgaattgacaagaacaaagttctgaaggaagaggccaaaccattactgaatgggtgatttgtggctgaactggatgaaccgatagcattccatggctagaatttgtgtcactggttcattctgtgtttcctcttattttccaaattgcattcaatcgatatggcagaaatgaatacccctatatacaattatttcaatatatcttatataagtttagaaggtgaagcctgtatatatttttcatgtaaatgtagtattcccctgcaactcagtgcaataactacccacagtgctgatacataggactctctcaatttgtcccccatgtcagaaatgctgtgcaaaatccccatagctgactgcaaaacctgccctgaagatcaaataaatgatatacatacgaattcctaataagtgctcagcaggttgtttgggcttatattagtctcctacagctgcctctcgggaagggataccccaacaaagtgtttgttaatgcttgccacctttagagaagtctcctgggatgctgcctaaacctacactgtaagcaaagtggaataacaagccctttgaaaagtcacttgggaagatgacaacccataatggtcactttggctaggatttaaaatgctttattattgtcgaattaaagcaccctggccatattgctctggatataccccgtcttagccaatctcaggtttacaatacaagaacaatctcaatctgatttgcttaatgaaaatgtatccctctactttaaaacagggagataccccagttccttaaaaatatatgttttattgcatatgctttaaaaaacctatttacttagcagtttcattttgtttgcagcctcattgcattttcttctctaattagcagatacatgcatcatctcttggagatgaagcaaatatttttcttttcctcattgggtagtttcccaggaaagaagctcacggcctcactctggctccgggtttgctgtgtgctttcccacacattctcaccctaccacacttttcctgtaatgttgctgagttcggctaatttagatcctttctctaatttaagttgctttcatttaacttggcttgagagtgtctgatacttacactcacaaacaaaactatagagttttagaactcagagcagtgcttcccattgagatttctggatgccacaatggtgcctgcaagaggaaactcatcggagtgctttcatcagcaaggaactggaattcctgaccagtgataagacaagatgactgtggcagcttcagatatatttacaatttgacattcaaaggccaaaggggaaaaaagatttttcccctgtatctcactatttttcagggaggaaatttttcagacgcttcctatcccacccaacctccagtagagttctccttaggtctcattggttaaaattggatacatagtcaccctttaatcaatcgattgcacaggaaaattgaatttccatgatgactatagcctaatcatgatgcatgtcctggggctgacccattttcctgagcacagaatttgttcagtgtaaccagtttctgagctaaaggaaaattcacttaacaggtagagaagaatagatgtgagtaggcaaccatacaatagtgtttgttttgaggacaattatgagtaggttttttagatacattgtatgtcacttgcaagtgtataagcagagtttgctatttttttgagatattttttgagtaactgtcatttctttgtgagatttaattctagaccctaattctctcactgcacagagagggagaggcatgggcaaatatatgggattcctgagggaaaatgtaggcagaggggtgtagggtggccatacaatttataacttaaagcaagacacttctgagagtcaaaaggagagctgcgaataactctaccaagtcaacaggtataaattatcctagacaaactaaactgtatggtaaagtcagatttatataagggagtatatttttaaaatgttatggggaagctaaagctaattttttaaagtttttgtaggtggagaaaatgccacctttatttaggatcataaaaaattccaaatttatatgaaactttttcatgtataattttgtttaaatcctaagtcttatgagacatgagacattgactgtaataaaaagtgcaaaaacctctcagatcttataggtattctatgataaatttggaaagtgtaatattagcatctataaaatcaaaatattgcctgttggtttctgttcactggaaaattataaatgttgatcattttgttttacacaatgcctgtgccaagtcttcctattgtcttcctcaaggcctctaacttgccaggttttagctatcagtgatattagtaagaatctttttggtcttggccgtgatggaagtctgaaaaacagcatttggcaagggaatgacccaaacagaataattttctatagacaaaatgtgtttaagttgatgaatgaaagatgtgaatgctcatgctaggagaaggggaaaagcattggtatttcccttaaagagaccataccagggtattttatttcctgcaagtggtttaattttgtacattgcttctctgctcacagaatgttctctgtctgtcataataaaggagagccttttcattgaaatagacctctgaatctgttttagcgactgcagtgacagtctgtatgtatctgaaagaatgagaggcataagacacctacacatgttcacatctagggtagtattttcaaaaaatggagttactttgaatccccgatcgtctctttcttttactcaatttcaagttaatatctaatgtaaaacttttataaatagcaaagagacttatacttctctagctttgcaatatttagtcttgctttttcttgttggcacggtgtgccctttaccaaatgatccatccaggtgattgatactaaaacatctcattgatttcaagtttacgtgtctagatattagatcctagaaatgagttgttaataaatatcagctttacatcaagagtttaacagaaacatattcctgaacaaatttccattgccttctaaaagggttatttcttggtctgcagagctgctaatctgtaggttgcattcagtctaggctatcagaatagggcaccccatgggacttgatgatagtattgtcacttagatggcaaacaaggcatgaaataccttttcatagaactaaacaccctcaaatggggacatgaaaccctgtacctctgggcacagtcaaaagttgctgtattaagtcatgtgtttccggtacttctgggctcattaacccacaggttgtttcttgctcccagggatcattctttttggtccaaaactaaataaaaaaaatagatagatcttatggattgatgtgaatgttgaaacagaagctctactactaaaatagtggttcataattaataatcccttgatctttactttgtttttttcctaaggggcagataagaaagcaagtacaaagcaaacttaacactttggcagaatgtaatgtatctgactttctaaaattctgtatgccagaataactggctgtttcccattccttgctcttgatatacagccaacagcctagccaggagccatgtcgaaaaggaggggaggcactcagggcagtggtttttcatggcctcattctttatagtacaatagttagtgtcccactattgtacttgtggaatgactctgaaattgtcacaccatttatgtgtaagaattgctacttctctttatttctccaattcaagcttaagttttcctgaagtttccccaccttctggagtggcaggaaatttagcaatttccttttctcataatggagctatatatggttccccagctagccacgacagaaaaacgtcgggatgaggatggttcttcagtcatggtggagacatattttctgtgggtcttttggctgtagtgctttgggccatgccctgtgttgtctgtttgaagtactcccactccaggtgtgttcagtgatgtgtggtcagcaacgctccctctgaccacgagacagcttctgcaaacatcttctccatcctgtgtgcggcatgaagccagagcactggactgtgctaccttgatatttgctgtgggttgaattgagtcccccaaaaggatatgtcaaagaagtcctaatcccttgttcctgtgagtgtgaccttatttggaaggaggttctttgcagatgtgattaaaatggaagctaagatggggccattcataagatggagagtattgtgggtcctcaatccaatatgactggtgttctcaaaagaaaagaaggtaaacacagagacaggcacagagaagagagtgccatgagaagatatggacacacacagggaaaaatgccacgtgaaggcagagacagaggctggagtgatgcatctacaagccaagatatgccaaggatcactggcgacatcagaagctaagagaaagtaatggaaccaattctggagctttcagagagagcattgctctgctcatgtcttgatttgagacttctggtctccagaactgtgaaaaataaatttctgttgttttaaaccacccagtttgttatggcaaaccctaggaatataatatagttcccttctgccctggtatagttccttacatctttctcacccaaagacgtgactaggatcatttaacctaattcccctctgttgagtatttgagaacataatgagaaccttcctaggactggagaagataaagaaaatgctacttcaattttatatttttcttgttatctcaccctgctaagcttacattttcaggaggcaagtaggtattgacagttcccaaggtcaaacttcctggcctcctgactttgttcactctggcatattcttcatgtagaatgtctcttagaacacaggcttttcaattattttcagtaaatgtttactgagtacctcccatgtgcaaggcaatgggaaaagatagtctagatagtcttagtcttcaatgagccaacaatccagagcgacatatagagttatgtaaatatatttaccaagtgttagaggagatcggtgaaggtgtgaatagtttttataaggcaaaaggagtggtggtgtcataaaaatctttacctctaagggttattttgaactgtgtcttcaaggatagggaagattatatcaggccaattaggcaaggacatcataggacaagggaatattatgataaattacatggtaggtttgaaaagaggggttggcatgcatgattaaattataggtggggtgaaaaaatggtagtaagtgagaaaaaggtgaattaagatcaaattgtgaaaaatttgtgagtgcctacaatgggccaggtcctcagctaattatttttaatacattgtcttgtcaggtctgagaggtaaatagttgcattacatagtggataaacctgaaaataaaatgacatgagtaatttgttcaagaaattcagatggcaggtagtcaaggccagagttcaagcttggcataagtcccaagcccctgttcttctctgtacaccttgctgcaaaagtaaatggggaatgcttcagggctcttgagaaaggtagtggcaatgggttggcccaggtggaggattcactggactttagaggttatatgcagagggctgtggcaaaacaggaagaaggtgatttgggatttaaaaagaggaatcctgttggaaaggaggggccatatgtacttaggtttgatgatcaattaattgattgatggttgaagggaataagaaaatagtgcaatgactgtaaggttctttgtttgagtaatgatttgaggatggtgccattaccccaaggtgaattagagacaggaacaacacgttcttgggaaaagataatgagttcgtttttagcttctttaagttttaagcgcctggtagaagatgtccagcagaacattctaaattttggcctggagttcgggagggaagttggggccagagatccatttgtgatttatcaacatggtaggacagccagtgacttttactgaaatacaagtctcatttctgacattccattgcccaagttcctgcaatgattacatgaagctattagggaataaaaaaagacccacgttcttaacatgactttgaggtattgtttgatctgggcctgcctgtgtctccagcctcattttgaggtatattctccttctgtatttcagttctcaaatgtatatgtgaaggtcctttctgacccagttgcccgataccagaatgccttcccaacatacatacacatctgtacacaaatgcatgtgttcacaccaacacacatgtgcaaatctgcacacatacatgcacatctgcacaagcaatagacacatgttcatatgtgtacacatgtgcacacatatgaatagattcatgtgtacacatgtgcacataaatacccatgcctgcacatgcacagatgtgcacatttcatccagtaattccaactaattcctcagattctcatctgaaacgtttttgttatcagggaagtcttctgtgacctcacagtcaaacaagtttccctgttccttctatgccatagcacttattaaattgtgttgagtatttagttttctgtcttattagaatggaagttccatgtcaataggacatgtggaaacatccacatatttcccttcctctggcactctacatggcaaaagtgggcagtagtctttgtatactacaggcacacatgaatgaattcatagacgaatggatgaatgagttaatgaggctatgagtatagatgagatatagtaaacaggtagggggaacacagggcacaggaatatcctccccactccacagtggacttccagcccactcgttctcttctatgataaagactatgactctggtaaactttgaagtctttctttctaacttcttgacctctaaaaggaagttggagttttcattaatgccgtgggtcaggctctgtggaaaatacaagaggaaaaccagacagtcctttctattagtgtctgaattatctcattaattgataccaatgttgaggtaatcaacttctcattaagacttctcattagatggctatttctctcttttaccttctggcagggagtttagagcatttaatcatcactttcctatttatcacttaaaggaaattcacctttcccccagttatcacatcctaatttttctggggtttgtaaaattttaatcttatgatagggcttttttttttttcctttgggtaagcctttagcaattgctatatccaacatttcaaagaagctgtgttttagtggactgaggaatttactcatcaagattttattttgccaacactcattcattgtatggaataataattcggcagttttcatgatatttcatgtctgggcccagttgctcctttggccagaatacactgagactgaaatagcagtttatttcttgcttaagtaatatggttttcttgtgaccaaaagcataggaacattttatttcaccccagacagacacttctcaggtttgtgattttaattataacaaaaactggatgaaaagaatgacttgatcatggcatagatatgccaccatcagaaaaaataatccacagacagatcaatagtatcgttttcatttatgaatactattttaatgtcttatgcacaggtattatctctacaaaccatctcaagccaaaaaaagaacttcttcagtcacacgtgaattgtctacctttccataaaaatgttctgtcaagagctttctgcataaaagagtaaaaattttcaaataacttgtaattttttattttacacaaaatatctgggctaaagaaagtacattaaagcaacttgcatctcaaaacaatacatttctctggttgaagttttagtgaaaatcgatttattcctcctctgagttttacccaatgggtaaagttgtctaaatatgggattccttagaatccatcctccttcccaagcatttccccatgtttccttccacccccaaattcttaccccatttcaggcagagctgagcaaacataagccttctctgaagtattgagggaaagtctgctaaacggctaaactacttaaggagctaacagaaaaggttgtatcagagaaacagtggagaaacacaggtttctaattatatctggcactggagagaatgtcaaaggtactgggcctggggcaggttcacaagagtgaaagtaagagatttaaaataggttctcaactcctgataaaaacacgaatatttatttatttagtctagcttttctttcttctcttatcgttatgattattattactactactacttttctgacttttcttttcctaacctactagtgtttaaacctcccgaagacagaggtcagttctgctttgatcaccactatatactcaacaattaacatatattgggtgccgagtaactgcagagagactgttctctatagttttaaacgttttgaattaatctctccctattctgtcttctagcctcttttcttccccttcagtatggtagcatagactgtcttttccatgttcttgaggtcagtacatttcaggattataatctctcagatagtataatatcagctcataatcttccaacaaaatggccttggatgacggtaggtagcaggatgaagagagtctgcttggactgaaacccaattcaagagttggaacccatgttggcagtatagatgttttatcttgataatatttctttctttcaatgaaatgaaaaagaataagccagaagaactgctttacccaagcccagattcttcaaatgtgctttctcttgattcctgtaggaagacactgaacagaattctgcatttctaagaataaaaaagaaaaaaaagttaagtgcattaaaaaaagagcaaaacaaagaaaaaattaccaaactaataaaatagtacagttggactacaccaaagggaattttcatttgattctacataattacttcaccttactctcctctggacacatcatataatttaaatgaacaaattttaaaaagtatctttctaaaatagccattaatttggggactattatataaattttaccataattgattgtgtttagtacttccctatacagaacattcttttaataagatgactgaaaggcttataaaattcaccaaatagaatctctttatgcatgataactggtggtttcaagcaaaagtatataggagtgaatatttaaaatgaaaacaaccagttaatgaagtatattttgctatttatttccaaataaaaacaagccttggtgtctaagacttagttaactaatttgtgattttttaaaaaaagtatagatgaaaaggtagctaggtagaaatagaaatagcttagaaggctagatacacagatggcttccttatgcagatttaggaagcaaagtaaatttatactaactaaagaatatgaaaggtaaatgacaagctctatgtatcatgactgactatgctaattatagcttataatattctgctggacctaagagccctcctcagctaaaaaacaccataaagttcatttaatacaaccttcatattttactgatgagggtactcaggacttgagagagtagagagcagacacacctacttcctaaagccagtagtgtggtcttctttgaggacattgaagttgagacatgaaggctgagaagtggctgatcatgtgatgagtatgtgaactttgagggggattaatgcttggcagagggtgaaagtggcatcaacaaaattggtaaggcaactggccagactgccagcatcgaaggccatagtaagcaattaagatataattccaaaagctatggaaacattggtgggttttaactgagggaatgatgtaatctgatttatattttgaaagggtactctggttgctttatgaaacacggattgtaagggagggagctagagaggaaaagggaagattacttagaaggcttttaatagggaggttaggagaaagtggaaatattggatgtattttttgggtagtgctaacaacatttgccagtggttcttggatagggaggtagagagagaattaatagaaagggaggaattgagggcatctactttctttttgacttgaaaggctgagtagatgatggtagtgtttgccgagatggagaagactggggtagaaacagaaatatgttttaggttagtatttatattttatttgacttgtattgcctaatccaagtaaaaaaagattaatcctcacctagagccaaatatatattttattttagtcaggaccaatataaatgtgccaaaggaaatgattaaatatggttagtatctattccctatatagtaaacaaaataataatttaattttcacagtggtcagaggccatcttaggaactatatgtgaaggtagaatttgtgaacagggaaggagtagtagctacgtgtcactgtgttttatatgataagtgtgtatatgtatattaatgtgtatggggacagaatgtccctatgaacttaggaaagtgaattcccttgggttagaagacaatgtaaggtagccctgtattttcaagggtgatttttagaaaatcctaatcatttttcctgaagtactttgtgtgaatactcatgaaattatagacagaccaattctcttttgcttagaatgaaaatcatctgttatgccttcatcatcagtgaatgttttgggaacttcaagactatatccatcatccagagttttggcacacacacaaaaacatcgtttgtgctagccttggactttgctacctgacaaatatagtaaagcactcaatggagaaccatacattagctggatatgtaggacatcaaacttaaatgttatgtaatagctatgaagggcacagtttctcttatagttttaaacattaaggagtactgtctgaaacttgaaacttaaaattaaaactagtaaatggcactcttaaactgtccacatccatggtaatcacagttcaatacagcatacttttttgaatgccaccaaatggaataaaatttttcctaaaatgaatgaactctctgcttctagtttaatatagcataacaatacatacatactcaaaaataacttgaagggagaaagaaatttttcctttctagaagaaggggaggcaatttgtgatgcacagtagagggaggagaaatgagagaattaaattttttacgctgctgtcagaaaactgggagaaagcttaaagagaactaatggggagatatcattagagaaaacaaaaactcaaactaaatctctaaatggttgagttggacagcattggagcactcatttcccttgtaatcactctaaaaaataggctactgtctacgatagataatatgacaatttctgttcaggtagagcgtactatttcaatgtccaaagacgttattcttttaagtaatagatgttcagtgaatgttacattggtttttaatggactttccccagttggttgcttatttcctgatatttttatgttgtgtattcagaagagtgtggactggcttcagctaatcctcataaattgtctatccattagcagatttaaactggacttggggctgccatgtttgtggattcagaagtagccttatcaatcaattagccttatcttcttgtaagtttgatgattcactaatcaaacttagaagaactagataattctatttctaatgtttttatttgttgtattctgtagacaaatatttcagaataattttctccaaaagcctgagtaaacaaaggaaaaattttcagcaaaggcagaaaagtttaaaaacttggcaaggaataactcagtatgacaatattggtgaaccttccttttattgtcatacatgaaggaaatgaatatttaaacagattttttccaggcttgtggggatttggcaaccccaggctctgtctgtgataagatcttactggcctgagagtcctgcctagattcattaagaatttctttctgtctctctctttcatacattatatatttttcaggtgaccattttagcaattgtacaagctatttttaatattaaattatgtagcctcagctgcttataaggagagtttaaggagaatattagacatatttataagtatcgtttgtcatgcaagggctaattaaccttgaaaataagcattggcctaccttcccagtacctacaataaagcacactaggccaaatctctatgaggcggtagttttctatttaaaaaataataataataaggtataaaaagttactaacaaccatgcacttgttcccctcaacttaaaagttaaaaaaattagaaaagaaaggcaacatggctaataagatatgtaaattaaaaatttcctactcttctttcatttgtcactatgttttgtttgtaggtagattcaaagaataccatacttgtcatagacaattatttgtattatgttatattattttaatttactcagatctgttgcaatgggaaaaaaattcaggaaaaacaataactatcaataataaatataaaagcatgcattttcgtaacagaaaaactgaagagagttaagacacattgtacgttccaagagggttggaagaacacacataagaaactacaaagagcatctgcgagacggcttgtgtgaactgatggtgtgggccaaccttcaaattgcactgtcctctacaggtcctttctagatccattcctttatcatctcaaatgatgtgcagtaataatgctgcttgcagaatgaactgaattatcatctaccaactaggatgtgagttccatgaggacaccactgtcacttttgtctttttattcattgctttgttccaaaagcttagaatggtgcataccatgtagtagaaacttaataaatacttgctaaatagatggatgcatttggcatttgctgttttgatgacaagtaatatggtctatagtttagttaatatgatgcattaaggtcaactgcctggtttggatcattgttctatagttatgtaaatgttaacatgaggaaaagatgaataaagggtcctgggaattcactatttttgcaagtcttctttcaatgagaaattattattttatttatttatttatttatttatttatttatttttttattttttgagacggagtctcgatcagtcgcccaggctggagtgcagtggtgtgatcttggctcactgcaaactgcacctcccaggttcatgccattctcctgcctcagcctcccaaatagctgggactacaggcacccgccaccacacctggctaattttttgttcttttagtagagatggggtttcaccgtgttagccaggatggtcttgatctcctgacctcgtggtctgcccgcctcggcctcccaaagtgctgggagtacaggcgtgagccactgtgcctagccagaaattattttttaaaaagttttttgggaaattgagaatggagaagggaaaaaggagtaaggacatgaaaggctgaggaccattgactctggaatagtgcaggaagacaaggtatgggcaagaaagagctgatgtgagtgctggcaatttgcctctggaaggccaaatagcatttgactactactcaatctttttggaaaatcttgaattaaaatctcaaatactcactgtccactgtgaaatttcaatttcatcagtattcttttacctgtgctgcttttatctatctgctgatggctgctagtgctagctgcacaaagccctgagttctagaccttctctccctgcttaaagtttattaacaagggctgggcacagtggctcatgcctgtaatcccagcaccttgggaggccgaggcgggcagatcacctgaggtcaggagttcaagaccagcctggtcaacatggtgaaaccccatctctactaaaaatacaaaaattagccaggcgtggtgatgcatgatatagtcccagctaatcgggagactgaggcaggagaatctcttaaacctgggaggtggacgttgcagtgagctgagatcgcaccgtggcactccagcctgggtgatagagagactccatctcaaaaaaaaaaaaaaaagtttattagcaagtataaatgtatcagaacttaacaggtcaatttcttgtattattgtgagactaaaaaaaattgggaaaaaaggaaagctttgaagagaaaaaaatgggtagccatcagaatcattttgtgaaaggaacaaatactaataagttaatctattgttctcaacaacctgttatccataataggaaaggaatccagtatgtgcatgactaagttaactactcaaaactttcaaaaccagaagccaaaagaagttatagtttattttaagcaatatccacaaaacctaatatagtccacttctgagtaatcatttaattatggtattctatcattttatttttaaaaaatatgctgagtacataaacatgactaaaatatcaacacattctttcttcctacacataactattaatcttaaatgttccaagagaagatgtttaaaaagtaaccctttgcagaactagcccttctctctggagctgtaggcctctcttcttcccagccccctccttttcttttcttttatcttactcgtcaccttgcagtcatgagtattgtagcatgtaggagtggactgctgagagaagggaagaaggatgcattttgcattcacttgtacatcagccttgaagcctggctggcggcaatattgtggacaatagatctttcaaacaaatagacccttgtctgttccttccttctgtaattgttggcagagttctttgttatgtgtctggtttcttgaaactttgaatgaataaactaggacacgggattaatgtaaagaactggcatctttgctgacttattcaacagactgtgtgtacatagaaaagagaaataagcactttcagaagtgttgtctgcacatgcctgggattttacaaaatttaaacaatgtgaaatgcagtaccttgaaaaaagccaggctagtctctggactctgtagtttactttctaaataaaaaatatcctattgaccataagcaaatgaacaattcacctgttagcatatggaccaaatataggccaagatatgtagtggtagagttacaagtaaattttttgatgtgaagtgtcatagaatttacagccaaatgaagtgagtacctctttgtagcagggtaatgatgaaaaagattaggcaaagtttaaagttgagacgcagttttcctacctggagagaatggacattgttacctaaaattcacattgtacaatggagtgatacatgagttgttcacagtagaccgacctttctcagcctcagctctgttgacattttcaaataacaacttgctgttagggactgttctgcacattgtaggatgtttagcaccattcctatcttatgcctgctagataccagcagcactccccttccaattgtgcaaataaaaaatgtctccagacattgccaaatgtcctctggaagtcaaaaaagcattcctggttgagaatcattgtactagaccaaggaatggatcatattgaccagaaggaagttgtatattattaaaaaaaattatccaactccagaagaagtatactggggcagtctaacttggggaccttttgaatgtctccaccatgggaacaaaggctaagtaaagcagtggcccattgctcagtccaacagcactcctccatcaattaccccctcttgactttttgtgtctttagtctcttaatcggcctcgacttcttttccttgacctttaaattgtctcctttatcctaaagcaaatcaaaattactcctgataatgcaaaggtataaaattactatgatgtcttcacatcactactaacttttttgaaaagtagtcttcattctctacctctacttcctcactgtctactttctggaatacatcccagtttggttttttccccctatgtcactacttaaagtggctgcccaaatgctacaatccaacttctcaatgatcacattaactgaactttttgtgtacttatctttgacttccatgcaacttttgatactcttaatcaatggttctgaaactttttttgtgcatcaggatcactggtgagttattaatagttaaaatacagatttctgaattcaacacccagagttcctaattccgtcgggctaggatgtagactgaggatttgcatttctaacgagttcccagatactgtccacgctgctagtctgggggatcacaaatcaagagccatgccttgattattctcttcttgagtgcttcagttgacttttacaataccatagtttcctgatcttgacgcttaatgacatttgtagtcacattttctggtttcttctaccctttttctctaaaacagggcaatgttgcccctcagagaacattggtcaatgtctggagatgtgtttagttatcacaaataactaggaggaggggaagaaggaagagaagagggtccactgctactgatgtctagtgggtagaggccaggggtgctgctaaacatcctacagggcacaggacagtattattcacaggacaaagtattattcgtctcaatatgtgaatactgccaagatagagaaacactgctctggatgcaggcattctctccaagtagatatatattctttttttttgttatgagacagggtctcactctgtcacctaggctagagtgcagtagcacaatcatagctcactgcagcctccaggaatcgagacctgttgatattttagtcatgtttatgtactcagcatatttttttaaaataatatgataaaataccataattaaatgattactcaaaagtggtctactatattaggttttgtgtatattacttaaaataaactatcacttctttaggcttctggttttgaaagttttgagtagttaacttagtcatgcacatactggattcctttcctattatggataacaggttgttgagaacaacctggtcaatattttggagagatgaggacttgctatgttgctcaggctggaatcaaactcctgggctcaagcgatgctcccacctcagtctcccaaagtgctgagattacaggtgtgagccatggcacccagcaaagaatggcctttttatcttctcttcagtctatacctctctcttgtcgacctcagacatgcccagcacttcaactctcacacgtctctggaaatgactcccagaggtattatctttaaatacgacattactcttgggtctggcctgaatttgcaactgcctgataaatataagcttaatgagccaccggcatcttaagtttaagatgcgcaaactaggccaggcacggtggctcacgcctgtaatcccagcactttgggaggccacagagggcgaatcacctgaggtcaggattttgagaccagcctgaccaacatggagaaaccccgtctctactaaaaatacaaaattagacagacgtggtggcacatgcctgtaatcccagctacttgggaggctgaggcaggagaatcgcttgaacctgggagacggaggctgcggtcagccgagattgcgccattgcactccagcctgggcaagaagaacgaaactctgtctcaaaaaaaaaaaaaaaagaaaaaaagcccaaactaaacatatccttccagtaagagaatcctttattgccagtaatggtaattatttgataaggtgtgtctctacccccttttgaccttcataacttgtaaaaatggtacaagatgattcttttaagaaaagtataaaatcacatgtatggttcagaaataccactctggcaggaatttgaggaggtgacagatattcaagaaaattgaaagagaaactttccattccatgtgagattatctaacttttgattggccagggagaaatgtgtcttattattccaagtgaaagtaaatgtatctgcctgcctagatctcagcctagtattgattggagaaaatactgatctgatgctttatgcttcgagaaagaaagcatattgagtatatgatcttctcacacatatgatcagtcttttcattagatttgttttaccgtgatgtattttgttcctcaatagaatgccatgtatatgattgttactggtactcatagtaaatctaataatatccaccattttcagagcacttactaagtgtcagaacaagtgctttgcatgccatcttatgtatactaagcctatggggtagattttattattgtacccattatgcacccatggaagctaaagactagagagaatgagggatacacgcaaggtcacctagatcacaactggtataattaggatttgaagacaggctgtttgacacctaagctgatacttccaaagactattccaatagcacaaaattcaattgctgtggggacatggttctcagaacctggtcttcttgaatcactagaccgatcctcctcagaatttaagacctgggtggaaagggaaagaccatccagctcaccccatgtgcctctcaggaatggtgggggttgtcctccattactgaaagaagcagtacagccggctaatggatggagacacaggggagagattttctttgtgggagttcattacagaggcatctgcagacctctaactctctcctgcatgccctttctctttcatagcttccatctctaagctgtaatggatgcaaaattactgcagcattttgttctgccgggctgaccccattacgcatacaccacagtcataaagctctggcttagttactgtttgcatgttcaagactactctgaggcagggaggtgtgaagtttggctacattttcaaacagagtggatgccttcttcattttaaaaacaaggaatccagcctcctttcagagtgaatattgttttgattactgctggactaatccatacttatttaccccttaatgatgatgtttctctggtgtgtgaagggtctttaaataaatgttagggcagtgatgccaggaagtcatcatttcacatgcattagttgcagaagtttgggagacttcatttccaccccaacatcctgttgtcttgataatattttattaagacatagcaaaagatatagcagggtcgttagataatggttaataaaatataagagtttggaaaggtagtgattctcaaaagttattctcagtcttccttcttctccatgccttgtcaaagatttctgcaactttcatctcaccacatctggtgagaatacttatcagagaaagtgagcaaactggttttggtaataattgacatacctttatctactaggagattctgattttaattcattcagtaaaaaaatattctgtttgttctatgcacatttctaacacttgagacatattcaagaataagacacacatagtccttgtcctacagcttacattctggtaatatttgtcagaaagcagtcacatgattatgaaaaggttacccaaatttctgtatattctatagtttatcctatatcttcttccactatttcacacatttcataaaagatctcaacatataaatattgcttttagcctgtgatattgtctccatggagggaaggactcagatggaaataaggtatcacagaagggtgcagagtgccttttcttttaaagtaattgcaaaaataggagttatattggttatcagaacatgtttgtatttcattattaagctggtaaaaagaaccatggatatatggacatgttctggatcctagatacttaatagaaatgatcactagctgtccctaaaggatttttattatacttcctaaaagcatggactatctcttctgaggtatgccccccaaaatgtcagtagcaataaatttgtaagaacatttttaaggcagcacagacaagtgtgatcggtagaagtcatggtgagtgggagtgaggaagggctagtagcaaacaagaaaaagaaaagaaaaaaaagcattttcagtctttggcagcacttctgtctcttccagcatttgtcagaatccagttattaacctgtcagcctcagacagattgaaggagacaccacctttcaaggtgagcccttaagaaaagaaaaataagaaacagtcattgttggggttgacagagacatgatcccaccaaggcctgggctatgcttggagaggaaatgatactcaagcctgagtgtgtgcttaggggtcaagagattaggcttaggggagtagggatatggaagtagtgatagcagtgaataaggaaagctatctgtttgaatttgcttgtgcaaagaggcagaaccatttcaaagatacagggtgcagattttagtgaagatgttagagctgacccctgctgggactgtggcatttcagtagaggaatggtgaatcccttcccagtggggaacacacatcatccacatacatgagggaaaaaaaaaaaaaaaaggaatgactctttttatcaacaaaagcatgcccttatctatgattgtggtgtcattttcttttaacaaacaaggatagtttttaaccttagtttgctcacaaaagcttcagcaaaaaacaagggacatcaaatatttctggatttccatgttctgggcacatagtagggctgtgccttctgaaacttcctgtatagaatggagccacatgatcatttgcaatcaatgagctgtgaaggggaatggcatgtgttccttacaggccaagcatttaagtgttgatgtgagagtcctcagagcacttttttttcttttgcctttgtcatggtgccatggctaccagcaactttcagacagtggccattgcatcaacctcaaccctgaagtgaggaaccgtggcaacatgcaggcaagcctcaagcccgcccacagtagacaaacatatacctttattgttataaaccattttggacttgtttgttactgcagcataatctggctcttatagtggacacatttggttagatacaagtgtaagaagttttattttccttgatgaatagtgggaaagtgtgtatataatattgtaaaccttttttagcacccaaattaacacccctatgtacccaaagtcctatatctgggctgcagtatccccaaagacattttgtttgttttattttagtcctgtaagaattaaagtcaactttttaaaaaaatgcagtgctaagagagacacgacaaaattgagacaatttattagcggattctttcttttctgaggggtctttttgcatgtaggagcagtcattaccatctgtaaggtgtctaaagctcaatttatttaaatcatatatctgaagaccaaaacttttaaaacccaaattttgtttttaaaactttataaaagatggtaaattcctcttcaaaatttaaacttcaactccaaatttagtatgggtgatttctcataacatttcaaataccttttaaaatacataccttttatacttaaacttaaatctatagtaaattatgagtttggttcattttatcattatatctctatgtgtttttgtattttctgaggattatattagattaataccaatgaatctattaaatagttgttgcttctctaatatgaatcaaatctaagctgctgatcaggctgaggtgttgtttttaaatcattaaatttatttattgtgtcaagacataattgcctttcccaaaaagtctaaatgttttcctataatttgctgtctctccacaagtaatacatttttaaaagccatacttggtgagattatatgatccttgttcattattaaatattgccttttatttaacactattaaaaagatatattcttataaacagcttatttaaagtcaggaaccatctggaagtttcatctcccaaaagatgagatgaatccaaatagttctttctctttctagcatgtcaaactaatgtgtcatcctagaatgcatctctgagccccatttcactaggttattaggtgtgaagcccagatctagaccaagcctgtctgctcttggtaagcctctttctttttttcattttttctaatactgtttgatgtatttcctgttatttttatttactgttttctacttatccaatagtaacatggccatgcctatactttattactttgtaaacaagtacctaagtaacagctaaactaaaacatacatgttcatatattttagcattcccctaatcattgaaatcaataacaattcaatatactctattgtattcatatttattttatattaccactatgttttatgtaataatattctgtatattaacttttctgagcatcactatgactttttcacaaacttagcttgttttaatcaacagtaaaaatgaagagtgatgttgttgttagcaatcttatttagtgttcaaattattatcaaatggccagcgagatctcttttaaatgggctccttattctttcagcactttatttgatatttgtggccacatacttgtattttgcaataaaaaaaaatttagattctttgcaattattttcttccgctaagcagaaaatcaacaaaattccagagaaccttgtgcaaatgagtgttgattgtggccatggtgcacctgcactttaagtaataacaaagctgaaaaatatatttcttttagaggtcatgagttcacactgagaagtgtgaactcctcatgagttccatgagaagggcataactttaggtaatttcttgtaagctcattgccactatgtaaaccagcttatgattcttatctagttggtcagtatactataaatatcagtgaatattcagaatagaagctgatagaaaaatcaaaccatagaaaagcagggagagtgtgagaatatattcaccatgtgtacatatatgcccctaaacaaaagcctgaaagtatctactctaaaattgatttatcctcctcactatcctttttaaattttttatattattcaccttttcttctttgaacatattttatttttgtaatgagaatgcaaagatgttaaattttttaaataactaaagaaaccgttccagcaggaaatagcactatgtgttgttcaacatacatagtgaatcttgcatacacagcatattaataaaatctcaaaaattgcttactctttacaagtaggagatattttgctttttgtgtccatactttccctttagaatgaggaggattctaagtaatcttattgtatcacatttctacttcattgcattgctctctaggggggaaattaacagcagaagacttgtcacttgagttctattcatgaccactctactctgagcattacagatggaatgcagcaaagaggagatacaattctaggggaatatgggcccatagatctttcaaaacaaagaagaaaagctttctcacaattgctatagcaaataatgctttccactgctttagagtcatcactgtaagaacatttgatccacaagtgaagaacaggactatattccatgtggcttttcaaggcgactgagagcacctgctccctagaatccttcagccacattgatatgtgtgtcataaaactgtgagatcatgatcccattgatgtgatatgaatcaagaaagccatatgctctttgctggtataaatgatagctgcatgagggcttaccaataagtgaggaatgaaatttgaattttggaaagaagtttgtagctacatgaataccttgcagcctctcttttcaatagtctcaacatttttactgccatgcgatttcttctatagctccatttatatccaacttaaatttcactctaaacattttcattttttattttttattagacaattctcttttgattatctcgttttataaaatggcacatgggtttatcacttggagacaaagaagcaataccctatatgctgtgtgtgaactgagcaatacgttcagtgaccattaactgacagacttcacaagaactcatgagattggtcaatgatcacgaagtgcatctgtaattcatgtagctaatgtggactgaagaactaagagcaaaacatacacttcgtgcaaatacccacagttaatatagcatagaaacagaaatttaagctctgttgttagaaggctggagttatgaaccaaaccatagtaactaaaattcatgcatattacaaccaagcaaaatgcagactacctgtgtgtatatgtacatttagtatttttttgtttgtttgtttttaactttgtagcttcagcacaccatgccacaaactttgtgccttataataccttggctgaatatcttctcagaggatgatcattcacttttacctttgtttgccaacttattccactgcggctctttttgtcttgcaatgcattctgtgtactggtgaagaagttttgaccacgaatagctgacaaatatgtgcaggtggtcatgcacagaagcagaaagaaaattcctctgtggttgttaacgtgaaggttttccaggggcttggggcactggttaaggaaacagattaatgagcagcaaacaggaattgatgggagtcctctgacattttgaggatatccctacacatcactgcaggctgagggaagcttggctgaaagaaactggccagaggcatgttctgactttggctgacttggaaagaatggcagtgctattaacaatgtacacatagtgggagaatttcctctcagtggaatgatgctttaatggtcccatataatgctaatgccattagcactctcatttccagatactacatgggatacataagtagaagagttaggaatcgttttctgaaaagacattctaatattatttggatattaaataaaaataaatacctctgttaagatattcagacccagtattagtgtaagtgggtacagtagaaagaggccttaacttggaatatgtagtgattaggtttaactcacagccctgccaattattagctgtgtttgcccattcatttattcatacatttgtatacattcttttattttcttacaaatctttaccaagtgcctattacgtgccagatcccacaccaggctttacgcagtcagggtcaaatcacttcacctcttcaagtttctcacctgtaaaattctgagacttttttgaaatctattttttaaaaaatacatacttgattcaaacagcagctttataatttgaaaacctctattttactcctgtttttctttggaggccaaaggtgactctaaataatttcatgaaagtaatgaaaatataatctttagtgattaacttcagaattaagagagtaaaaagtatttttcaattcatcttcagcttatgccatcacctcagcaagaacaatgagtgtgcaacaattcactgttttgtaggatgctaattagagggtagactcctcatggaaaaagcccaagcctctggttgactcctgtccatccagatggagctacaatgaaatgattttctatggctgtgtgtgcgtgtgtgtgtgcgcgcgtgtgtgcgtgcgcgcacacacacacacaagcctgggaaggaagagccccccactctgtccattattcaactcaatgtttactgtcaagatgagttttccaatttccattgtttcccctaaattgagtctctcacatagagtttagagctggtatgtctgctaggaaatagctatataataaaacatccatataatagcactataattcatccagttattcattccttccctgaaaaataggacctaaaatgcatcattgtgtgtaggtttcaattaaattcagaggacagttattgactgactactgcatgcaagctggctggactgagagtattgagatggataagaaactgtcccctctcaaggagcttaaaatctagaggaaagagaggtgtataaaatatataattgaaaatgtttgctgtaatttctaagagaacacacctggggatgtgaaaatggacagaagggaggatttagctctatcttggaggctgggatataagtcagggaaagcatttcagtggagattacgcttaaagtgggagtactgtatacatgaataagcagagcaggccaggtaagcaaagttgtggttggggaaagatgcattccagacagccagaatgttttgcctcattggaagattgtttttctcacccttagcaccctctgcttattcgtctctttgtttttaaccatttctaagttgtatcttaagactctaatcaatgtaatgggatggctgtatccctccccactccatcccatatcacaccaccgaatgagcaacaaatcttggcgtctgaaaaatgtagcacctgacgccaatcaaaacttctgctcacagctctaatgtaggtctgggggcttttctgtgttacttgaaactagtattgattgcatcagcgctcaatataatgccccagtagtcatccttgctgctttagctgaggaacaaaaggtaaaatcaagctaaatgaaatgaggtaaatgtaggaccagaaaaaccagaagtcttcattgcctgctctcaggcatcatcaaaacaaaaggctctctggctggcaaggtcagtaagggagacgagagaggataggaatactcagagacaatatgttgccctgctaagagcaggtcatggtccttaatgtaagccatgtcatttgcttacagtctttattatttaatctctgacagatggaaattggttgagaacaggtaatggtacagagtcttctgtgtgtgcttgcatgccagtgagatctactgggagaattaacttctactctcccagcacaatcggtggtcattttgagtgaccacatcatttatctccaaaccaggacaccttggagaacacaagaggatactgttaaataaacgtgagtgtataataaacacacagtgggacttccccaggcaaacagggactcttaggggatgtatgatcaccttaacatgttttctgtctggagggaaatttccaaggagaaatataagtaatacctggaacatgactctagaggtaggctaagactgcagggtattaatcaatgtataagtttataagtttataagcatgtgaaaacttcaaatttcagcaatgattctctaaattttttgctgagacagataaaatagctgtttttttttctcacacagagtacattctcataggaatatctgaattacatgcagttcctagaaagcaagctataattacattattcaagaaaacactgcagttcaggctaatgtttttgtatatttgttttgtacattttgtacatgtttttgtaatgtgtttatacatatgtacatagaaggctttacatttggtgatcagcatttaaattatttacgtacttaaactattacaaatacactacttggcacactctttccccagatcttcatctggctgtcccttttcatcttctagatctcgactcaacatctccttcttaggccatttctgaccactataactgatccctgtcacgttctatcataatgtccttttgccattttcttagcacttattagtgtataaaattatcttctgtatttagctgtgagctttcctcactagaatgaaagaaattatggacaatagttccacctaccttgttcagtagtacacctccagcactttgaaacctgtggggaaacaacaggtactcaacagatagttgttcattggatggactgatgggaaataggccatcttgtctttattgaacaacaacttttgcaggaagcattctcctcccttcatgatttttgtgcataggtaagcacctgcttagacaactccagttcctgctctcacacttcaccactggattgttgcaatgcagtcttaaatagccctcgaatatggactcaaccacatcttgcaacaagattgtcatcagcacccctttcactatgcttggcctctatatactttactcttagccttctcctgaattagtcttagcccagtaacatcttgtgctgatgtcagtcttctggttgaccaagtaaacgtattttttcatttcctctttttttgctcgtctttttcatctctcgctgatgattgtcaactgcaatgacaccgtacttttatacactgcatgatgtatacttactcagaatttttcttattgccaaataaattatttcatacgcttatgcaactcctttcgttaaaagcatgttttctactttgttctcattattaacagaactattttttcagttatcttactcattgcttttgcactgattggacatcacagcattcaaaatgttcacaaagtacctaaaaaattgaacacagaggcctctgtggttagggtgactgaaaaacttaactggatttttaagtcagtctaattttaattaacttaaactttttttttccatagttcagagcatttatttatttttttaaatttattattattatactttaagttttagggtacatgtgcacaatgtgcaggttagttacctatgtatacatgtgccgtgctggtgcgctgcacccactaactcgtcatctagcattaggtatatctcccaatgctatccctcccccccgccccaccccacgaccgtccccagagtgtgatgttccccttcctgtgtccatgtgttctcattgttcaattcccacctatgagtgagaatatgcggtgtttggttttttgttcttgcgatagtttactgagaatgatgatttccaatttcatccatgtccctacaaaggacatgaactcatcattttttatggctgcatagtgttccatggtctatgtgtgccacattttcttaatccagtctatcattgttggacatttgggttggttccaagtctttgctgttgtgaataatgccgcaataaacatacgtgtgcatgtgtctttatagcagcatgatttatagtcctttgggtatatacccagtaatgggatggctgggtcaaatggtatttctagttctggatccctgaggaatcgccacactgacttccacaatggttgaactagtttacagtcccaccaacagtgtaaaagtcttcctatttctccacatcctctccagcacctgttgtttcctgactttttaatgattgccattgtaactggtgtgagatggtatctcattgtggttttgatttgcatttctctgttggccagtgatggtgagcattttttcatgtgttttttggctgcataaatgtcttcttttgagaagtgtctgttcatgtcctttgcccactttttgatgggattgtttgtttttttcttgtaaatttgtttgagttcattgtagattctggatattagccctttgtcagatgagtaggttgcgaaaattttctcccattttgtgggttgcccgttcactctgatcgtagtttcttttgctgtgcagaagctctttagtttaattagatcccatttgtcaattttggctttggttgccattgcttttggtgttttagacatgaagtcctcacccatgcctatgtcctgaatggtaatacctaggttttcttctagggtttttatggttttagttctaacgtttaagtctttaatccatcttgaattgatttttgtataaggtgtaaggaagggatccagtttcagctttctacatatggctagccagttttcccagcaccatttattaaacagggaatcctttccccattgcttgtttttctcaggtttgtcaaaaatcagatagttgtagatatgcggcgttatttctgagggctctgttctgttccattgatctataactctgttttggtaccagtaccatgctgttttggttaccttaggcttgtagtatagtttgaagtcaggtagtgtgatgcctccagctttgttcttttggcttaggattgacttggcgatgcaggctcttttttggttccatatgaactttaaagtagttttttccaattctgtgaagaaagtcattggtagctttatggggatggtattgaatctgtaaattaccttgggcagtatggccattttcacgatattgattcttcctaccgatgagcatggaatgttcttccatttgtttgtatcctcttttatttccttgagcagtggtttgtagttctccttgaagaggtccttcacatcccttgtaagttggattcctaagtattttattctctttgaagcaattgtgaatgggagttcactcatgatttggctctctgtttgtctgttgttggtgtataagaatgcttgtgatttttgtacattgattttgtatcctgagactttgctgaagttgcttatcagctgaaggagattttgggctgagacagtggggttttctagatatacaatcatgtcatctgcaaacagggacaatttgacttcctcttttcctaattgaataccctttatttccttctcctgcctaattgccctggccagaacttccaacactatgttgaataggagtggtgagagagggcatccctgtcttgtgccagttttcaaagggaatgcttccagtttttgcccattcagtatgatattggctgtgggtttgtcatagatagctcttattattttgagatacgtcccatcaatacctaatttattgagagtttttagcatgaagcgttgttgaattttgtcaaaggccttttctgcatctattgagataatcatgtggtttttgtctttggttctgtttatatgctggattacatttattgatttgtgtatattgaaccagccttgtatcccagggatgaagcccacttgatcatggtggataagctttttgatgtgctgctggattcggtttgccagtattttattgaggatttttgcatcaatgttcatcaaggatattggtctaaaattctcttttttgattgtgtctctgctgggctttggtatcaggatgatgctggcctcataaaatgagttagggaggattccctctttttctattgattggaatagtttcagaaggaatggtaccaattcctccttgtacctctggtagaattcggctgtgaatccatctggtcctggactctttttggttggtaagctattgattattgccacaatttcagctcctgttattggtctattcagagattcaacttcttcctggtttagtcttgggagagtgtatgtgtcgaggaatttatccatttcttctagattttctagtttatttgcatagaagtgtttgtagtattctctgatggtagtttgtatttctgtgggatcggtggagatatcccctttatcattttttattgcgtctatttgattcttctctctttttttctttattaatcttgctagcagtctatcaattttgttgatcctttcaaaaaacgagctcctggattcattaattttttggagggttttttgtgtctctatttccttcagttctgctctgattttagttatttcttgccttcttctagcttttgaatgtgtttgctcttgcttttctagttcttttaattgtgatgttagggtgtcaattttggatctttcctgctttctcttgtgggcatttagtgctataaatttccctctacacactgctttgaatgcgtcccagagattctggtatgttgtgtctttgttctcgttggtttcaaagaacatgtttatttctgccttcatttcgttatgtacccagtagtcattcaggagcagattgttcagtttccatgtagttgagcggttttgagtgagattcttaatcctgagttctagtttgattgcactgtggtctgagagatagtttgttataatttctgttcttttacatttgctgaggagagctttacttccaagtatgtggtcaattttggaataggtgtggtgtggtgctgaaaaaaatgtctattctgttgatttggggtggagagttctgtagatgtctattaggtccgcttggtgcagagctgagttcaattcctgggtatccttgttgactttctgtctcgttgatctgtctaatgttgacagtggggtgttaaagtctcccattattattgtgtgggagtctaagtctctttgtaggtcactcaggacttgctttatgaatctgggtgctcctgtattgggtgcatatatatttaggatagttagctcttcttgttgaattgatccctttaccattatgtaatggccttctttgtctcttttgatttttgttggtttaaagtctgttttatcagagactaggattgcaacccctgcctttttttgttttccatttgcttggtagatcttccttcatcctattattttgagcctatgtgtgtctctgcacgtgagatgggtttcctgaatacagcacactgatgggtcttgactctttatccaatttgccagtctgtgtcttttaattggagcatttagtccatttacatttaaagttaatattgttatgtgtgaatttgatcctgtcattatgatgttagctcgttattttgttcattagttgatgcagtttcttcctagtctcgatggtctttacattttggcatgattttgcagcggctggtatcagttgttcctttccatgtttagcacttccttcaggagctcttttagggcaggcctggtggtgacaaaatctctcagcatttgcttgtctgtaacgtattttatttctccttcacttatgaagcttagtttggctggatatgaaattctgggttgaaaattcttttctttaagaatgttgaatattggcccccactctcttctggcttgtagagtttctgccgagagatcagctgttagtctgatgggcttccctttgtgggtaacccgacctttctctctggctgcccttaacattttttccatcatttcaactttggtgaatctgacaattatgtgtcttggagttgctcttctcgaggagtacctttgtggcgttctctgtatttcctgaatctgaacgttgggctgccttgctagattggggaagttttcctggataatatcctgcagagtgttttccaacttggttccattctccccgtcactttcaggtacaccaatcagacgtagatttggtcttttcacatagtcccatatttcttggaggctttgctcatttctttttattcttttttctctaaacttcccttctcgcttcatttcattcacttcatcttccatcgctgataccctttcttccagttgatcgcatcggctcctgaggcttctgcattcttcacgtagttctcgagccttggctttcagctccatcagctcctttaaaaacttctctgtaatggttattctagttatatattcttctaaactttttcaaggttttcaacttctttgcctttggtttgaatttcctcccgtagctcagagtaatttgatcgtctgaagccttcttctctcagctcatcaaagtcattctccgtccagctttgttccattgctggtgaggaactgcgttcctttggaggaggagaggtgctctgctttttagagtttccagtttttctgctctgttttttccccatctttgtggttttatctacttttggtctttgatgatggtgatgtacagatgggtttttcgtgtggatgtcctttctgtttgttagttttccttctaacagacaggaccctcagctgcaggtctgttggagtacccagccgtgtgaggtgtcagtctgcccctgctggggggtgcctcccagttaggctgcttgggggtcaggggtcagggacccatttgagggggcagtctgcccgttttcagatctctagctgcatgctgggagaaccactgctctcttccaagctgtcagacagggtcatttaagtctgcagaggttactgctgtctttttgtttgtctgtgccctgcccccagaggtggagcctacagaggcaggcaggcctccttgagctgtggttggctccacccagttggagcttcctggctgctttgtttacctaagcaagcctgggcaatggcgagtgcccctcccccagccttgctgccaccttgcagtttgatctcagactgctgtgctagcaatcagagagactccgtgggcgtaggaccctctgagccaggtgtgggatataatctcctggtgtgccgttttttaagcctgtcggaaaaacacagtattcgggtgggagtgacccgattttccaggtgctgtctgtcacccctttctttgactaggaaagggaactccctgaccccttgcgcttcccgagtgaggcaatgcctcgccctgcttcagctcacgcacggtgcgtgcacccactgacctgcgcgcactgtctggcactccctagtgagatgaacctggtacctcagatggaaatgcagaaattacccgtcttctgcgttgctcacgctgggagctgtagaccagagctgttcctattccgccatcttggctcctccaacttaaacttaactttaaaaattgatattcaattcagtcactggaagacataagtatgtgtgaaactactcggatatatgaattactttttcagttgtaagttttgtgaaatgtatatacagataaaatatttctagtaaaaacagtgtcagaattgagatgtgctgtaagtataaaatacacatcaaattttgaagacttcatatgggaaataggatgtaaaatagcacatttacaattttaaattttgatcacattttgaagtaatattttgaatatattgggttaagttaaatatattattaaagttaattatacctatttctccttttttggggtggctgctagaaaatttaaaattatatatttgctttgcattatattcctcttggactgtgttggcctagatcgtttattagcttaggcaacataatgcaaatttacattaactttatttggtcttcatcatattaataataaaagcaaaacaaaacaagaaaccaccaggtgctaatagtcacaggctgagttccctaggaacagactctgagattgagtttagcatgccacataatttttaaggagttccctggggaaggaagtaggattgagcagagagaagttgagctgcgatgcaggcccaacaatgggctcagctaaccccacgaggagctctgacactaacatgacctttcagtttgtcctgagttgggccaagatggcaaagtctttctaccccatcatcaacaggtcattgaatgcgggtcactctgggaagagcatgatcttaggcaagatggtgctctgtgtctgaggccaaccctgaaggcgctggcagctgaaggctgtctatggacagcactctttgcagctcaggtcaggcagtaagtctttagttgcagggtgagctgggcagcacattacagtgtctactatactaacattttttgttgaagatttcccatgaagatattgattattgtctttttcagtttttaatcagatgcattggctaatacctgtttgtagctgaagctaagtctgtcctcttaggccatggtgtgaattgtgtgtttccctttcttccttcatctctggcttagctcctttcattaccttcatggcccctctagaagtttatgttaggtttttaaggccagaccagactgacttgagcccagccgtaattggagaccagattcaaggctctctcttggtggcaggtgacattagtcagactttattcttatctatgaaagttcataagtaagtgagcttttgtgtttttctgcttaactctcattactacctgttatctctttgaagacaagggatatgtaaaggtacatatatgtgtatagattgtgtatgtgtttgagtatgtatgtatgctttaagccttgttccaagattggtttatattagaaactaaacaaatacagcccagcacggtggctcatgcctgtaatcccagcactttgggaggccgaggcgggtggatcacgaggtcaggggatcgagactatcctggctaacatggtgaaatcctgtctctactaaaaatacaaaaaaaaaattaggtgggcgtggtggtgggcgcctgtagtcccagctactcgggaggctgaggcaggagaatggcgtgaacccaggaggtggagcttgcagtgagcagagatcgtgctgctgcactccagcttgggcgacagagcaagattccatctcaaaaaaaagaaaaaaaaaaaaaaggaaagaaaaaagaaactgaacaaatacgttatttactgaaggagtaaatatgtgtgacaaccagtggtgtcctcattccgtatctccatcttcagagaatgcttgtgtgccttcaaatttatgacattttcctctcaccccttagtggtgaagaaactgaaatattgaccccatccccaaaaattaataagttaagtgtaagtggtacctgtggtccatttgaaagggaatatctgaatggaatgggaggacagccacctattctcagcaggcagaaagggtacttgtcaacaggtaatatgggaaagctaagaaagattaagactttatttttccctatagtctgcctttctgtgttcccaattctttacactgctgtgtaatgttatggaatatgattctcaattaggaaacttgaacgaagacaaaaaaaatggtaagagactatcttctaaatatatccttagttcttcaggcagcaatttaatttcagttaaaagaaagaacaaaggcatgtcaatgttttggactgaggctaaccgaggactttcactggcactctttttagagctagaccattggggaagttgcagtgttacataatgctatgcttctcattgccatagagaagcagcagctgctttgagactttagaaaatcagcagcgacttgaactctgtgttgcttgtgtccagaaaattccaggcactttgtcaatttttttcttcattttcaaattatccttttgaggaaaatataaaggagtaatcccattatctctattttagagataattcagctgagtttcaagaggtttgttgtcttgcttcaagttgtccattagcagaacgaagaacaaaatcttgctttctgtctttcccagactgattctctattgtagcttctctttggctgttgatataatatcaaatattttgtatgtatgtgaaaaatttgaaatttcatttatttcactagtttaccaaatccctgcctttcactgctgaccaaggttagaactaatataaaactatttcctttagaatgcttagtgaatattttttgccactaaggctaaaacaccactgataatttttactctctcttgtatatgtttaaataacagaatagaaaggaatatgggaggtacatgatatggaatgagacacatcttgactaaaatattttagtttagagcaaattttctctgatcatagttattcaaaggatctgtttatttgtatgtggcatgatggtgtgtgtaacctcacaaacaaatgcagagcctgggaataagaaagatgacttatggtttcacctccaagattttgactctgaaaaagtcatagaacctctccctttcatagtttctctccctctctctttcatataaatatatatatttcacaataattacttgaataaatcctaggtacctctcctaaagagttttgaaaaataaacacatagatatgaagaaagatggcccaatataaaccaacagtggtcctactatccctgtcctctatgggcttgctaagcaataccccaaggtaactttcaagctgactttgatgtgaatgcccaggttcacgtataggagtaacatagaccactaagaggggtttcttgacaatccacagtatctctctcccccttacaaaagatagtttttaacatcaagaggacagttgttgactctcatttgaattattaaaccaaataagtggctgttaaaggagcaaagatctgaataataatcagttatcatttgcagagataattcaaatgatagctaattattgggcaggcactctacataaattatttcttttcattcctatgagatgggtactttatgaggaaagagagaggttcagagaaggcatgtcagttttctaagatcacacagctcattgttgactgagccttgacatgaaactacagctatgtttaaaaccagtgctatttctagtgtactatcctgcttccttgtaattatccaacacttttcttctttttctcctttttaaaaatcaggtagtatctgattgactttgtctttcttttttgccaagggtacactcaccaactgctgtccagagttaaatttatagtcacaaagcaagagaaaagtctttgtttccaagccaatgggctgggtttccagaggcataaatcctaggaattagtaatatcccatataaaatcactgaaggttggtgcctatggttatgtcagtggcctctatgatactccctaaaggcgtaatttattccacagtccctagacacattcgttcatgttctttgaaacagggcacacttgcctttcccagaaatttttcaaccaaacaggactaggacatagatcaaggtctgtcagcctatgctcaaagtgtcctctgcagactttgttgccactaaactagaaataatccatagtttctcctgtttccttttccgttaatgaccaactttatatacactcaaaatgaataagtgatacggtttgttcttctcctctacttctctgtttcccaaagtaatttgcaagttagaagaggaaatccattaggagaagctgaatggattaaaagataataggatttggagaacaggacccagtgaatcacaaattcattacattcacagctgacaattgctaagtcccggcctgctcctctcacaatggggccaaggtctgtgcagcatgctggtgtgcctggtgaaaggagaaaatgagcttcataaatacaaacgttagagtcaatcttatgttccccagggactgccagtactttacttggcaagaatagaaaaggaattcttaaggatataaaggcaaaaacgaacactgtaaaacacaaaccacaacaatggaaaactatagagccttgcttccaaagcttagtcatccatacttttctgaaatgccaggaattgggatatggaaaagagctcagaaaactacaggaggcatccatggaacaaccacagaattctcattctggaaagctttggcagggctatgttctcatcatttcactttaatcaccttttaccccttggggccatttgaggaccatgaaattctaagaatgggtagaaaatactcccccaaccaaataagaaataagattcttttgtttctatatgtcctggattctgcatgctgcctgctcggagaggagagccttacactggagtttgcaggcatttgctgctgtctcaataggtagatcttcagttaggtcccagcttcatgccatctgttatttctaaagtattttggccttcagctggaggaaggtgacaggagagtgttctgttcctgcagaaaatttgcttgtcatcagagtaactgtgtactgttgaaacagctactgcctacatttcactgcctcttgaaagctagcattttggtgtgaatcaattatgaaaagtgatgcacactgccccaacacgcacacatacacatacaccccgcctaaaaacctgagacataaacaatgtctagaattgtgggcaatcatgcagagcccttcaaacaatattaaaatccagccacttgtaaagagtgagtaataaaataagtttagggttatataaattgagtctaataaaataattcagattcctatggtacattacagttttatagtagtgcctttattttctcttgttcttctacaaatgcctttttgaatatttattcattacccatttcctggataaagatagtaaggcttagaccttttaccaggatatcatagcttaaaaaatgacagagctatttaattcatatttaaaatcatattttttcttttgcatttttctacttcctggcatatgtttttttctctgatattagggtataggacaggacgaggaataattaaagtccctccaaagattaggtcagaaagggaccataaaagcttttccattaggaagctggctttggcgtttcattgtcattggagaaggcccatctgtacctatggcacgtgttatgctaggaaaatacctcctgaatccttttgtagaaagcaataagatagcatttctcagaaagaaaatgctttgctaagcaaatactttgaaaaaaacaataaatgattttttaaatggcattacaatgttctttgaataggacatgggaacaggaatcaaacttggatatattgtattttcatcttattttatttcatttttattagtgacagggttttgctctgtcacccaggctgaagtatagtagcatgataatagctcactgcagccttgaccttccaggctcatgatccttacgcctcatcctcctgagtagctgggaccacaggcatgtgccaccatgcctggctaatgccttttaagtttggtatggacaaggtctcactgtattgcccagactgctttctaactcttgggcacaagtgatccctccaccttggcttcccaaagtgctaggatgagaggtgttattgcatatttttacaagtatcagacatgtatgttctgaaaggcactagaatcattgaaaataagtcactgtgaagtgcaatgactcttgaagataggggatagcagaagtgtgaaactttgtaggctaatcattatggccaatgcctaattaggatttatagtaccaaggcctgaccaaagtcataaattatcagacaaaattattggacagaaagtgaatgactgcatatcttgttaaaatcactagggaacttaggcagaaggtaatgactgaaatgagaacttgcctgaaacatcaggctaaaaatagttcttgatatatgaagatgatctgaaaaatgagccaaaatttgtgttgcaaaacagcaattcaagaattcaatcttaaaacattgcctatttttttcttcagaaaacaggatacaaaagtcagtgtgaatgagcaaagccattgagttgctcccaaagcagaagaaattagacaaagctattatggaggagatggggatggatttccacaagagagggcaacctctatgtgaggggtaatttaatgaaaaatttgcaggtgatgcacctgtcttttcaaagttcttttcatccctgcaatttcatactttttcaccttcaaggccaatggctttgtcagtgctgcctgaattgtgcctttgaatgagtaatgacagatttgaaataagaacattggagcattttaagtgtccagtaatatttgctcctggatctactttgaatggtgggtgtgtgatgactggtctccatgaatgggatcatctaatgccttttaaaaattaaagacatagtgtcatttggactttttatgatgcagtactatcttgtcacagaagacttcaggatttctcttggttagcaagtcaacagagacctgtgtatctaggcctgcatatatgcatgcatgttgttacttgatatattcggttataagaaaaggaagtcagtcctagtaaataacaccatccatatgagatttatgggtttcacttataaatattaaattaataaataaaatattatcctatcatacttagtaacaaaggtataaggctacaatattacacctgtcctgtaacttcacagatatctaatgaatatctagaaaacatctctgacttgctgcgagtgtgtcactaaagccctacattgaccatatatgtctttattctctatctgataatgttgcaactttcacattatttttgaaagttcttaattggtgattaaattcctgagaatttccagtaatgcataccaaatgtcctgagactttttagacataaatctgactcaccttcaaaatcaaaacaaaaaatcagtattactatgatttcaagtcataatctgaatttaactccacctttaaaattaaatgctgccaggatcacatgctcaaaggctttcttggaaatatggcttatacaaatggcatatgcatatatatatatatatatcatatacatggcatatatacatatatatgagatatatatgtatataatgtatatgtatatataaaactggcaacagaaacacaggaaatgatatgaaaaaattattttgttcatttggaacgctgtatttgttgtcatttttgaagacaataaaattgtcattcgaaccaaacccatttgtttcattatctattaatttctatctcttcacactgcttggattggagatagcaaacaggccatgaaaacaccttgggaaaataattcttgcacattctctaacaaaactggaaaaattactgatagattcttggtttggtcatatggtgcttacatgaactggagaactttgatttgagctagttcaaattttaacacactatccttacatacctacgtttgagagactgttatatgggatttgagagattttgaaaacatggcctttttcttgccgtttgtgagcaaggagagatgtaagctgtttacctctgtacccagcaaaataccttccaatgaggttagaatcactaggacttttcttaatgttggttcacccccattatacctcctgagtataagtggataatgatttttttaaatcataagagcgccatgttgcaattgttattatcaccccacctcactgtgtgtgtgtgtgtgtgtgtgtgtgtgtgtgtgtgtgaagttaaatgatctttaatagtggtttgttaccaaaaaatccatgtaagctcaagtcacctaaataaaaactactgtataagaaggaggcacaagtatggaaaacatataggaatacaagaaatgtttacttttggcccttttcctcttttaggccatttccttcctttccctctaccttggacagctagtttcaataaacaaaaccttgtccttattactaccacttttagaatgccttaacttgcccttaatgcctagcctttcaacaggtggattcttgtgtgtcctgaataaacatacaaacacatagaaacacacatacacaatacaaatgtatatatattttgtatagtatatctgtatatatttaggtacatattttaaaaacaaacacattcaagtaagagaaacattgagtggtaaaagaaaaattagcaaactgatataaggtgtagcagtcttacttatcaaatggaacaggtgtctttttcaaatttagttggtgcctttaattggccatttattcctgagtgtgttgggcgtagtaataaatgatatgacaacacagctcatgccagtggtggacttctacaaccagtggaatagtcaagaaaggtcaagctgtctccattgatttgaaagtagattgtacctacttatcacaagcaccttagttttcctttccttcttttctatgaaggattgtccccttgtccatatcacatgttatctatcatccttaatgtcactaataaattagattattcatggaatgtgcttagccctgtgtctggctccttgtaagcagttgataaatgtaagctgctatagttatcacactttgatccttaccacgtttccttgatatattgagggcaaataattgaatctgcattttattaaaagaacactgagactaatggaggtgaagaggttacctgacttctctttggctcaggatcagtgaacaatattataggtacttgaactaagaactccagtcttttaggccagtgattgctcctcagtatcaacatttaaaagtagttagttattcttgttttctgaaaccatcctgagaaaataaaggagataccacttctgtcttgtctcttctccctggttttaaacctgtgccttgtcataatgcaaaggccatgtatttatttaaaaattataaacacattttacctgaagtgacagctgaactgtggttctaaatagcctctgttggtggcctcaaacttctgtatatattcggtatattccattaagtgcaattttatgaaaatgtcataaacaaatcaatcactcttgacttaattttcagccaccatcagcttctattgagaatctcagccatcaaaatatccataagaccatatgatgaagtacatataaagtactgtgtgagcacaatgaaaaagcaatgagattcttttggggggttcacggaaagcccccaagtgagggtgccatttgaattgagtataaaatgatgaatagagatttgtccattgaaaagggcagacaggccaggcacggtggctcacgcttgtaattccaacactttaggaagccgaggtggacgggtcacaaagtcgggatacaagaccagcctggccaacatggtgaaacctcatctctactaaaaatacaaaaagtagccaggtgtggtggcgggcacctgtattcccagctagtccggaggctgaggcaggagaattgcttgaacccgggaggcagacgttgcagtgagccgagatggcgccactgcaccccagcctgggagacatagtgagactccgtttcaaaaaaaaaaaagtaaagggcagacagaagctggagatagagtgacccctgtcagactgagggggacatttgagcaaagatatgaatattaaaaaaacaatgatccaatatggttgaattgggtgagtggcaagagtggctgttggcaacctgtgaagtggcatgcatgccaggttaagaagttggagataatttggtagcatttgagctgcaatagatcgtgtcagagagaactatgccatgaccagatgtatgacttagataaccctgacagccatggggtggacaaatggctagggttgagactgcagccaaactcttcacaatttcaggagagaaatgatgaggaatgagattgaagaagtggccatggaggtggggaaaagagagcaaattccagaaaaatattgtggatttgctcagtggaacttggcactggatgaaatatacagaataagtgcaagggaggaggcagaagattaacttggatagatgggttgataactgtagccataactaagggaaatatattaagctcctcttctcaataaagattagatttaattacgaaaatatcatctatttatttgccatcttgttttacaataatatatcttgtatcttcatataaaagcagttacggcagccctctgcactgtattttcatagggttctgtttttatcttacttaactgtaaggtccttgagggcaaaaacagtcaagcctttctcattcatcctttgcaaacccagcaccctgattcccaacagggtagaactcagcacatatttgatgaattagattgaatttaaatctatatatagttataggaataaatgcttggaggattttcctatctctgtttcaattctttgttttagctcagtctttttatgttggctcctgtaagctttttgcagtgctgcaaacacttctagctgacaagagagaaaaagaaagtcagtgaaaaggaggagggggcattgcagcatctagattgaactctccaggcttgcctgtctcataattttcacctttggtggggaactgtcccagatttcatccaccaggctaaggttctgacatggtaccttcttaaatcaagcttgaagggaaattgattgaaaagaaaacaccattatgggaaaacaattcattttcttccccatgacagaaggtagacttttgtctatactgcagaataaatatgatctggctgattgctttaagatctggaagctcagaggagtcataatggctttgctcactctttagagggaaattaccttccattttggagacatttgatacaaaggttttggttagctttcaaaaagtaatattttttctccctgtgtgattatttatattagctagatataggtgcatgaaaacttgcaaatatttctgtgtgcagttgtgtgtttctactgaagtaccctccagacagggagtaagcagattttttttaaaacttttctataagccccttaaatattacagtcgtcccatgctttctgtgttgaaagaaaacaaatttaaactcataaaggtggagtgaaggcaaaaagatagaataatgtttacctgatgtttatagtagtagaaaacacttcattgttagaaatagccaagaaggcacttacgttgtgggacactcatccgtcccgttgacaaaagttggattcattttatcttgcagaaattgcaaactagcatcccctcagacaaaatctagccctgataatacgtatttggacaacatagaaattatgttggcaagtcttttctacttcaacacagtccccaccatgcccattgtacaatggctggccaaattcacacatttaagttcctagctcccaaaagacttgaggttgaatgccttgctaaaggtttttagtgcaactctgctttgctagaagatgaattcctaccttgcaaaaaactcggatgcatgtctcctgagattggaatggacaaggaacaaatgtacttgtttgtagtacttctagaatgtctccctaaatcatcttagaagcagaaatcttacccaaaatatgatgcttgccaatatattgtttaccacccatcatgctctgaaccatcatgcctcttgtctgggtagccttgctctatgaggcaatttgtggtataaagatttttcattaagttttggccagtgaagatgttgtcaatgtacaaagtcagtaatgcttcttgtgaaatggtcgcctctcatgccaatcttggaagcgtaacattttcttgaccactttagttctaatgacttcacgtttatcctgaactagaaatatggtatcttcttggttgtttattctctttcttcttccctctttatatctctccatccttctttcttccttcttttttcttccctctatttcttccttctttccatcattctctcctctttctttctctcattctgtttcttcctcttttttttgaaaatcttagcaagagttaatggacttatgatctaaaaattaggttattagaaatttttgtcataaaacctggagaattgatgtttgaattctccttggctagagtcaatcctttatcctttttaggtaaatgaattaagtctcatgcaatttcctgtgtgggagactctttagatgaatcatttaaatggaaagccctgtctgctcatcaaggggcgcgattttagagttttcctgagtattatgtgcacgcttagtacagtcattgagatacataaggcaaccatgtgccttaatctgtatgaagtctcagttcatatgtgattatttaggtaaagtatataactgaaattttacatcttttgatctctttgcaaaatttccctgagccacttaaaaataacctttctttactcctttttgtcttgaaacatttttattggaagacttcagacctaactttagtaccagagaccgaaagtcatatctcacttagttctacaatctctagtccacttttgatactcagaatagatagtaaaggtgctatttttttaccccagagtgacagactgttataaatgttgggatcctatgaagtactgtggagagtatttaatgagccgttgtagagcctacacagatacatttatataagatattgtttttataccagcctcaaatgctcctaggagcagccagacaggtcttcctcaaaaggataatctggaatctttacctttgcaattgttctatgatacttctctttcaatgcacaactcccaattaattccttggtactccttgcaataagagaaaattaaaagggactcatttgatattagatgggatcacacttatatacctattgcattgtataataagtaagcatgagtatcattctgttgtatagtcccaaacttttccttgaaataattggcaagaggatagaggaaagacatccaagatttattaataccttcatggttctagttacctctataaactagtgaaaccttttccaaatattgtagataaagaaattgaggcacagaggtgttacttaactgattcaagttcacacagctaataaacaacagaggcacaattccaaaccagctcttcatggctctaaaatctgtgttttttccataataagctgcctaatttattgcgcttttattgtggtaattattttacaagcattattgcatttaatcctcatagccttgttatgtaagtcccaatagtccccatttttgctgatgaaggaagtaggattcagagaaatcaagtagctctcatgttgtctcacagtgaataagcaatagattcaagatgaactccagagcctgtgctcttaaccactacagaaaattatgaaattacaaggcatggtcctgccttgtggctctagcatcaagttggtaagacaacacaacaccaaggctcttaaggaatcctctggacttgagtgtatgtatgggaggagaagagggtgttctaggtaggatagtaacatgacaaattcaaggatatgagaatggaatgttcagctttattttcattttagataaagttataatatctgataagatagcatggaaggaaggaacttcactctcctggagtgtagagttgtcaggagtggacttgaaaaaaagagtgacaaccatgaggtctgataggctttagaacgcaggtcttaaagagcctggagaaaagagcgtgcatcacaaatcctacatagacagcaaaaccactgcccaggtaaaccaaggccgcagtctaatcttggaaggagagagtaatttaggacagcaaagcagaatccatctccttgggcaaagcttcaggaaagccctgtctgaatctaagagggagctctcggaaggaaaggagaaggacatttgcagaaggaagagaggcagccttggcccttatgaactctgggggaggttcctccccctactcttaactgaatgtggccataagttgaacaccagtgaacaccagcaactgctgagactgaggagagcagcaacaactgagcaattaacctttggtgatgggcttgaagttctaattaagagcagagtctcttctatcaggtgggagggggaacagcagaaagatgtatgagggggatgaaaaagaccagcatgttagcaggtcagatttaaaagacatccaaatgggtgtaagagggtgagagaaaagaaggagatcactgaccaattaatttttctgtttcccagtcaaagtttcttctcctttctcttaaccctgcagtgactgctgtgtgcagaagccagcagctccggggagagctgacgttgaatgcttatgctcctctctgttgtaaattcctttcttcatttgctgagtatcattggtaatttctatgtaaattttctcagagtagcaatttagcagcttttctgttgacaaatgaggaataacttaatagtcaagtgactgcatgtcatgtttcgcaaggaggtggaagtagcgccttgtagatcgcagggatggatgctggaagtgggcgatcttgggaaagcctcattgcctcagtgccctatttaatttcgcccatttaagataggagagaataagcttctatacttgaggaacctagtttcttgtgaagagtgattgttaggaatcttttctcttttagcacttagttaacgaatacctttcaaaccaaatcaagaggcaagaccccctccaactttgtccagaagccttcacaagcagaggcatattttgttttgtatcaaatgcttctcattgtccatattcaggaggcaggcaacagtggggtcctttttgaagtgaccagggatggatgcaggcagcaaggcatcgttgctttccagatgccacctttactataagaatcgaagtcctttaaagtggactctgagaaacttcacctaaatcatttcccaaggtgacagctctctatgcagttttttctcctaactagaaagcttcctcttgccactgcgctgaaaatgggaaaagtaggtggatggggaggtcttttttaaagcccagatttctggaatttgtggtccttctactttcctgtctccagcagtgaccttctcctcatttattcatgacagaatcatacgtataaaaattcatgtattctggtcaccgttctaaattctggatggtgaaaaaaaatatgcagggcccctccttttatggaactttcattttaggaaggaggaaacagtaagcaagtgaacagataagttagtggtataaaattgtttaagagtgactggatgggaggagggtttactggaagctcagagggttcatggtagcccactctgcagagatgagagttaaacagtgttgtgaatgattgaaaagagccaaccattcacagatctagggaggcatgctcccagaagctgagacagctagagcaaaggcctgaggtgggaaagaacttagcttgctgataaatcagatacagagccaagctgctgttgtattgtaagattatttcagactcgggagtagggatgtgtttgcacttctagctctataggccctcatgagcctgttggacacattgttaaattgatgccaagtagctcaaagcagaacccagtcccttgtccctcatcttctttctgctgacttcataagaacatggttcactttcactgccttcctttgtggacatactcagcctgcgaattaaaaacagaactgattttctcatctcccttggatcctggggaaattaaggcctgcctaggcctcagttctttccctagattgagattaaaatagctttccttgcaatcatccagatgccaatttaataaacattctctggccccttccacatataacccctggactgccttactaatttcttagcattcttctccttttctccacaaatcctccctttaaagagtgtttttttcccatgcctttcttattcttttttgtggaaagcccaaattagtttgtttatttttgcccttaaagtccaccatatccaaatgagaagtacagaagctattaccttaaaagtaagcagtgagaatcctaacatctttttttccatccccacattctcctcaatatgttccctgtcctttgatgcataagagggtgaaaacctcacatgagtattttatgcactaccattttacaagtgtttcagtaaatattacttcatgtaattctcataaaaatcttgggagatcagcaacacaagaactggtaggaaactctgtaagggggaatgtggggatgcgagggaagccagatcatttccaaagtccaaaggtcagatcttcacgttgaaacccagtctgcactgacctttgacctggcatcaccattccatagctatttgttggtgtcagcatcctggatagggggatttttttttttttcaaattgtaattcaaaggctaacagaaaagagaaggtaggcttgagaaagcactagttttcttgggactctgacttattatttggaagaaaattgattgaaagcataggtgattatttgttccttgtatctttcagaaaaaatcaagtgctctatgacattactgagtatatacccaaaggaatataaatcattctgttataaagagacatgcatgcgtatattcattgtggcactattcacaatagtaaagacatggaatcaacccaaatgcccatcaatgatagactggacaaagaaaatgtggtacatatacaccatggaatactatacagacataaaaaggaatgagatcatgtcctttgcagggacgtggaaggagctggaagccattatcctcagcaaaccaacgcaggaacagaaaaccaaataccacatgttcttacttgtaagtgggagctgaacaatgagaacacatgggcacagggaggggaataacaaacagtggggccagtcatggggaggggaggaggagagcatcaggaaaaatagctaatgcatgctgggcttaatacctaggtgatgggttgataggtgcagcaaaccaccatggcacacgttcacctgtgtaacaaacctgcacatcctgcacatgtaccgtggaacttaaaataaaatgacacattactttccccactgtttttttttaagcaaaagtgttctcacacagaacacaggcaagcatgtctaacatgttccattctaagtcttgcccttgcatgtggttgaaaatgactatggactatccacatcacaaattatgggttccagtgtgtatatggacacttctgaattcactcaaaatttttcttactgatccctattgccagatgggggagatcagcttctatattaagcaaggatgtgtccaacttttgaaatggaatgaatagttaaaattgtgcatttctcactctggtggttgcctatagctgtctccgcccccacccccacctctcttccccaccaccttcaccagcagtagaaaagtatgtcatatgtgtgtggggtgggtacagatagagaaacttggcagaaatagggtgagagatgtgactaacaccctcagctaatttctgtgcatgttcccaaacagagatctgcagagaaaggagcaagagttccttgcattctaacccaagccaccccttcacacttccagctttagttcacttctccaccttccatgcatggttgccatctgacctggctactgagaagatcagacctcccagtaggagatccaccacataagctaaaaataagagctgctacttctctgcagataccattaacccaattagataaataaaaaaaaaaaaagaaaaagaaattacagcttcattaagtaacaccagaataaactccaagaaggcaaaccaaatcagttatacaatttaaaactttactcaaaaatcaaaatgatttgaaaccaatggtcacttaaatgaaggcagaagctgcatggcagccattattggagccagcaattcagcagaagtccaaaggtccagtgcagcagtacatgtgacaggtgatgttgcctgcatacacaaaattaaatggaactagttttcgagggtcttcttgtctccatgaaaagagaatgtatccttctgaaagtccttttgtttaaaaatatgatcaggctctgaaagaattttaggtcttgatactaactaacagaagacatgcatttattaaaaattgtatcacaaaggggtgaactggggcctgattgattgatgttgaaatttgatttatccccagtagaaagtgccaggatattaagcctctattactccacaagggataccattttgcctttggtgggtgaggtaaatcttcagattagaaatggtaaagcctcaagacttccaaaaacatacaggctcctattgtatacttgctgaagttcctataattatttacaattccctgcaaagaacattcttgggggtgagtcccagaacagaggtgagcctccagctgcaaaaaccatagcaagtatggcagggagcatctttgattcagaacagaacgccactcatcgttccatcagaacaggggcaggaggttcctgccaatactgattgatgccacgaatcaactggagttgttccatgatccacatggtccttggacttggtgctgtcctggaaactggattcattgctcaaggagctgagataaaagaaagcagcctaaccaatggccagctcaaattaggagctcaaatgaacagggcctcaaggaagtcagcctctgagaatctgagatttccagactctgataatgggaatctcacctatttgtccacttttggggtagatctagacaccgtgatgtgtcagcagcctcttagttgctgagacaattgtcccagagtgcacagactaaatctaaatccctacaatatgttttcaatgaatttatgccacactaattttctaatttgcaatttttaagtcaatatactttattttcttttaaaaatagtgttttatattttcatactataacatatttccatgatattaaaattggcaagtaaagaaaataaaatatgtaaagtcattactgtcatcctcccagaagtgatgtgctaacaattagacatatttcatccccagtttttttctacagacacttttgctttaccatattgtgtacttgggtctattttcaactctgagccacttgctatattgaacagtgtttctacagacaccgtgctgtttcttctttccttctttcactcaacaatcatttactgagcattttgagaagaactgggaggacagcgatagaatgcttttgcattttatctgcagtcaactagttagaaaccagaaacaactatcttgcatctcactatcttgttatttgcacctttaaaatccctttgcagaataggtgcatagtattaatttgataactaaatgaaaacaaaatggagttcatcaaagtggatttgttttgaattggcttggagttactggcagtctatgatgacatacgctactccccaccattgacacatgcattcaaatgcagatgctatattagtctgttctcacactgctaataaagacatatccaaaactcggtaatttataaaggaaagaggtttaattaactcacagttccatgtggctggggaggcctcttaatcatggcagaaggtggaggagaagcaagacatgtcttacatagcagcaggcaagagagcttgtgtaggggaactgctgtttataaaaccatcagatatcttgagacttattcactatcatgagattggtatgggggaaatcactcccacaattaagttatctcaccctgaccccacccttgacatgtaaggattattacaattcaaggtgagatttgggtgaagacacagccaaaccatatcagaggcacacacaattttatgtgtttgtgaagaaaaggcaattgtggaaactttacttaaaaagtgtaatgtcaatctcatgagttgaggacagttaggagaccctgaaatgacacctgtgggcttgcattttattcttggtcactgctaaaccatttttcacttccctctgtttcagtaacctaaaaatctagggttcacaaaacaatgagattaaggaagccaactgataactattgtaataggataggaaatgtttcctgatttgggaaggatgggcaaggaggtggagaatgagcttccaaggcagttttgattttccggaaaaactcatcttaaaactgattatctccccaacatgagacctaccaactgacctgtatcagcctaactgcaatgtatctgtctaaagctgttaaacacagctattttcaaaacatttatccattttcataaaagatttcttaaaattcaagctaggttttcttcctttatttgaaaagggaatatggtaattttaggaatatgattatatatgcatatgtggaagagaagcagaatacttaaaagacaagcatttcctctttttatttgagagagagaaagagagagaaagaaactcctaggcaatcagagcagaacattcctaaccttacatttgatccacccattgagctactgaataaatgcttaatatgtcagtgagcccacaagtttcttgtcctgggccctttaaactgatatatctcaatcacctttactgaaatgttatcctgagaagaccgtaaacccagggctgctcaccactgagtcttcttttatgaaggtttctcaggagaacatacagctaaagatctctaacatttttcctgagtagacctcttttttctcttcatgaggatatcataataaatgactcgttggtaatttatcagagcttgttccttccccaacccattctccttaatgcattttttaaatttatccagtatttgaaatgcagaagtccaggcttggtaggaacccagaagagaagaaggtgaaagaacaaaatgactgtgaagctaagaaatccagatttggaaggagtagcatcctcacagatgctcacagaagtccatatgacactccttgcattgcctggggctttatggaagaagcagggtcacgcaggattagtcattgcccaaagagcgaagagcatggaactcgccaatagcctgcaaactctttccttttggcttttctagcacttactactcttttatgacttttactttacttaattttcttatataccaggaatataaccaaccagggtagttgggggccattgtgtattgagcactgcccaactcaattcacttagcttgcaatgtgaatggcttctctcttctagaggtgctcaaggtgcaacccacataatcacacctgatagccatgttgtcaatgcccaatcacattttaaacacttggagggcagagactatgacatagagaaagatttgaatagctattcacagaattcagttgagctgaaaaagtcagaagaggagactagtttcactgactacaagaaagagtgatttggttttctgagagtgaaatcttcccccacaaacatgtactgtttggcaacatgtttttttaagcctttagaattgtaatgctttttgctgggtcatatgttctcaaattttgcctcaagccccatcattccctgttttattatggtaagcttattcacacatttatatacctgccaggctattgtaggtattttgatatgtggcttggcctttctgggcctcatttaacctctctagactgcagttttctcaactgaaaaaattcccatcatatctgccctgcctatatcatgagactttgtgacgattcaaaggagcaattcaggcacaagctgtgtaaaggttacagaacacaatatagactacattatcattaaactacttgatagtcttatgactatttttatggtaatgaaacgtaatccaatgcaacttcgtatatgtaagtaaaacttcttaattcttgtcttgtaaaactgaatcttcatcctttgactgatcaactgaccagcttaaaccttggagaatcttaaacttctgaacacattttacttctctctttatgttcccctgtggatctcttatgagtatacagagattgagagtccaccatacaggttacctttcactcaagaggttgtggcatcctattcattgtcaactactggactttttcctccccgtcgtggaaaattggtgtcacattgccacatggagcatcccttcttcactcttgacccttccttcatcaatggtggagcatcctcctgaagctggagaagagaaatataaagctatgtgtttcagaatgaaaggaccaatcacaagaaactctcaagccttaaaatacatttagcttttggatataatacatcacatctgtatttgttagtaacatattaaacaaaatgatagataaaatgtagattatataagaacctatgtaattgacatgatttagatactcattcaaagatgagtcatgaaaaaggtacggtattgtcattgcacagtatttcctatccctgtgacatatgaataccaccttcaccgtttttgtagtattcactcatcacttgcactgttatttacttaatagtcttctttaagttgatttattttacttaaatatatttattttgaaagcaaaatatataattctaaagtaaatgaaaagtcggtattacttctcataaataaaaataattgtaaaaataaaagctttaagaacaaattatgttgttatattttagctatgtattatagcctgacaaaagacaagaattagtcctcatttaaaaaaaataaaggagattggcagattttaaaaaggcttttaaagatatataagtgcttattttctctctgaggaaataaagagcaaaagaaaacttaaaagttaataattttgcataagtataatttggaatgattcagtgtattttttcattatgacttcaaatcatttaatgtatcaaaaacatagtcataaacattggggtcatcatctattttgattgtagagattttacttttatacatagatgttttcaacaatataacctaaatttctgggaagttatatcttttacatttattttaaaaatctctctcttccctcacttcttcattgaagtaataagggacttaacttctttaaaccaaagtttccattatagataataaaacaaccatcacaacaagaaactactaaatgattatttattcagatcccagaagaagtgctttacacggatactctacttcaaccctcacaactgctccataaagtaaatgctattagagtaaccgttttacagatgtgaaaaataagtcttagagcaatttcttagtttgctgtgatcacacagctagcatgtcaggcaatctgatctggcacctgcaatcttaacctttcctgaaataatcttattacttaaaaaagtattactaataatgataagaggctatatttcattattttttgaaaagtatgtttatggtctatgtcacaaattaagagtgacaatcagaaactcctgtaccattggaaaatgaaattttacaatttggattgctgttcaggaagcaaggttaaacaaataaacaaaaataaacaatgacaaaagccttttaatgaccattctggatttttttttcattttaaaaatgaatgctcaatgtttcttcctcctagtgtattgctttacttccttaacagaatcctattttattaagaagactgtgaagacaaattttagactgaggttctgagagatgtcttagagccagagaaaaatgaaaaattccagaagtctacagaatccaagtaaagaagactttgtttggaattggcagcaatgacttccactagtagcttaccatgctagtgtaattaatctcactcccatttctacttctttttatggcagaatttcttaacctcagcactgctgacatagtgggtcatatacttcttcattgtgaatggctgtcctctgcatggtagaatgtatagcagcattcttgggctctatccactaaatgcccagagcatcccccaagttgtgacaataaaaggtatttccagactttgtaacattactctggttaaccacagctagagattacctcaacttgtgatacttttctgcttattttggtgttaattggtatctgccattgttgctggtggtcatgttattgttgttgctttgtcctttagtaaaggttccttctctgcttagagacaggacatgcttagaaccctttgggtcttaataaaacctcttttaatattcaaggtatagcagtgagatataaaaatgattgcatattgacatatatctaaatattttcactttgatttcagcattgaatcaacatctctatcagcttgtcttcctggagaaggatattttttggaggttctggtcaagctcagtggttactgaagctgtcgggagtcttaccaccttggggtcactgtggaaaccagaaaataaatggacaaagctgggattgctttttggctagtataatatttccagaatccctgaggcttgcttttaaatcagcataagctggttttgtgtctcacttttgtgttgtacaattacagaaagcagcaaatacttatcttggcatgtcctgtcatgacatgagccaaaagctgtcatcctcatagattccctgtctaagggaatagttgccctatcagcatttgaaagaaacactcctgaaaccttttggagactctaaagttatgtactgtcatttgatggataagtgactcaaaattcatattgatcacatcatttcaaattcttacctgttagactggtgagagaactctaggtactttgttgggaaggatgatggagaagagagaagtgaaaatatgaaggattacttataacaaaagacttgagaaatattttaggcttgagaagcattttataagggaaagatatttgtgatggggactagtaagtaccacttttcacctattgccatttgaaaattgactgtttgcatattgtttttttctgaaatgccgctatgcagtcagggatgagaaggggattgtgattgagtaaagatctttcttagaatcatgtcctcatttgtaaattgtgattttctgtccattaagaagataataatttctttttcctgacatggccttgtatttttaacttcttgctccacccatactcaaatgcaggttgatttattctcctttatgctaggtgacttccccctgtgtatactctctttcagaagtatttctttctatctccctaaaatcaaaaccaatgttcaccttaggttgtgtagaaaagtctctgctaaggcacctcacacctttctaaatcacataagttataacttatttatatatttactttgaagtaccattcctgaatatctaatagtgagattaatgagttggttaatgtggtatcaatttagggcagaaatcattttgaggaactcataaatacctactattatgatgtatgaagcttcaggtttttatggctgccactcaaacaaagaaatattatttggaagatgtgatttgatgttagtatttaatcaaatgtacttatttcacctacttgctgaataagcacccttctttactaccatcactggttttcatattgaggtatgtggatttatcctttatcattgctcacctttgaagatggtggcataattaaagaattacaaggggatttcagaaagttgtagataaattgaactaaaagataaaaatagaaaaaatttatttctcaacataagctccatcgggttcaagacatttttgtaagctatgataccagtgatttagtccatccttaaagaactgaaggtcctgaaaatataaccatactaatgcattctttttgacattattacctgaagaaaactgggtgccctttaaagaggttttaagattaggaaacaaagttaggaggagcaaaatcagggctgcaagatggttgcctaattatttcccatcaaaactctcacaaaattgctcgtgtttgatgagaagaatgagcaggagcactgttgtagtggatgaggactctctggtaaagctctcctgagtggttttgtgtttttgtttgtggtttgcaaaagctttggctttctcaaaatactctcataataagcaggtgttattgttctttggccctccataaagtcaatgagcaaaatgtcttgaacatcccccaaaactgttgccatgacctttgttcttgactaatctgcttttgctttgatttgaccacttctacctcttggtagccattgctttgattgtgctttgtttttagaatcatagtgatgaagccatgtttcatctcctgttacaatttttcaaagacatgcttcaggatgttgatctcacttgtttaaaattttcatttaaagctctggtcttgtcttcagcttatctgagcacagtggtcttgacactgattgagtgaaaagtttgctcaactttaatttttcagtaagcattgttagtgaaccaattgaggtgtctatggcgttggctattgttcatgctgctaattgatagtcctctccaattagggtacaaaaagattatttttttcttcagaaattgagtggatggtctgctgctgtaggtttcattctcaacatcattttatcccttcctaaaaatatccatttttaaactgctgatttattttggccatcgtccccacaaactttttgtaaagcatcagtgattttaccattctctcacccaagcttcaccataaatttcatgtctgtccttgtttcaattttagcagaatttgtattgctctgataggagcacttttaaaacaaatgccttttctcttactccctcaaactagatcatgttcagacatgttataacaagttagtacaagtttattttgctacaaagccaaatagaaatttatgcatttttttcttatatgcgttttccacgaacttttggaagacccctcatatatccatctacatatatggccagtgctaaatctcaatggaaattgaagacacagcattactcattggaatgaaatggcttgcaggaaattcccaaagctggctagaaagagttgaggtaacctcttccctcttcatggttccagtatcacccaaagcttttcctcctcagcactaaatctttgctgcaatactccttcttcagaggtgcttatgaaatggcctcatttcaaagaatgaaagttaggttgtagcaggaattttgaagcccagaactttaacataaatagttgaaaagaagaaaaataaaaactctttatacaaattcttaatcttagtttactctgtgtgttaaattgtcattgccataatgattttagtcctttctctgacctggattctcccactccccagcttttaaatttagtccattctatgtagtgcctcttgtaatttagcacattgtaggtgccccattagttttgttgctttattcacctgcatcctcacacatcgtgtgattgtgcttgcagagcacactgaactacaacacattctctcactctgaaatctgtcaccataaagcataaagcaaaatccttccctcctttactgaatggatggctgggtggatagctgttctttgcacatgttcgtgttgagtaggtgctgtataaaatcacttgttctttttttaacgtgactcacgaaaaaattatcccagctttcagtaatctcaaggaaaaaaaaacacttgccatctgcaatttactgcttttaacctgaaaaataggatctaaaatgatactcagatacttaagaggcttcacgtgttgtaggcagaagctgacagatggcacatggtggtaggctgttgcctcataaggagggaaggcagaagcaagtagacagtggtatggaaagcttcttgggaagaggtcatgacaacgcttcaaccagagataattaattatttgctatattctgtaactagcctgtttatacaaatagctggtgtgctcagtacaacatagcagtgaatctatggaaaaggaatctgtaaataataatgcaagggaacttctcttacgtctattgctaaggggattatcatagcattcaattttaagccatgtaacctggaatgcttactaaatgtgtaattcttgttcttcctcttcatataatgcacagacttgaattcctatattgagagaataacttacctcttttaaataataccataatttgccttgaaggtagggaagaaagagagtgaagtggggaaaatttcaaaattctgtcttccagggagcatattcctactcatctgtgacgtctaatgtaatagattttgaagaattatttgtaagatagatacttggagaagtttatactcacttcctaatcccagactatagaaacttctgcattctagaatttcagagaatgtgtctctgtcaattgtattctgaagataagatacatttgacatttgattgcttcaatcaacattctccaatgcagatcactaggcagaaacatcttgacacggcatatatttgatacacaatgattatttgcattgacttttaacaaagtcccatttagaaagattgaaagaaaaggcaaatgtgattggatgtatgctaaagcgtgttcagtatgtgttttgaaatatctttgaaagttcccaggatgtggcacgtatcattcacttgaagctgaaaatctctcagttgagcaaaaacaagtatttgctttgttccatgatgcactccacgtgtgactaaaatggcaaagtgaagcctctagtttgtagatacttgctttgggagacagggagctgtccgtcgtcctgaacgggtcatgctttaatgaggatagacacagggtgcaaaggaaagtgactgggatcccctgcctgcactgactttaacaataaagatactggaataatgagatcccatggaatttagcaaaatacgagtagaaacaagtggtaaagacagcccagactgtagttcaaagtctaagaacatctaagctgcgggttcaggtataaaattagggccctgtggcttatctcaagacagtaactttcaaaggggggtttgaatagtctttccaactgtagctacattacctgaggcaattagtttacttattttttgtttttgttttttttttttgtggttagcttttctttttttttaatttattattattatactttaagttttagggtacatgtgcacaatgtgcaggttagttacatatgtatacatgtgccatgctggtgcgctgcacccactaactcgtcatctagcattaggtatatctcccaatgctatcccgcccccctcccctcaccccacaacagtccccagagtgtgatgttccccttcctgtgtccatgtgttctcattgttcaattaccacctgtgagtgagaatatgcggtgtttggttttttgttcttgcgatagtttactgagaatgatgatttccagtttcatccatgtccctacaaaggacgtgaactcatcattttttatggctgcatagtattccatggtgtatatgtgcatccatcaaaaagtgggcgaaggacatgaacagacacttctcaaaagaagacatttatgcagccaaaaaacacatgaaaaaatgctcaccatcactggccatcagagaaatgcaagtcaaaaccacaatgagataccatctcacaccagttagaatggcaatcattaaaaagtcaggaaacaacaggtgctggagaagatgtggagaaatagtttacttattttttaaggcaagcaaggtgggcctgattgttacatgaattaccaaatctaatgacaaagccaggtgccctggtactgaggctgtgtctcctctactccccatttcctcccctttccatcactattttctccaccctgcctatcctcatttctctttgctcctcctctttttccttctactctcttctatcctcccattcttttatttctcctctcttacatcccttccactccctttccttctcttcctttttttcttctctctgtctctctgcatgtgtctgaattaactcttgagtcagcatttaaatttggtaattgaatgttatgggtctttatgggcttcactttgggagaactgcttttcaaacagagaacctgataagtggtggaccttagggttactttgacatgtttacaaaaataaacttatcagtagttttagagactgccattggagcaattatagtctatgctcacagaggcttggtaggcttaccacaatccaacctcactctcccatcattgattctctgctctgtgaaacaagtactgtactcttcttcaagcccaggtgaataaggcttttctaggaaattctttgggattataataaaataattccttctatgagaaaggagaaaatggtggcttttggtcttaagtagattatttaccatctctctcaagagagataaaccataattcttaacaaaaccatattctaatgaagtcattggtcacagtgtcttctatcccaagagagatgcaaattactaaattcctgtcctggtacaaatataagaaatccagtcatggcctgacaagtttgaattccttcttgtccttgatatactctgtttacccccattgtaatttatctcttccttattcctccatattatttaatttagtaagcaaatgtcccctggtataagctgtgtgaatattataactgaattactgtctgtttgcttaactcattacagaaaactatgataaggtttttaattacaaaattagccctgccaaatgaatttctttcattcaatgaactgcaaaaggtggtacagtgaggataaaaatcatgtcctttcccatgttatttatagtacttttttctaaaaataattgttataataaaaaataatgccaacaacaacaacaataatattttcttcctcgtctgtttttgtgtgattcctttaaactgttaattcatgctgaacttgttcaaccaagattccataaagtaatcctcttcaacctacattttattctcagccttgtcttgaacatcttactctgacctcactagctcttcacttaccaatttgtttctcatcttctccttaataaccttatgaataagttttctatgtagtcccttgtattgctctttagacctgtcacttatcacttcttcttcttaggatactcttctccactgtaattcttatgtctactctaactatatatctttgaattctttagcatacataaacatatctgataaagcaggatcaagcacaaagatgctgtatcttgcctgcatccaacagactgggattattctgagctctcaagcaaaacatggttaaatcctgacaacaaaatgaagtgacatttatgcttacatatatccttccttgttttctgcattttcatttgaaaagtaaacatctagtccattttgtttatgtgtctaataatcattttattttactttaatttctttggtaaaagctatggactatggccattgcagaattatcataatttccatggagaaacttctgacatattttaccaaatatttttgaaatgctacactcacagttaaacctagagaggattaatttgggaaaagggactactttatgaaaatgtgggaaattatttctattctttcccttttgtcatgcctatttccctaaaattagattatttatactatacaagtaattaaacttatttcaaaatctaaagttaagagaaattaacaggtcattgctcagaaaaatgcatagtaattgtgagttttctaagactgtcacaacatttgaccaacagtctccttactgaaattttatggtttctttctctagacaaggccacatgcatatgaaagcagacttaaaatatttttacctatagctggaaaatcaaatcataaatggcaaactatgtattacttatgttataattttggagctataattttggagctataaatccaggatatcagacttttttcccactaatattgtagtattaataaaaaattctcttaatgtgtttgcaactaaattggcattaatttaatgaattctttctttgaacattcctcatttttagccagcggttggtggttgagttgcaaatggttattgcctagtaagagatggcctatgaagaataatctatttcactggatcccttggttaggaatgtagcatatgcttgcccaggtccacttctaaggaccaggtctgtttctccttgctactgcctgaaatagcataataattaattcaaaagttggctgcttttcactagaagtctttaggacattgtaagacaattaagtctgtagaagaatgagaaggaatcttttatttgaggtctagaggtgtcataactgtgaatcacaaagttgtggcacaatgcattcacctcagaaaattttcttcatgaaattaaagtttcattttgtcttaaagaaaaggttccactctcatgcgattttgtgtgttctcatcaaagcaagaatctaacttcctgatctggttactgggaatctatgcagacacacacaatccaacctctggggcctgttttgcaaacagtctttatgtcatgatttagaatactgcataagaaatttctccttgaagagagatgactgcttttgacagttggcttttcccagtgcagtcattagactgcacatgactgatgtgtgtgcatggacagggaggggtcttcattccctggaactataatgtcaggtttcatattgtctgagatcagcatctcttcagaaacaaccatgtactcctttctccccaaaccaccttccctcctgaccataactggttatataatcttgcatcttctattaccctgactgctgatccgtgcctgatggctatgccaggtctcacaacaccacgagcttttgattgctgcactctaagctgcttaataagacaattaaaaatgatttacaaatggccatcacaatgcaactggggatcaggaagagaatgttctatttgctccaatattaaaaacgcatgcccttctacagttccttctgcagctgcctttgatttcagtactggtttactccctttttagaaattatttttttgatgaatatcatgttaaaatagttcctcctaaataatgtatagctggaaataattcaagggatgtgttacacatgctaggtggtctgaaatcttcttccctttggtggggtaaacactgcctagaattctggagtagttaaaaagtagtacaaatgatctttcatcatgccggctccttctcagtttgagggtcaaacctaatttaatcactgacacatccatcttgagcatttcctctttcctcctattgttgcattgattaaaatgggcaaatctcccaaagattccattgtgagtcacacaaacgttcatctataaaaagtggaaatttatcagaaatgatgaccttgatattttgaatgtaataactgagaaattcaagtagaatctcatctagtatgtgttgaaaatgctcattttttgtttaattttgtttagtttttttttcttgtccagaggaatgaaaattgatattggcccaaatattaagaagattctctatttttagtgctgagacccaaggattagtaagatgggcattggcagggttaccataacttttcttaggaaggatgtgtggaatagattttttaaaaagaaccatctttgaagccagatatccctgtattttattcttgcctttgttacttagtaaagtgtaggactttgagcaagatgctacatctatctgagattccattttctcatctgcaaagtgaatacactaatcttaacattcagatttgctatgagaattgcatatggttatctttgtaaataaagtgcctggcacacagtaggtgctcagaaaacattgatttcttttaatcctctcattcaagagcacagatgataaaatatttatcactgttagtggtgttatccctggtatatcctggcaaatgcagtgagatactaagaagtttgatgctgaaattactttttcagcactagattattacatttttatgacaatttgaaaattaacctatcctatgtgtatcaatagcccagttttgtgctattttcaagtaatatgaatgttacagtgatggtggccacatgatatgttatgaaggaattttatttacatcaaacttcccacaatagcctgtttattgaattatccctgaaataaaaccaataaacctgtctttggaaaccagtgaccactgacccacttacatgttatggatggtttcttttctgattgccagttagtgtgattggggtaaggaggaggtaactagtgtgactttcttcagggctccccttatactctatgtgtcttctctccctagctgtctaaagttctcttcaccttgaagagcctcccatatttaacagtttatgatggatgaccagcccacattagggcactgttcaaatttcagatactcaggaaggccaatcctcagagtgtttctgatcaaaacattctttcttatctgttctgcttttttaaaattgcttttacttttcttcctttttttgttattcctaccaggttttgttgttattttttttcttcaatgatgtctaattgcaggttaccatttcatctgctactttattttttatgcctcaacatttggtcttctcacctctggttcacttctcatgggattttcttcacctaaagttacaacttattcttccttgtcagtcccacctctctggagctgccaaaagctccctcttgcccctacctgcttcagccagcattatctgcagatatatcaggtaccatctgggtcctacccttctcatatagatccaccccaaatctacctgccttttcttttctttctttctttccttgttttttttttttttttaccttcaggacttatgattctcagagaaaagagatggagaaaccagcccataacttatctatctgagctgaaacagaatcaatgacaatagtggcataagtatccaatgattttgagctaggccttgtgagtctctgactgtaaggtcaccctccttatctcaccagtgtgctgagccttacccaatcctcagcatatcacacccatgtactgagtcactctgcatcaatcccacgttggggaagagagcaaatctattggcaggggataatacaggatggaattagcacaaaggctcttctagtactacaaaatggctttcttgccatctacttgacccagcaaaactgttgtgtgataatatttaccttaaagttggttgttagagggagatagttgatattcacatattagatctcaatagaaaaaatagatagtataggggaatattttttactccataccaaacttaataatttaccattttctatgaaagtgtcttacattctacttctgtattttaataacatgttaaaattatgataattatatgatgtttttaaattttttaggtgcttttctttttctaccatgacaatgctaagtttctcttcctgattattcttgataatattctcccccacaaggccaatgttatctcctgtttcttccctccactctacctaggctggtttcctccctgttgactgtcctatcatgcgtgttcatctttgtattcttcttgaagcctgtgatgactttcactacattctctaccttcgcaaatgcagcatttccttcaaaagtcagttccaagtctttcctggacacaaaaatcaccacttatgtttctgtatgtgaaatttatcatgaaatgtaatacctaaatttatagtatgtggtatcgtttcctgtgctactaagtgcattactttgcctccttcattagagtacaaattcctccaagttaagggaacatggagactatgggcacttctctgattcatgtgatgttctcacaatattgaacatagcacatgaaagaatatgtgattatcagttggttagtggctggcttgctttggatagtcattcattcattccttaataatggttttctagactgtgggttacagatgctcccttccatcctcagtcacccttgaaaatatgttgaattacatcttacactttgccttagattagcgtttgttactatgaaagaaagaaagattttctgcctttcacagcctggatcctactcactgagactataggctgtcagaatgctacatgctcccagccctttaactcttttcactctgctatggccacaactggaatacaccttttcctcaattacaaaagccacacaagattctacctgcagcctcagtacacttcaacaattctcttattagtccttttgtaaacttactacctaagattttgcagtccctttgatgtctatatatcttgccaatctatcacttgaaggtgcctgttttactccaatgacaaaaaaaatccaatctaatattttttcaccttttctttctctgcctcagagttgataatacttacctttgtcactttcgtctcacctaggtccaggcatgagcatagccctgcttcatttcaacttagcctatctttatggccttcaggtctcctctcatctggaattgagttctgtagattttgtcctgtatgcccataatccactaaatagtgttcccattgttttcaaatataattcacaggggtaaagatagaaaatgtattttttagggctttttctaacaattatattttccatggaatgctgaagtcccacaaggaattctgaggcccaggtaaggaagaagaattagggaagacacaccagtgggaggttgcctagggcacaccaaaccattgcaaaagtatagtaaatccaggccaatccacaggtgagattgagactacagaatacattgttctttggttagaattggcttaacaacaagtcaatgacctaagctagggtaggcataagctggcgtgtcttatctcttatgcaaaattgtaagttctccgagaatagtcttccacacttagcatattacttctattacacattttaaaagataattttgattgtatgggttaagttaaatgtactccatgctcaacgttaattgatgaacacatatctattaagcactattgtggaaaatctatttggtgaggatacacaggaactccaaggaagggtaagacctttattctgcattctaggagtctgtaacatagctgaggagaagaaacacccagtaaaaatgtgtcactgaaacttaaacaaattatttaacttccttaaaaagtagtttttaatatgaaaaatgggagattaaagttggtcttctaggttccttagaattctagaactccaagtaaactagatatacatgtgtccatacttatgtcagatgggtgctatccacagtaggtgctacagttatgcagaaaataaagagatatctggaaactggggtagatatacattcatggaggtgttggagtttgaactgagccttaaaggaatagtcttggaaggaaaaattattatccatcactgaataacgtgggcaaaagtacagggaaaatacatctctacttttttttgttgttgttggggcaggcttcagccaaaagagcatttggaattgtctcgacttttccctgctctagacttctcctgtctctgcacatttgtttctgcattttcagaatctagctattttagtgtaccaaatctcttaaaaggacctgtattcattgtgatacaacccctataggaacttgagataatcagaatttcaagagaaaattatagtttcttggtgcctgaactgacccaacctcatgggtttaggatactaatcagtggttccctggatcagttatctgatcctgtcaccaatcaaggacaggactgtcacgtctcaaaatactactttttcaaggggaagaatatttctcctttagtatgtctcagcggaggtggaaaatgcaaataacctttttaggagccctttaaacacatagactcctcacttagggcccaattagtaggaacaaccaacctactctacaaggttttactcttcccttgaaattacacttcaaaaaaacatgcactgactccccccaggcatagaagcaggatccgtgttttaattctaaccttaattaaatctttacacaaactcactatttggctgtccaatgaagaagggcaagtagaaggaaggaagtgaagagcatttgctcttcctctgtcttccgtgagggttatatacccaaaactctctgtcttaatttggaatagggggaattagattttgtcataaagtcataagagttgtgttataagagtacgtgtatacagtagttgaaatgagtgcccagaaatcttcctagtttcttccccacctgtcatggagtttcattgtattaccttgcacttaacaaagccaaatcattgaaagatacagtccctccatgaacaacaatcaattctgtaactgatccttacccatctatttcaataccatgcataatgacactatcctttggaatgcagggaaaaaaattccaaatgacaatttgtcttaaatgtagacagtgctttaaaatatatgcctgatcataagagtggatatagtatttaagtgtgtcagaactttcttgctcttctaccttcctcctttttggttattgttgaaaatatatggggaaaaaatggcaaaagaaataggccctacatctgaattttaagttcctgttttttgagagaaagaaatattttgtttattttatttgttttttttttctttcccattagtaaaataattccaactaaggtaaagtttagtggaactaaacttttactgtgtgcaactctgactttcaagagtaaaaggaaagtaaatgtaataccccagtacacctaaaaccaggattaatgttttactttatcttgcaacagtactaaaattaaaagcaaaacaagacacattttagatatgatacagtgagcactagagaaaacctcttttattgatgggagcatattttaaaatatcttctcacctttagtctttgggttagtctcagtccctctgcatagggagcaaacaatacatgaagaactatttgggggaaattgctataaagaaacaataacttgctagggaaaaaaaaaacaattaactgtgaagcatgtatccctgaatctgaatcatggccataatacttattagtcccccaaatttgagcttccattgccttacttgtagaatggagaaaaaaaattcctcttgaggtgtcagtaaaagaagatgaatgtatccctcatgtttattctgatcagattatttttattttttgccttatggcatttacctttaacaattttgaatatctctgaaagaaagggagaaaggatggaaggtacgaaggagggtgaaaaggaaggaaggaaggaaaggtctttgttttccttacctggcacagctaaatattggcaaatcacaatagatagcaaaaatctaaaatacctaggagtacatttaacaagaatttatatttttaaactataaaaatgaataaatactatctaaatcaaagactatggttttgagtggtgacaatttaatatcaaagtaattccccactacatttctaagtaaaatctccctctggtgtctttttcttaatttcccagtgttcttaaaattcctatggaagaataaatatctgaggatagccaaggaaaatataagtaagaagactttgagtaagaactatgctttataattctaatataaaaccattgtaataaaaaataatgtatgaacctggcatgaaaagtgggcaaatagattaaaggacaagaattgtagctcagaaattttccccagcatacatggaaatttaatcacttccaaagctgttatcacaatttagtggagagatggaaagtgtttttttggcaaatggtagaaagataaccaaccatccatatagaagaaaataatgttggtgcctatctcacatcataaacagaaataaattccaagtgaattgaagacttaaagtttaaaaaattattaaaaatattggaagaaaatttggactagagatacaatctagtgattggttgaaacattgctaaccaaaacaagaatcctatatgctataatcttaagagaaaaaaggtcaacatataaaaagtttaagagaaatttaggccaggcacggtggctcaatcctgtaatctcagcactttgtaaggccaatgtgggaggatcacttgagcccaggagttggagaccagcctgggcgacatgatgagaccctatctttacacaggcacacacgcacatagctgggcatggtagtgtgtgcctgtagtctcagctattcagaagactgaggtaggagggctgcttgagccaggaggtaaaggctacagtgggccgtgttcatgcccctgcactccagcctaggtgacagagcaagaccttgtctcaaaaaaaaaaaaaaaaaaaaaaattacaataaaagatatcattgccaaattcaatatgtaaattatatatttggaaatgtaataaaatgtgtccatgagaattacaagtagttataaccaaaaacccaagtaactgtggcttggacaaattaggtgtcttaatttttgacatgtaataagaagttggaaggtaggcaatccagacctcatacaatgactccatgtggtaatcacaaactgagctcattctacctgtctccttagctgtcctgactatataggctttcatcctcatatttgtcacttcatgttcactgaatggcttctccaccttaaggcaggaaataaaagaaaacaggaaggtgaaagcaaaaaatgtatatgtgggctaagtttgtatcttttaaaagaagagacccagaagtctcttctagtaaattatggttatatatctttatccataaatgtgtctatcccagttgcaaggacaactggttaatatgatttgttttgtaattgtttttgtttctctaatctgggcatatttgcaactttagcattagagttattttactatggggagaagggcaatattaattccagaaaggtggctagcagtgcctgccacacaaatgaaggtagcgttaatgtctagactctacctaaaatttttgcaaattgataactgaggaaaacaacccaatagaaaaattggtgataaatatgaataaacaattcacagaagaaaaaattcagattatccttaaaccaatgaaaagatgcccaacctccttcatcgtcagacaatttcaaatttaagtaacaatgagatgttttgtattcatatgattggcatgaatttaaaagtgtggtaactcctattgccgtttgagatgtagaaaaattttaaattgttacagcttttttttaaaaaagattaacttttgaatggcagtttctattgaaagttttatatatatatatatatacacacacatatatatgctttgatcagaaatcctaattatgagactctcatagaaataaaaataccagtatctagctatacatacccaatattgcatcatattttgcggtggtttaaaaaaaaaaaaagaggaaagattaagtaaatgttcactaatagaaaaatggaattaagtaaattatagtaaatccctatcagggactattatgcagtcattttgcagaatggacttgatctgtcttcatctaaagcagatgacttagaaatatttccacaatgtattgttaagtgaggaaatgagatagtaatggagaaagataagaatgatgcaggttattaatctgggtggccagcgcttggagagaggaaggggagcaataggggaatatggaatggggaaagcaaaagaaatcaaattttagatatgtacacaagtaaaataacttagaattcagatttcctttttttttttttttttctgaggcggagtctctctctgttgcccaggctggagtgcagtggtgccatctcggctcactgcaagctccgtctcccgggttcacgccattctcctgcctcagcctcccgagtagctgggactacaggcgcccaccaccatatgcggctaattttttgtatttgtactagagacagggtttcactgtgttagccaggatgctctcgatctcctgacctcgtgatccgcctgcctcggcctcccaaagtgctgggattacaggcatgagccaccgtgcccagcccagatttcttttttaaaagacctgaaataaggaagagaaatcatagcataaactaagtttaacaagatcagtgtgggataaagaacagaagattgagaatttttttggagctgttcctgattagatgttagaagattttggttatcaccaatccttttcagagaaaaattttataaacttacaagtatccattgcacgtgctttacatttgttttatatcaatatgactgtaaactttatagagatctttttaatacatgaataggacatcttatttttaaggcaggtaaatgtgctttttctcacttcaaacaaattatgtccacaagctgaataatgagaagggtacttcatagtgtatcacactgccgaattacacgttcactgttttcatccttgaaaaccgtgggctgcttcagagtgggaaacagtcttcactgcttataactgagttccagaattttcccagccatctgattcccaagcccagagcttcggcttctgggttctgttgctggcagtgaggaagtgggatagcacattgtttaaatcacagcacttctctgtttcctggctaagttacaaaacagtgttgtagtcgtgaaactgaatatcatcagcacacatttgtggcatgcacagagcatgcacgactctgtagtagcgctctaggcaagcttatgatggcttttaaaagaggtgttgttgcttcctttaggaagtttatgaactaaaggaagacaaaaaccaaaccaaaccaaacagaaagcaatgcattggactttccatcacagcaattacatgtctgattctgggctttgtgcctattaatactcagtaatatccattgaatatgtgaacgaaccaaccacgttaacaggaactgtactgttatagcaattcttaactggaagttttgtcttctgcctcactccactagaatctatctccatccagttgaatgcaaatctgataatatttttttcctatggtttccagatagctttaggaatcagaaagaggcactgattgtaaacctgaaagtgtgctttgtggagcctgcatgatgttttaaataattgaattagaatgccttttaatgagcggcacactctctagttttcccacagaaaacctctagcctatggtgttgaataggtgatcccccagctacaggataaaatcccaactcctcagtgatgtacagactcttcccactttatcccttgcttattatttcagtcttgagtcccaccattttgctatatgcaaccggcactctagccatgctggattgtttgctgtttcctgaatatgctgtgctcgttcagtcctctgcaaatgtacttatgctacttctttctcctgaattgcttattctgtctcattaacctagtgtactccctcctacccattcatgttcaattaaaatattactgccctcataatatcatttttaactgacctagaaaaacaagttagatattcacatcttcaatattccatctatttatcaattgttgcactttttatattgatacttatctgactcttcacccatcagaaagatggagttctctctttgtacaccttgcacctatcactggcttcatcacaggatccctatcacagtctttttgatgaagcattgttggatggatagatggatgcatggactaggtgataaatgaatgatgaaccattaagtgaaataaggagtgtggtatagacttggaaaagaaaagttactgttgaaatagctctagagaaaaatattttttaagagttgtataggataagatgaaggtgaggatgacttatctataattttatctttggaaattgtgagttaacatttgtaaacagggtggatattttggagagaaggtgctacataactacagcacaattatttattatcctctaaaatagtccctttctttggcatgtttaaaacctaaagtctggttggcgttataaatatgcatgagctgttgggggaagagagcataaagtgtgaatcacacttcaaacagacccacccgctcactcccgacttcaagtttttcagaagtgtgaaatgaaaatgctttaaaattagaaaatgtgccatcagaacttttatcagccctcggagaaaataaataatctctaaatgtggggaatgctggggatatttatttagttagtttcacagctaagatgctttgataaatttttgtgtcataaaatgcacaaattaattttaatgaatgtggaaacaaataacttctaaaacagcctgagtacccaaggctgcaatctagggtttctgagggattattgaaacctaatctatggacaaattgtctcaatggggaaaagaaactcttacaggtgtctttccctctgatacatttgcatttgaagggtgatcttgtagcatttgaggagtgggtgaatttctggaaagagacacttggatcttaaattgctaaatggtaacgaaaatgagagaaaatagtacagttagctgtttgctttcgagtttgtggaaagtgattttctaatcaatgttactcttgatttcttaagcataacaagattaaaatgagtgtgaatataaaagatcatgataaaagataaaggatgatgacctgagatcttctttattttttattactaatttgtttgaagaatagtccatcatttccagtaactttttgaccaaaaaaatggctatgtggttgttgccatcaaggccagtaatagagaagagggacaaagagagaggtgctccattggtatcctcaacctgtgtgtagtacataggcatcactgggtgggctggagctagcccagatggctgggctccacccaggtttcctgatgcagtatgcctggggttgggcagcctgagttgcatttgtcataccctcccaggtgatactgatgcacactttgagaaacactgctctgttccaatacttacatgcaatttttttaaaaaaattatgtaatgaccatctgtggttaaatgctgagctcattttataaaccttaagcgtcttggcaagtgtctctgtcttttttttaattgtctgataatttaaaataccattttattagcctactattgtggaagttgaaactctattatattcactctgttattgttaaccacctcacattttctgtggtatcgtagaacagaaattgttctaaaggaatggaaaaacaacatttactttcatcaaattgttgtctagcctcttgattgagttatagctattgttactaatttattgctagtttttacaacatgcccatgatttttttctgtttcagactgaaagtaaatctgaatagatgaaatctaatttaagtacatgctgttaggttctgtgttttgggggatagattaaaaatacaagagaaagcacaagacaacatgatctctcacatgtatacatatgttcaactgcatgtcttttgttgataatctccaaaacatacatattttgacttcagtaccataccagatactggaaaccaagtgataagatgactttactctgggatgtgaatgtcattgagtcagcagctttctaccaaatcattaatctctgcccaggtccaaattgcttcagtgattttcctaccactcagcattttccttggtgaaggacccttccaatacaagtcttctggcttttctttctactagagggaaggctttctctcagcagctatttctaaaatgaggctgatgatgagagtgatagatgaaaaaactcatctctgaggtttgtcttcttcttgcatctgctgatagcactcacttctcagctcctctttatacctaaaagatgtgcttctctattatttcaataattctgatgctgctcattctttacttattttcagagatgtttatgagatttcaagctccttaactagacatatacaaagagcaagaaaacaacaacaacaaaaaattctccctggtcttttctggaactaacaatagaatacttgaccaagaaccaagattgcagactatctcagtgttagtggaaccatttcacttctcgatgttttcttataaaacacacagtttgagctgtattgttaatctacttggaaagatattatcattttttaaaacaaatatctgctgggtgagtgttaggcaatggctctcaaagtgtagtcccaggaccagcagcattagcaaattcccagttcccacctcaaacctgctgagtctgaaactctaggggaggaacccagcaatttgcgtttcaacaagccctcccagatgattctgatgttatagcaattcttaacttgcttaagaatttggaaagtcttacaaataagggcaggactgggtggagaaaatggagaggtctgattatctttcatgtaatccccacataatttggtgtctgcaggagacacttttatttgtttgctataaataactgggagcttgccagtggtgaagaagatatccagagaacattgtgaatatatacttagtttctccaacctggacagaccaggagcctttatgtcaagatcctgcacggataattcccctcaggtggagagctggtggtttttccaagcacccagccacaactgccactgcattctatttctttaatgctcaatcagtgcccctggccatttgatgatcattcctccctaatgttgtgaggtatttagtccaaatagtacaatccatgtttgctttctttctcttctagtaaaatgtataggttgctgtaatagcctgtgtctgccccagaccacaatcataaaaataataataaattacctcgctgtctctgggttttctttcaggctcaacatgtggtttgtggcttatggggtattgattgtgcattatcagtttagctcacacactgacaattacatgtagcgccaaggtagccgtgacaatgtagtccagttgccatagcaatgaaagaaggcctattgctgctacctgcaacctgctttatagtgataaacgtgctgcttatttcattttaattgaaatttgaaatcatagtctctagcaagaaataaatggactcattccccatttttcccccttggccacacaaaaacaagtattagtaggaaatatctgagcatttttaaaaagtaaatatcaaatttttgacagtatgttttccagtagtttcactggtactagaaacagatgaagagtgatactttgctgaataaaaattgaattagctctcatgtttttgcattcttaattaactgctattttttatttccctaagtccctcatcttaacagcttaccctgcatggtgtactttatataacagagactttaatggatttacttgctgagtttagttcatatctaaaaactcacagcagatatcataaggtacttgaaaattagaatcacagggcgctgtggaagcttttacataattgaaaaaattgataataataataaatatttagccatgtacggtttcacttctatgccagtgcctcatctatgcctcagacctaataatctttatgtgacgtcattactacgtactacagtcatatacaatctatagtgctatatgtagccaagagagagagatactgtgaaatatggtcaggaatgaagagattctatgtcagtcagtccaaaaaagatagaaatttagtacagaaaaccaaccaactatggaaatgaatagtaagatagtaactaaatatgtatagatgtgtgtatatgtatgtgtctgtgtgcatatatatatatatatatatatatatgcacacacacataggcatgaagtgccaaactatttttaaaagtatgaacttggtctataaagattctaaataggtcagtggaagactgggtcaaatctgagattccactttgaccttttgatctttatctgaaagaagtcagatgatttcccttttctggtacaagcctgtaagttagcacaacattttatttccctggactatgtgaagtatatagtagatatttaggacagagagaaacctatggtggggagtaaaatttaactagggtaatataaaatataggatctccccttaaagagcttatgatgacatgtggctgggcacggtggctcacgcctgtaatcccagcactttgggaggccaaggcaggcggatcgcttgaagacaggagttcaagacaagcctggccaacatgatgaaaacccgtctctactaaaaacacaaaaattagccgggcggatgagggttcctataatcccagctacttgggaggctgaaacacgagaatcgcttgaacccaggaggcggaggatgcaatcagccaagatcgcgtcactgcattccagtcctgggcaacagagtgtgaccctgtctcaaaaaaaaaaaaaaaaaaaatcttatgataacatgaaaacttatttttttataaagtgacctcagaaaatgtgcacagggtggggcatctcatgtgaaaagcatctcaatcattgattccagccacatgccatcataagcgctttaaggagagatcctatattttatattaccctcattaaatcttactccccaccataggtttctctctgtcctaaatatctgcttttagaaggagtaaacatgacttgggaattagatggctcccatctgtgaaaatggattcttaccagtggtgttttttgggtggttgggttataataaaaaggaaaatattatttcccttatattttagtctttcttcttactcctagttataatcatggtcctccaaataattatgatgataataaaatgatcaatatcatgtttaatttattttatgtccttattaatacttactgagtacctagcatgtgtgaagacgatattctaagtcagcagtccccaaccttttggcaccagggaccagtttcaccgaagataatttttccatggactggggttgggggatggtttggggatgattcaagtacattacatttattgtgtaatttatttctattattactatactgtaattatataatgaaataattatacaactcaccataatgttgaatgagtcggagccctgagcttgttttcctgcaactagatagtcccatatggtggtgatgacagacagtgacagatcatcaggtattaggttctcatgaggaacgtgcaacctagatccctagtatgcacagttcacaatagggttcacgcttctgtgagaatctaatgctgccactgatctgacaggaggcagagctcaggcagtaatgcgaggagtggggagcggctgtaaatacagatgaagctttgcttgctcacctgctgctcacctcctgctgtgtggccccagtttctaacgggccacagaccagtactggcctttggccacgggtttggagaccccttttctaagtgttaagacaagacttggaccttcatggaacctatattctagtaggattaagacaggcattaaacaagtaattacacaataaattacttaagttcaattataatgaaaaatactagattctacaagaaattataaaatctactataaaattctttagtgttgttagcagataatttactcaccatttaaaaattatatcattgattaaatcaattttaaaatgggaagtgactttgagaaacagacttactacaaacagacacataaagaaaaatctggtacatgttaaagagaaatattgctataaaatcagaatacattatatgaagtctacatttgaattatgccatgtgtcaagtttgttaagcatataggtaagatgtaattattattttgctcttgatctacttttattttttatacccttaattctaaacctttggattgtattgaactttaaaatacatatatttgattcatttaattttaaataattgaaattattatcaaaacctcattgctctgcttgaagcagtagctctacttccctatacttcagtttttcatgtgttatagcaagatctgtactagaattagccagttcaacccaaccacatctttctgtttcgtccttgccttgactgttaattagctcagtggatttttatgtcatgaatgcatttgttttctaatacatcttcattttaatgtaagatggttgaaaagaaggaccaagtcctctgagaaccccatagtacaaagtaaaatgcctcacatctgacaaatgctcagtaaacatgagtagtgggaaatcttgattatatgctcattaaaaatatatctatgtatttaaagtagtaagtctggtgttcaaaaggtaaaaccttcaaaattctaacacagttcttgtttggattaactctagtctataatcacaactcttctgtttccttgtctgcactgtgctcacataatggctatgtctcttaccgccaaagcccggctcactgcttacaacggcatcctgtttcttcacctgtttttcttttgcttacctgacaagctcttgcattcataaaagtcgaaaggattccagcttaacgtttcaatcccacaaagttgacttccatagcgtagcctggaacaccttgtctgtgaatagatatggaatcctcaaatggttttgaagccactaccagcaacaggtctgagatcataggacccaagaagaaaattgaggctggggaaccacagagagtctttccacaattcaaagtaataacaaagcagccacaacagcagaggtggggagagatgtaggcatcagattgcctagagctctaacaacctaccctccacatagaagctgctctctgcttcaggcttcagatccttaaatatgggtggggtccttcatttagtgtcaaagaattgattagaaagctcctgcaatgtaagctcattaatgaaaccattttggcaggccagatgatataattagcccaaacaagatatgaaatctacagtgttttgggcaactgttcagtaatttttaattttgtaataaaaaagacaaggaaaggaaacagcaagagaagatgattcatgcttattggtgaaaaagaataagatataaagaaaaagattccaagataacatttgctagatgtggatagtaccttcaggtttccatcatccttctgaagacagtagcatttacaaaaactgtatcatctctacctttacaaaagtaggtgctatgtcaatagtgtgtttataggatgcatggatattcttcaaaccaaagtataatcacaaattctggtctcgtcacagacattcatttaaggaacatctccctcccctgcccccatgctaacctgagctttctggaggatgataaaggcgacctgaataatgaagtacccaagtctcactactgaggcgagtcaggggtaaagagtttagcactgagtggctgaggatacgtatcaagggaaaatgtcatccttgggacttctctttaaataccagaatatgttttgttttgttttgatttgttttcctatcagggatgtgtctttattggcaatccctaatggaaattgctctctaattttcctctagtcttcttatttgtattgtttgtatatgaaaagatgagatgaatagttaagggtactgcacaaatactttgcttggtcctataggctctcaggtttttttgatatcatgtggcatttgtgtcaaattgagttgtgctgtaattttattaacaagcttcacatctcagaatattttacagagatgcacctaacacagttgacatgttgtctattaaaagttacatcatcttaagaagttattagtccttttaaacatcattttcattctaataagctattttttatttctaataagctatttcttatttctaataaactattttttatttctaataagctcgtgtcttgagcagaaacactaatacccaggaaattttctgaggactggctcacttaaaatgaagggaagtcactccacgctctgagttgtcttctctcatcttcttcatgtgaaatcctggacacttgcagattcatgacaattcagagattattaatccaattgcttttaataaagactgtcctgaaagatacacatggtgaaacattctaattgtaaaagattcatagagcaaacaattctgtaacatctatttccatatgatttgagcaatttcacacttgggaatttttttttttttttttagatggagtcttgcactgttgcccaggctggagtgcagtggcacaatcttggctcactgcaagctccagctcctgggttcacgccattctcctgcctcagcctcccgagtagctgggactacaggcgcccgccaccacgcccggctaattttttgtatttttagtagagacagggtttcaccatgttagccaggatggtctcgatctcctgacctcgtgatccgcccaccttggcctcccaaaatgctgggattacaggcgtgagccaccaccgtacccggcccatacttgggaatttttactacagctgactgaaattttttatttgaatcctattttatatatgaggatactatttcttctttacagcattaaattttctagattaaaaaatactcatttccccccaagattttataaaataatttctggcacttctctaggttttctagctgtatgctattttgagatgacttggagtcaaactgtctgggttgaatcaaggctgtccccaccagttactgtctgtctgaccttgagaagttatttaacctctcagtgtggagatgttcatggtacatatctcatagggtttctgagtggataaaatgttctgatacatgcaaaatagttagaatagtatttgcctggcataccttaagcactcagtaaattatagccattctattttattccattccatgttaatggttcaacatgaaatagaattgcatccaaacaaatcgtgacgtcaagggtgttacctgaaaaaaaaaggtgtttcttacttaaatatattaagtaaatatagggttgtgtacaaattttaaaattttgctttactgtgggacttttagaccttttcatatataaatatgtattgtgtatatccaacgtggctaacatgccatgtctctctcttttttatgaatcacccactaacatctccagtgaatcaaatttggaaacaatgggcagtcacaataagatacatgtctgaaaacccaaagttgattttttcatgctttcagtaattacattgaagttgtcccaaaggcagaagaaagaaaaagaaatcaagtctccaaaatttctctatcctttagaaagaaactccaccttaatttttggtgaggagtaacagatctcacttgggtggtagttacattttgtgatgtgagggtgtcagctttttctccaaggatgacctcccaagaagggcagggtcactcacttctgctacacttcccagctgtctcttttggctttgcacattcctgtctcatgactctacagggaaatccatgatgtagattttcctgtattcaagcaggcaaagatacgggtcaaacatttaaggccgttaacaagaagttaaatcagcaacaacatttatatagaggcattaattcagggtgaacgcaaaatgtgttgcagcatcgattctggcatttttctctgctcctaatagctctgagcatttgatctatatgttatatggacctaaatgaagggaaataaacatctggacagattccttccaatcgagtttccttcttaccatttttctgctgtgatagttaaccaaggccatgggcttcgttcacctagaaccagcctaaaattaaggatgctggccagagtacccaagtgtgatgcttgtagcatttaagcatacagataaattctttttgaaaaatttcaaacaagtgtaccatgagcggagtcagagcccctcttgaaagcaggttggtaaatttccagaaccacttagcagttttcataggtggcaaggcattgtattgttatttttattattgttaggagctaacatttgtttccaggaactgggctaaatggttcaaattcattatctcatttaatctttacaatatttctgtgaggtagaaagtattgttatctccattttagagatagcagttatagaagaggcatctggagctaaaacagattaaatgaccttttccctcaggttcagagtaagtgtcatattgcaccccagaataattctgtgctcaccataatgatttacccttctaaaaggtaatataatgcaatttcagaaattaatgattcttaaaaatgtgtaagcatgcagtgagccgagattgcgccactgcactccagcctgggcgacagagcgagactccgtctcaaaaaaaaaaaaaaaaaaaaaaaaaaatgtgtaagcataagaaaaaatagcgaatgtccttttctagcatcacactagattttacgggtgattacaggaagacccttttgagattttcagcaatggacttttcttggatgagacggaagatgctctcagctggtgtgactaaattgtttgcgacttgaggacatgggtcatgccctctgtgtgtaccactcactatatcctcatcacagttcctgcataaagcagagattcagaagggtcagtcgagaacatggatgacaacccaacactgtaacccagcagcttgtgtcttggtgtaacattggtaggttttgtttgcctttacatttttaccataagaggtcaactagagtttctatcttgttacaagttcattacacaggtatcccttattccttcattcaacattgcaaagaaaacatctgtaacatgctttgagtcattaagagacattgcatacagtcaaaaaatagcatgaatttattaaattcagtactttggctgataaattgagaggaaacctttattgcaatttggtggtgatagtggagagtctctttccaaatataagacctagcattaagaagtatttccaagtctcctattttaggaatctcaaatctctaaattcgagatatgtggaaaaaataggcaattttcaagaaaatttgtgttgctgctagccctttggcttgtacaatacatatttttttttttagaatatactggaaagatgaaatctctaataggtatctttctggagaacagtctttatagcaaggttttctttacacagagcaaccatgcacatgtagttaatggatctccagacaaaggccatttcttccctaaaacaaagccaacaaggcaattgagccaagtaacttcaaactccccagaggggacagcagccattcttaaatccaccatacttttgaatagctatcattggtcattatcttccaaatggctttgtaagtgtctaggcataatgtgattgctttggaaattctccatttttcagggtgctgggaaggacatgaacagacacttctcaaaagaagacatttatgcagccaaaaaacacatgaaaaagtgctcaccatcactggccatcagagaaatgcaaatcaaaaccacaatgagataccatctcacaccagttagaatggcaatcattaaaaagtcaggaaacaacaggtgatggagaggatgtggagaaataggaacacttttacactgtcggtgggactgtaaactagttcaacccttgtggaagtcagtgtggcgattcttcagggatctagaactagaaataccatttgacccagccatcccattactgggtatatacccaaaggactataaatcacgctgctataaagacacacgcacacatatgtttattgcggcactattcacaatagcaaagacttggaaccaacccaaatgtccaacaatgatagactggattaagaaaatgtggcacatatacaccatggaatactatgcagccataaaaaatgatgagttcacgtcctttgtagggacatggatgaaactggaaatcatcattctcagtaaactatcacaagaacaaaaaaccaaacaccatgtattctcactcataggtggtaattgaacaatgagaacacatgaacacaggaaggggaacatcacactctggggactgttgtggggtggggggaggggggagggatagctttaggagatatacctaatgctaaatggcgagttaatgggtgcagcacaccagcatggcacatggttacatgtgtaactaacctgcacattgtgcacatgtaccctagaacttgaagtataatttaaaaaaaaaaaagtccctttcttctttatctcttcctccctgcccctttcactgttctgcccaacacaaagttcaagtcgtctagagacgaatatggcttttgcttttgtagggactttttcctgagtcccttcctagcagggtacatgcaatataggcctgtgagaataactttctgcggtgacacagaacagtgaaaactgtaagtcagtctatggtgagtgcaatcctacattatttcatgcataaaaaagtcatacatctgtatacatatataacctatttcacagtaacaataaaaacatatttatcgattcatcagaggatagacagatttgtgtgtctatccaaatgtattacactgtgatttttttcttccttgagaaagatttccctgaagacaatatttatggcagggcaggaatttatattacacttgaatatatgttctgacaaagaagcacattgcattttggaattgggtgatattggacattcttcaaaaaatcttctaaagggaaagaatgtttcatctactcatttgttcagatttccctataatttttagccagcagtcctttatggatcagatattgcatcaaaaaagaaggggaaaatattcttgtcatggagacattttcagattaagttgaaaaggtccataatccttacggaaattttttttttaatcatcatcaggctattcttgacagtcagtaaaatatcaggtctttctcatttaactgacagatttcttctttttgctttctttcttccctctctgtatctatatctactctctttccagggctcacggcatatagtaagtattgaaaaaatgaatttaagtctaacttatacatacttgtgaaacctcattccttatgataaagaccttaagcttttctaaatgcagaatcagccactggtcatttttaatggacacgtagtggttgctattttctggagtgcaggattcattagggtcattgctggcatttggctatgttcagttgccccggtgtgctactgaaggcaagtgtccaaacgccaataatgtttggtttctctcgatattccgaggttatatatcaaaagaagccgtgtgtatggcttccagttacccatccagagaattcctgaaaaaagcaaattattcttaagatcccctggaattatgaatctcttggtggagatgcatggtagggaaaagggaaacttgatctggtttattctgaaccctttcttctcatcttatccttctactaagtcacttgaaaactgttaagaaggagaacatataggcattatgaaagaaactatgttgtagcagaattcttcaaggtctcaggatttacccttataaaaactgtacataatctaaagcataatagccaaaacaattcagtatgaatcagacgtacacatacataattgtctcattgagtttcccatctccactaagtcatggtcactgttttgccttggttatggtaactaaaagccaatggagattaacggaaagccccccaggagaaaatactcttttgcggtctttggatgaaggcctgagtatcagcaggactggagttctaaagaaactgctatgcccattgcatgagacacatgaagtaatgaactatagacaagtcatcataccagtatttcagaaagtgaaactgatataagaacacaggccagacaccaactcaaacaaactatggaagcagggagagcaaactgaaatacaaaggcatggccagtagccagagcaggagtgcctcagaaattgatgatagatgaagacaatttatgtagcagttcgtctaatggcagttctgcagggaggcatccttttgaaggtgatggctcaggttggcctacatgttcctgcccaattttaaaggtgtcataagccagtgtaattggggatctgtctggcttctgacttcttgcataactatgttcccacttacattggggtcttggcataatttgtctcctgacaaagagaaaatagaaaatatccaaatattccagccttatagcatagatgggtaaatataagacctttccttttagcattgatgacagtaaacacaattaatagctttctatttgccaggcatgtgacatacgactctgaaatcttgcaacaacccagttagaacgacttactaagacttgaagttaagtttgcctaaatgtatacagcaggtgattaaaatatggatttaactgctgatttgttcatatttaagatccttgacctttccactgttataatagtacatattgatattccactggcgatgagtaagcatgccttaccacttcacaaatagataaggtggcttctaagaaaatctcaaatagaggtggtcaggaagccacaggaccaaccaagaacccagaaacgacagtgcttactagatgctgcttgcattctaccatgtggatacaatgagtaaaacttgggtactaaagtcaaagtgcctgccaccacacctggctaatatttgtatttttagcagagatggggtttcaccatattggccaggctggcctggaactcctgaccttgtgatctgcccacctcggcctcccaaagtgctgggattacagatcccaactggattgggatcttagcacttacttgctgtataacttctccaggttactgatcatctctaagtctttgattcttgttctgtaaaatatgataatagtaggaataataatagtgccttctttagagatagttgtcaagattaaagtgcttagctcagtgcttgacatagggtaaatattcaacctatagtcaatcatcttaagtactcttgtctcaccgaggaaccatcaggaggtgtaggtaatatgcaaccttgaattagatgtaataaaatggaccccacaggaagtatttggggatattttaggcatattttccagtacacatatgcaatattagataatattttccaaaccaatgctatttaacctcaaatccagcacagtgaaaaaacattgaaaggtaaaagaaaaagtcacttcacttccatagttctcagaattaccatgtagatatcaaaaggtctcttccaactctgaaagtctgtgactaattttgttaaacccctactgtgtgcaaagtttgtcactgggacgaataaggttgacactctcagagaagcaatatgtaaaaagacatgtacaattctcttaatttttttttttttttttttttttgagacagagtctcgctctgtcacccaagctggagtgcagtggcatgatctcagctcactgcaaactccacctcccgggttcaagagattctcctgccccagcctcctgagtagctgggagtacaggcacctgccaccacacctggctagtatttgtatttttagtagagacagggtttcaccatattggccaggctggtctcaaactcctgaccttgtaatctgcctgcctcggcctcccaaagtgctgggattacaggcgtgagccaccacgcctggctatgtacaattcttaaaataagctaaagtgataaacttaccctatggctttgtcatagaagggttttaaagacaaaaaaaaaaattgaaaaaaattgaacttctgagaagaatggtgatattatagatatgctatagcctctaaataagaatagtgatgtttaaaggaatataaattaaagagaacactaaagggaaaagagagatggattttaccctctggatctgactttggttttaaattgcataggcaagagattggttagagagatttatttcaacctttagtagtgtattagcagtgtcacagaacaagggatatggttaaaagaaagaaggtgagaaatgcgaacaaacaagatagtgtcttggaatctgatttatttaaatttagattatattgctgttgcattaatctttgtataaatcatagttctaagcacattaaacttacgttgcagtcaatttttaattttgcaaaccttaaccgatgtttattattataagctgtgaacatttttttaatcattgagaaggcccctctcaagtgaaattttggttccaaatggccaaagtaactaatgggcagggaaaaaaatctgcttaaactctcatttcaatcacagttatgtggaaacatcttgaagacaacagtaaaggaaagagaaagaaatcaggtggatggagaagatacactagaggaatgagatctcctacatgagtaaagtgttttctaatgtgtttttcttgaatgatagcatcttgaatttcctacaaagtatggaatagtttacctctgactagcgctgccctacagaacaatgtcaatttattctaagactgcaatgttcagaatgcagatatgatcagttcaacccagatgagacaatcctataaatgtaataatagaaataactatttgaaacttgaaaatcagaagtgttttaactttcttcaaacacttagactataacaacatttttagtctaatgtaattagcgcaattttcagaggatatgtttatatcaagaatattcctgtgggagaaatagaaacttttaaggagaggtttctaggattcttagacaactaaaactttcgtttgactcagaccctgatattacattttcccaggattcctctcacttgtgctgttttcagtgattgctcaggttatttcgaatgatggcatacatatatcttctctgacatgcaaaaatgccagaaccttctttttcctccctctgttcccagaaagaactaagaacggtctagctttgagctaaattgtacagctgactgtttgttttgggaacttccaaatgaacatatttggtgttgcactggtgcatcccaggaacagaactgtctgaccagaagagcaattctgcttctggaaatttctagcacataagaagatagctggagggtatgtttgtctgtatagtttagaggctggctggtgctataaaggaaagtaagaaaaaggcaaagatatccttcagaggattcccccagaagaaagtagcagttatgaagttttattcctgaggtaggacaggcagtcagacccaagaggtctcagtgtctctccctgtgttggatgtaattgcttttcattgtcaatactgaaagaaggcacacaagagacaaatgaaatgtgtgtgtataaacctggctttggttttcagagacagtcttcttacaccttcagatctcctagatgagctgggccttacagaaaatacaagtcttgagctctatttgtttacagttttcaaattctcagcttctgcctgtaagatatctcatgtgattaactgatttttctaatttaagggagttattttctgtggaggaagaggctataaagtcacatttttatcttattttcttttttttttctctgatatttcttctctgttttccacattccttgtcactgtcaaaactggtaattaatcaagagttagtcatggatggctccttttccctccccttcttatccttcattttcctgcctgagtgataacgaatgatgtctcttgtcctgtacccctggcttcctctcctcagagcattcaagccagaccccatgacaagatgctcccagtgaagggagaaaactgggaatgacaaatgtgagtctgggaacccaggcatcaaggggtggacttcctgatctctaccacttgccatcatctatctctccatgtcaggaggcctttgggaaaagcagaaacaaaagagaaaggaaaagttctcatcccagcattttagcatcatgagaaacctggaagtacctttgcaatagcactaaaatatgatgagtcttgagtctttcccaaggttttgatacccaccagcccacgagtatacatgtaggcatacttttactctctactttctccagcttaatgtttttccaagtgtctggaggaaaataagagcaaacatctttgtaaaattggacacatctcttctttcattatatgattggtttatgtgtctgaacaccttaggactcagtctttactcttatttaactgaagagattaggggaaatacttcctcacccaccacagagtctgaaattctgctattagagactcatgcctttaggtgaaaatgttgcatctccaagaagacccatgaaaacagaagtgattctaggtagaatgaagatacaatataagctaatcgatgatatcctcctataaattcctttggcagatctatttactatggagatccctagtggagaggatggccttaaggaattgggaaataaaatagttaacttgagataggttgaaagagaaaataattcctgagaaaggaacacaatactgcttgaaaatagtactaatgtatttttacagattagtttttgctggttcctgaaccaaatgactagctgggacttcttattctcagatttgcctcacacccacttaagaaaaataccagattgacatcctcaagttataatctaaaatcccagggagggagcacactagtcaggggtgagattaaatgaggcaaaagtgactgcatcacatttcactgtctatagaggctattggcagatttatgcaggctgagttaagtgaatgacttgatagcctggatcacatctatatgtgtttttcacaggcatcatgtcttagttagttttatgttgccataacagaatgccccagactgggtaactcaaaatgaacagaaatttatttggctcacagttctggaggctgggaagtcttagtgcatgaaactgacatctgacatgggcctttgtgctacatgatcccatggtgaaagttatcacatggcaagagagcatgggagagagccaaactcaattttataaccaactcacttctgtaataatgacactgatccattcatgagaacagagccctcatgacctaatcaccttttaaaggtcccattgttcaacactgttgcattgggaattaactttccaacacatgcactctgggggacacattcgaaccataccaaacatccactctgtagaatgttgcccttaatatgctgtgattgatatagatagatagatatagatatagatttttttttccttttcagtgtgttttagtatattagttgggtctcatttgcttgcttaaactgttgtatgaaaaaaaagaaatgtgctgcaaagatacagaggtatattgtgcagctcaaattaggtcaggaatgttattaatttaattagttatccatgcaatatgctgcataacaaacaaccacaatatctccagcagcacaggacaataaacacttatttcttatggagctgtgggttgcttgagggtcagctattgcagcttgagactggctaaatggctccactaatctcagctgggctcactcaagggtctgggggtcagttgaggttcaggttatataggctttgctcaggtgggctaggtcagctctattacacatctcttatcctatttctgggtccagcctgctagcttgggcaaattcttttctgtttctacaggttaattttggctggttactggaccaaatgtctctgtggaaattctccttctcaggtttgccttatatccacttaagaaaaatgccagattgacatcctcaagtcccagtctaaaaacttgggtaggtgcatggtagtcaggggatgaggtcaaattaggcaaatgtgacttcatagccctgctgtaaccagctggaaaataagagaatgaacagacaaaaatagacttgtaccacattaatgacatactgattatttgaattagttaattttgctaggagtagagataataagagtgtggttctcagttgctgcttaccccgaacaagagtcttagtaaattgaccagctgagtcatttgaacttgattcttggtaggaagacttttgcgtggcttatctactgttttttcttctctttttcttttcttactgtatctgtaatttctttttttttttaattccatgatttactggaaatctcaaaggatgtttgaatgaactctaattatccgttgtctttgttgtcgctgactccactgtcaaaaacccaagccaggcatccgcttggtttggtgaccttaaccacaatttgaaggctgctgactgatcagggcagtggttgcggaaggttggggtggcaaacaacaaagatgtttcccgcaaggaatttgagtcttcctttcatgaaagacttctttgtagcatgcgatgctatttgatagcattttacccactgtaggacagctttcaaaattgtagtcaatcctctcaaaccctgccattgctttttcaactaagtttatgtaatattctaaatcatttgttgtgatttcaacaatgttcacaacatcttcaccaggagtagattccatctgaagaaactactctttgctcatctataagaagcagctcctcatctgtttaagttttattatgagattgcagtaattcagtcccagtcccatcttcaggttccacttctgattccactctgccacacatttctctgtgagtctgttaaaatatggataatccaaataacttctttctaatgtgatttatatgaaatggaagcatgttctccttcccccttatgtgctcttgttttgaattgcaaatattcagttttgcatatatttaaaagttattttgacagtatgtaatgtagatttaaaacattctgaagttggctgttttcccttgatcaattcttcttttagaagaaacactgtaaataaaccaacaagtgtcagagcatacagtatagggaacagccaaggacaatctgttatgatattctgtgtattaaaaaccagtttgtttataccactaggagaatttcattttttagtatttggatttgatggatttagtgagaacgatatgatttgcttcattagacagctatgccacagctgaacgatgtgcattactcttaatgctaaagggagataaatgtaatgatagaaaaagttaagggaaccaaagaggcaatattcctagaataagcagatgaaaatttaactatgatgcacagaagttaaatgtcagtaattccattcaactaggtcagtggaattggggcaggaactttcttcattgtagcagtgaagctgttagctggtttacttagaaaccttgaatctgaggaatcatctccagagaacacctgatataagctacagttttcttgactcatattccaaaatggggattgaactgtgagaaagactacaagtaatttctgagttactgaacttagaaaaagcaaaactggccaggtgcggtggctcacgcctgtaatccagcactttgggaggccgagaaaggcggatcacgaagtcaggagatggagaccatcctggctaacatggtgaaaccctctctctactaaaaatacaaaaaaattatctgggcttggtgacatgcgcctgtagtcccagctactctagagactgaggcaggagaatcgcttgaaccctggaggcagaggttgcggtgagccaagatggcgccactgcgctccagcctgggcgacagtgagactgcgtctaaaaaaaaaaaaaagcaaaaccttgggacttctttctttcccttcttattttcacctttccttctcttccttcttctctttctacttcccttcttgtctctctatttttaccttattcatttcctctcgtgcctttccattttttatatcaggaattaaataccctctagagtgaaacgatgaataaaatctactagtcctgtgagaaggacaaaattaaatgtgttgggttgtgtttgtgattgtgctgatgacagcaaaagaagccacactgaggattgaagatgagaaaaaacaaactacaatgttcactaacgtaatttttaagggagaagatataaagattaccagagttcacactttcaaattgtttgcaatcaattgaaagtcgaaaaaagttatatgttgaacaacatatgagaaaaaagcaagtgaccatttaaggtgatatgtgttaagagcaaatcaactgatagagatagaaatgtggatgaggaagaccaccactattccctggggtagtcaaaggaaagttggcctggtactggattttggataacactgaataagattcaaacagacaaaccatggttggggcccagcttgagcaaaggatcagaagcagcagtattccagacatgtgagaatataaatttggttcaagtagaaaggtttcaaatggcagatgactgtggaaaaataatttggtgaaaacttataaaaggcccggaatgctgagatagaaccttgggttctattcagtatatattttgagaaccactgatggtcactatggagaagaaagacgtgtgctatataatagaacaagaattgagaggtcattgactgggggagtttcctagacccagagaagggtaagaagggatacattttgaaggctggtacataaagagaattaagatatcaatgagacatattttaaaagccaagagaaggagaggaaagtggtcattttcagttctgaaggtgagagttttgaggtttggatgactatgaaataacccagtgagaatacccatttatcagtgggaaatcctgaactagagtttgagagagtctgctaagctaaagttgtggatttgcacgttagcctcctgaagaggatggttgaattcataaatatggatgatactctacagaaaagaagtttgcttagaggatttggcatatccatgatgagagtataccggggaagcaaggaaacactgaagagagaaggggtggtcagaagaactgtagaagtggggcaatatgtggaatagtgagggtctcagaacagacagaggacctgggccttgaaggccagctgcgtcatctggagatgaagatggaaggaaatggggatcattgaggatgaagaagaaaaggagccctaaaggtctcttacagtcatcactttgtccgtagaaacacatctctgggaaggaatgagttaggtttttcttattctttcttcattaataaaaatagaaaaacaggtggtgaaacaaattggaaaacaatgtacacacaactaatactcttgaagaaagagatttcacactgtgtcctgctaacctgttctgatattcaatggcacttgttacccaggagttcttttttaaatcactatctgaaatccctattgctctcctgtgagctgtattttttttttttttttttttttttttttggctttcctctgtttatcctcaggggacagaaagaacatatggcaactatctctcaagtaataatccttcaattttggaaatacgtattatataagatttttcctctctagccttttattctttgagctaaataatactaagaaatttaggctttctttatggtcatttcttcccaggacaatggcacagactgagtcaaattcagttcctaggacttggataaaatttatattgaagccactgctttgaatcagcgagcagtactgatgtcaagtttgcctattaggtagaaattcaagaatgaaatgatgatgacccttttgggaacaactctgtgcatcctttgtatcctgagagcacttatcaaaactaatagatgagtaataaatctttcaaaacaaagaaaaccgatggacaaagtggtgaaaatatagcatttgtctcttattgccaatgcgtggcacataccaactcaattcatatttgcatgaatttatgaaagcaaggatgaaaaaatatgtactaagatataaaattagcaatattatttttaaaaggttgttaaaagtcaaggccttttgggccaggctgttgggctgtttcttaaggatatgatattttatttattttaacatattcagaaacacctagtggtattaaaacctctgagattggcagcatttggccttttagagaatgttgactctactttctttctctagaatttattctatcattttttatgacagtcttaataaagatgattgaaagactctgggtattaattcatcaaccagtatttgttgcaggccaactaagagtttggcactgtgttccaaggggaagttaagtaagcacaaaaatcacaaactattaaagttgataaagctgctgatttaagccaaaatagtaattctcttgacaacataagagtgaatgtttacatagcattgaccttttgccaggcactgttcaagcactttctacgtcactacatatttcttttaatttttacaacaactcattaaacaggtactattactatccttattgtacaggcgaggaagcacgtgagaattggctaaagccatatagttagtaagccatagagttaggatttaaacttgggtccaaatcctgtatgcttaaccattactgcaccagagaggtcctccaggcttcccttgagtaatctgaggaatgaggtgtgtgttatcttttttttttttttcctcaatcaattgaggttttattgagctagagcttgagggtgtgcccaagataaacaagagtcacagaaatcctctgtggcttatgttctccctgaagaggttttcaggaggctcagttttatacatttccttgggggaaaaatgtgtgtaggaagagttggggggtaggcagaagaatgattgctctcatattgtctttgttccatacctgagaaaataaggattattagtgtgaagtataataggcatatccttgttttgtgggagaatatacaccttttttaaggtattaagattatttttttctgtaagttattgggggtacaggtggcattcggttacatgagtaagttctttagttgtggtttgtgagattttggtgcacccattccccaagcagtatacactgtaccatatttgtagtcttttatccctcaccctcctacgactcttcccccaaagtccccaaagcccactgtgtcactgtaatacctttgcgtcctcatagcttagttcccacatatcagtgagaacatacgatgtttggttttccaacctgagttacgtcatttagaataatagtctccaaactcatccaggtcacttcaaatgctgtgaattcattcctttttatggctgagtagtattccatcatatatatataccacagtttctttatccactcattgattaatgggcatttgggttggttccacaatttttgcaattgtgagttgtactgctataaacatgtgtgtgcaagaatctttttcatataatgacttcttttgctccgggtagatacccagtagtggcattgctgggtcaaaatgttgttctacttttaattctttaaggaatctccacactagtatacattccctccagcagtgtagaacttccccctgttcaccgcatccatgccaacatctactgttttttgattttttgattatggccattctggtgtccattatcttttaccagaaaactcctcctgttgaaatggaatctttcttcccatacctttcctttattggtctaatttcactgcctggaggaagatggagattattttctacagagcagactctggatctgaagacagccttcaaactcctccagaaattgtttcttcaggattaatattctctccttaaattgctacatatgacatttttcatttgtttagctttgcaaaacttgcctattcaaaaaaggatattagatagttcacagagatatacacaacagacaagcaagataatatatatacctccaggttttgtggcatcaatagatttgataaacatactttgtgtcttcattagagcagtagataaatgaattagggctgtacagagtataaatccctgcggcacacccctacatatgccccatctagaatttctcaaatatccaggccacatctttctgtcctagttacaatgttaattgccaattagcatgtttatgtcaagatttcctgtgatagcatttttctctgggatctaataacccagtaaccttggacaccagcattatatagtgatatggaggtggattttggattcaaaatgtgtgctaaagctttgcaataatagacaacttaatttctgagcttcagtctccttgtctagcagagataacaacaggtaccgtgcaccttcttaaggctagttgtatggattaaatactatatacatgtaaaattattagcagatagtaggtgcttaattataattgtagacatttgtcaagaatgactcatttggccaatggagtgttggcaaatgtttacttaataattaattggctttctgagagaaaaagctctggtttggagcatttgatgatttccctggtataaacactcccaccaaagcttttgagctaccatcatggcatcatgaaaggcagagttgggtagcgatatatgcagtcaaatggctcttgggagacagtgccagccagtgccaacatccccctgtgtgtggcccatgctacactcatactcccactcacaagtaagattgcagcattaatatgtgagtaaaaagatacaaagaaaaaagatttccattacaaagagctcccgtcaggtgctgatagtgcttgaaaaagagatggttattttagttacatttataattgtgaagcttcttctgcttgctctggtatatggaagtgccagttattctttccaaatgtgcttggttttgtctttctttacctctttctccctcaccctccctcttccaacaaatgcctcatatggtaacagttaccaagcaaagtaagggattttatgaaaaattccaaggtttgagtaaaaaaatgaacaccaaaatacccattttattagtataggtagcatccagttaagagttgggtataaaaagaaacatttgcctacccaaagaaagcagcatcagaatcttggcataagaaaaatagcattgtttagtatttgggtgtttacatattccttgtgagggtgaatgtctgaatatgctcattttcatattttaagtcatcatcaattaaacatttgtgggtgtatttcttgtgggctgactccagtggctgtcagtgaaaccaagcagctgttgggtagatatggaacaaaaacaccctgaatgttacactcctgattgcttcccctggcacaggtagaggtacttatgcacagggaaggaaatgaagggcatgcatccaggttcctttctagctgtctccttagaaatcactgctttttggacagtactgaaagtatgacacagctgagacttggtgtatgtacacacacagtatcatatttgattgtgttggttgcttccttctggcaatcctttggcaggtggtatcacattcttccctctaaagagcattaccaactgagatttccctttgtgcttagtaaatatttaggcattgtagattgtgtcagcaatgattccttttatgtttcaaaggctggaaaatttttcttccttgacacttcactgttgttgatttggggaagaggtatgagccaaatggacattggacaaggaattaaaatttataattgccgcgaatagtaacttttccttagctgctgcttcgtacttgaaaatggaatgccctgtagcttgggaaccgaattttatggtggctctgcttttgtgatatttcattcaatccatttaacagttagttgtatttttcaattctaattaacattggtgtttttaatatatatcttaaaactataatttttgagctaagaagccttacaacagatacaccagcaaagatgactagaggtctacaagagtgcatcataagtagagcaatttagatggacttccttctgaactgctgcctaaaaagtttgttactcaatcttatcaccatagttcagcacaaagttaatgaaaatagggctgtataattttgttgtaaaacatcaagtacctgataattatcatcaccatccatctttatccaccatcatcaatcaccattattgtatttttattgcttggattaattcagtcctaatagagcataatggtatggaaattatttaattacattataagtacacactctatcaagtcagaaatcatttagtcctatgacagaaatccagcaacaccacctcctggtaggattagctatatatgcctttaagatatataacttaagcatgcagagggatatatagattgactgacagctgacttttcttctatttctccatgttgctacacttaattttgcctctatttcaaggaacttcaaacacagtgtttaaaagaatcatttaggctctccctgaatatacaaattttggtacctcatcattgtagttctctgataaggctcttggaatccctatttttgacaagcatgccagatgcttctaataacttgtctggaagaacatgcatggaggaacacaccattctgccctcataaaagtcattcatttttctgtctgtttttgttatatcactgcccaaatggaatgtgactatcaatacataataatttcagttactaatatataaattattagcattaatttgcatcaagttatactcatcattggtaattaataatgatgatgaatgatagcagatgtatatatggtgcctactatgccagacattcttaaaggatttgcacgtattaatccttacaagggccttcggaggcaggtaatattatatccccattctctagaggagaaaactcagctgaaggaggctggtcactgaatcacagaaggaagagagcaggctgtagaatcagatggcatgggctctatgtctgcctgtgccacttactggctgtgtgtcagtgacaagggtccatcatctcttcttgactataaagaaaaactggggatacagctgctgttaactccagagacaggtggtgagaattccatgagctgaagtatacaagtatttaaaggctagcctgaagagtaggcatgctctagaaatgttaactgttatcaccttttcttgtgacaaccctgcctttccaataccttttctaatgagttattgtcaataacatcccagtgctgctttctgaactgtgactatctttagctagtaaggagtgtttggtgtctcttttttagaatttttcttttctttttgaacattgaagagcgttcaatttttaattaatcttaataggcacacataccaatattaggcataattaataaccttattatctcattagaaaggcagaacacaatgcacataaccaggaaactaacgtacaagtcttagtgttcattactgctatgatattcattcacatgtttagtagaaaagaaaaaaaacaaaaacattgagccccttttcctaccggatcaagttacagatgttagcctgttcacaaactttcccacatccaggggcgatgtcccccagcacaccatccctccccagctgcttcctggccctcttgcctctgaggcatgctcacaaaaacctgtgagttttgaaagtattttcacctgccagcatcaatgagaaatcttctgcaagtcccctccccatgttcatttctgtcagttccttgggttacggttctcagtacataagtgtcattagcttcacctgggattttttaataaacgcaaattcctgaatactaaattcggattcagtaggtctgcaatggatctcaggaatctgagaacccccaccccgccccaagcgaacatgacacttctcttcgaaaaacactagcttcaattgtagagaaaaccaaaagtgcacatgaatggaaatctgggacatagtaagacaaaagagactgaagtaggaatagcaagcatttcaaaggaaaatgaggctgtcccttctgaggatttcatattaacaactggtgcaaggaaagggaatttgcagcagagttcagaataggggcagtgaggaagtggagttgaatctgagaacatgaataaggaaaccactctgaagatgagcatgtggcataagggaaattgccaccggaatgtaccctctctacttccctaactcctctctttacttctttggcccgttctttctgccacaacctaccactaaagatcctgctttgaatgaaccaaggtcccaggggattgttgcataggcataagggttgttcttggaagcctctgggtttgttgatacagaggatccctatggctccttgatgataattcagttgtgaaggtatagtattgagaaactggtctaaagtttttatggtatatatattttaaattttatttaataaatatataaaaagcactgttctatgtgttttaaaaatactaacacattgaatcttcttaagtactttgtggagtaggtaacgttattattccaatattacagatgaggaaactaagaagttaagtaacttgcccagagggtataaagaggaagggacaaggtgattgttccatactttaaaggaaccagattatcatatttgtagaaagaaagactacattttgagtctatcccaaagagtgttatttgaagtaattagactgtgtagctctgaaagaattggaacccgcaattcaaaacaatttaaactgttctggagacaaagctaactctctggtggggtttctttcttctgatgataaatttgggggtcacttaatccaggacagttcctgcatttatggaaaatgagcatatcgaggtaggattaaagaagtgaattcattcattaggctctatgccatcatggttcatttttttctaaagctgagccaagaacatctgtaccccaattttttattttcttggccaaaaggggacaaataacatctcacactaagaacattaaaatatttaccaaaggtcttcttttagcaaagaatatttcttcattgcaatgcctctgaacatcttcctgaatcaattaatattcatctaaacttttattttctatgactaagtaacagtaatattcataatagcaactgacattcagtgagctcttattctgtggtcactgtttcaggtgttttacctatattctattgtatgaaatagcacaacttactctgattaactcaattttattggatataacagttatttttcaatttctattatgacaaaaaatgttttattaatcatatctatagctaaactatgtaaaaatgtttgtaattatatccttagaatcaattttcagaagcagaattgccagtgtaagagtatactttaagaaaaaaattcagcacattttaccagttttcctgccaagaatgttataccaatctatattcccaccaacaatgtagcaagacttttgtgaaaagtttttttgtttttttgttttgagatggagtcttgctctgtcacccaggctggagtgcagtggtgtgatcttgcctcactgcaacctccacctcttgggttcaaacgattctcctgcctcagcctcccgagtagctgggactataggcacgtgccaccacacctggctaattttttgtgtttttagtagagatggggtttcaccatgttagccaggatggtctggatctcctgacctcgtgatctacctgactctgcctcccaaagtgctgggattataggcgtgagccactgcgcccggtgtgaaaagtttttaaagtaatgaattgctagttagcaacctctgagttttttaaggtgttgtctagcagtctttattaaaaaaaaaaaacagaggtccaatcacctatttccttagaagagggaatcaagggtatatttcagtctgtctataatgcactgctatgtaattactagggaaacttctccaaaagtcacaatgggtaaagtgttataaattctgagtcataagtaaagtttctactatgtgagagactctcattccctgttgtcactgagatcattaaggtctcagttcacatgttacctttgagagaagtttttcctattatcttatctaaaatagtcttcccaaggtctattccattactctgtcttgttttcatagcacttactaattatctttgtttattactttattgcttgtctccccattataacgtatgcttctgggagtcaggagctctttcttataccagcgattttatcacaagacctaaaagagtgcttggcacatgaaagatgtctatatatgatgaatcagtgaatgagtgatgaatgaataaatattggtcctcttaaatcccaaagtcctctgtttactatttatgcacagctattagtctgtagtacaacactgttaagagacaaaatatgcatatggggcaaagcaatatttgtaactctaaggtactcaaccttgtagatgaagataagtgaggaagaaccagttattagagtatcaatggcattggtcatttggttataagcgtaagtgaatttccccttgaatttaccctgtgagttgctatttaatggtgttggacagttacagataagtttggtagaacttttctctttgtttccttaagggttttgcctttgggtaaccaccttaatttcttcagtccctgtcttccatggataaagtcttagcagagctattaaagatcctaatgtcaacttctcttaagattatattgtccattaatgggtgttctgagagatgttattttgagatcaagtgctaaagatttacaatacacactttaactgggagaatatgcttgtttcactaggacagatatgtttctctatggtatccccagcacttacagtaactggcacgtaggaagcattaagaaaatgttgaataaatgaacaagataatcaaattctgtcttgtgaagaaacccatttgggatctattatatgttctgggtaattcctctgagcatcagcgaggatctgtgcaactaacactctggtttatatctaatttgaactgctgattgtgggcagtagaaattatttcagtagaaacttagctggcttgaatttatgagatattattagtctcattaagaaaaatgtctaccgacttctttaggaagctcatgtcttcagaaagtttctttgagatttcatatagaattccttggttttaataaacgttcctgacttctgcatatttgctattgatgcaacaatgatgcttggatcaaagttactttgtcactttctaattcatttattttagattactcagctagtagaaaacaatagagtcactttgttgctgtaaagtctcttcgtagtatttggtgggattgtgctattcttcagtgggctggtaatccctataaagcttagagaaacacagggctctttaaacgatcctttttctcttttctgttttaaatttcatcacttggttatttttgccacctgcttggattgcctccttacccaaatctaaaattcctacagtaaaataaatagaaaatgtggtcgctactctccttcaaaataatattttcatttctttggacaagtatgttaatttcttcatatgcagttgtcaatggtccaggtttcggaaccaaatagcctaaatttgtgtctggaccccactacctgctattattgactttgggcaaactagttaacctttctgtgcctcagttttctcatctttaaaatggggctattaagagtacttctctgtattgtcattgtgaattatgaatcaatacataaaatgagtttagaagaatgactggcacttcacaagtgctcaatgttaaattgtttttattgggaagaaatgaaaatacttccttgcttaatgttggagaaaagaatcactaacccatcgcatctctaagatgatgatgataattgcagttgccatttattacatccctactgtgtactaggcactgaattcaatgctttgtccaccttatgtaagtgaaatctcacagcacagtgaagtattattattattccatgttaccaatgaggaaacaggagaccctaaaaactgagttctttctctaaggttaaacagctcataagggatggagttcagatgtgaatccagttctatctgattttaaatcctgttctcttaattgttatgtcatgtcatctctacagtcttcaataattgagacttaatgttctttgattactaacatccagtggctattccaagggaattcaaaacccttgtcttcatgactttcaaaagcaacccaagtcctgaaaacaacatttttgtgaagtatattagtgtaatccaaaacatgataaacactttttaaagatatttgcagataagactcccctaccctcactgttacagtaacagtgtaattttccctggtattgctctgaacattaaggaattaaaacacttgaggctggacttgtcaagagacctatttttgttttgttatgttgtaatagctgttgtttctgatatttttctttttccttcattctgctttttctttctccaatcttggcttaaagggcaacttcctgtgcatgttcaggaatctgtggcaaagggaacaagtatgataatttgtctgctaccatttggatgttactattgtctcagcagccaggaaaacagacagagcccctgtgagcatcattgtgtttgggctgcggctttagttgccaaagtgcagtttttactgttggcatttccaccacctgctatgggcaataaccatcgaaaggacaaatccccttgtctgtgatttttctttctaggcttctttggagaaagactgtgaaatgatttattcctctgtacatatgaagctatagtgtattctccactgcatagttttggcctctgatactctctgttcttaggttaatccattaacttgcctgggggaaaagggacaggaaagatggatgaaggtgttatgaaaacagagatgagaaggatcttaaaaaatcccaaccactgccttttcttccctgttcccatctgctcctgagaagtccttcagaggatgccaggcctgttaatacctatactttatacctgttgttttaaatgaggcagttcttcctcactatatggatataataaacagttaagctgtcttcctctatgcccctcaaaaggagacaaacacacaagccctacacaaatggtatcgtgcccaaatgagtgttggaaatgctggataaaacaaaggtaagtaggtcttttcattgcaggccttctcagagccttaaaaaaaaatcctcactcatattttgaatctctaggagagacatatagtatacaacattctccaaatttgtttgaccttggaatgcttttttttttttagaagcaacttgagggacaaaagttctgtagaacacgctttggagagtattgggatagattactttcattgcatttttgcaatttggtttataaacttaccttggagattgggcaaattggctggttagtttagatacaatatatttttttcgggttgcaattgtatttttacagtagctagcagaagctgtggttctgaaaagatactataagaacattatcttgtgttctagaaaatagaaaatactctattttcttccccacctccatttttcccctgtctttagaaaaattaaagtatacttaagaagaggaaacaaagtgagtggtaaaggtgtatgcctctatagatggacaggtgtgttagttacattatatccaagtaatgtgtaagtgggccttattaatgagatcctaagaaactataaaaaatgaacataccccagatttctctttgtgtacactttgaaagtgtttttccatttctattaaaaagtttaatttgtcatgctcatgaaatcaacataaatttatggaggcagaacataatacagtaaaaagacaatgtgatccttttcatgtggcatttttaatacattgtatcacaaattacttcaaagaaacaattaaaagaacaaggaagaacttaggaggttcttaaaatagtatgtagcacattttagaactcaagtgacagagctttcctgatgggcccaagtcctgtctcctctcaccctttttttttgggggggggtggcgggaacaaaacaataaacacctttattacatgggtgaagacaaaacgaggatttatttgcctttccgggccttgatcttcctaagatagaactccaactctttgccctctagcacatagccatctgctcggccacatccacacagttctctcactctttcaaaatgtcagcaccagttccagaaggagggactggcccttgtgatggccataatgtaaagtgttcacacgaccaggtagcatttccattcttagaaagctacgcttcttagaaagctacgctacttgattctaagagatcagtcatacagacgtgtttttattcctttcagaggcaattcatttcatgaaaaaatgctgaaatgaaaacactttatagttaagcttggtgtagtcataaccacacatagctgtgttctgtcataatttgtaaattgagctctgtcataatatctatttttcaggaggctctcagttaaattttcttaaaaagtctttctgattatgaaagtaatgcatgcattgccctgtggcatattacatattactctctcatagaatatatagagagaaggtggcagtgaggacaattctgtggtcacctggaaggttttcctctggcacaggaaagacagctgtcctatttctagttgataaagtgcctagactgtgcattagaggccaaacattgaaggaagtcaaattgcctttttgttgattctaaagtggtctttgtatcagaaagtagaatctgaagaaatatgctgcaagccaggatgattatagttaacagtaatgtattatgtagtttcaaatagctagaaggaggatgttgaatgttcccaacacaaagaaatgataaatatttgagatgatagataggccaattactctgatctggtcactctatattatatgtatcagaacatcactatgtgcctgatagattatgtataatcatttgtcaattaaaacaaattagaaaacaacttacttgtctttttgctaaatctggatgtggatccagctgaatataatttcttcctagttctatgaataggatataggtcttggtttccatggtgttgtgtgacttatacttttgcttatctttgtcagtacttttgtgggaagaagataggggctctatcagaggttgttagcttggtgatgttttcacccacaaattcttcatttgttcttagaagttttctcatttctttgaactttccattaacattcaatctttcacttatatgaaaaatattttccttcctcctctttttcctcttccgtactttctccaaattcaggaggcagataatggtaattgaaagttctagggacacactgtgagctcaaggtccagaaaggttagggaaagtctttattttgaactgtaggtatgttttaattccttctggagactagcactcctcagggatgctgagactggcactggtgctaccggatattaaacagaatggatttaaagtattctcctgtattaagaagattattttcaaaagaaagctctattttgtagttattgtcactttcctaaagatataactttcctggagctgtggatcgccacaatattgatggcccatcccagcactatttaaaggcagggctttgtcatattttttataatatttgcagcttggtcaaataatatttattaaatgattaaataaattcaacagcacttagaaacaatagaggcagaaaatgaagttgtggagttggggtgtgtgtgtgtatatatatatagaattagtacattttcacactgctgatacaactgagactgggcaatttgcaaaagaaagaagtttaatgtactcacaatttcatgtggctggggaagcctcacaatcatgatggagggtgaaaagcacgtctcacatggcagcagacaagagaatgagagccaagcaaaagtggtctcctcttataaaaccatcagatctcatgagacttattcactaccatgagaacagtatgggggaaactgcccccattattcagttatctcccactgagtccctcccgcaacatgagggaattatgggaactacaattcgagatgagatttgggtggggacatagacaaaccatatcatacatatacataggtcagattggtaaaagttatagaagcaaatgttagaaaactattttgtaaagttggaaagtagaaacaataaaaaaacacaattcaaagagataagcattttcactggtgtttttttctggtgtgattcttccagagattattctggttatccattgctgtgtcacagaccactccaaatttagtggattaaaaatgataaatattttatgatgtcatagattctgtgggccagaaatttggacagggcacagtgaagatggtgagaacagtttgtctctgttccctgatgtctttgatctcaactgggaagaactgaggagctagaagtgactggcatggctgagacctagaattacctggaggcttctttattcacgtgtctgtgtctgagcctggaatgggatgatttgaaggctgaagttagctgagatggtgtggcttttccatgtggctcaggcttttcatgcatggtggctgcgcttctgagagagaagtcctgagaggaagtatctggaaagggagccttccaagagaaccaggtggaagctgcattgccttttctgacctatcctctggaggcacacagttacatttccaccacatttcattggttacatgtgaatcagaccaaacagattcaaggggagaaagaatgagcctcacttctttgcgcaggagagtcaaggtcacattgcaaaagagcgtgttggatggaagatgttacatctgattttgaaaaatatacttctctacaatattgtttggtcatcttataaaagtaaaaaatagtgtacctttataatatttcattgagaagtgtattaggcactttatcttgctaatgtaagatggttcactttaaagtgctctgtgtttgaaacattgtctttcttcacctttctaaagaacgctctaagatgatatatggcaaccaatcaatattacttttttcatttgtgtagcttatttaactacaactatttaataaatattatagggacattgtgttattccattttgtgaccctataaaggaacacctgaggctcgataatttataaagaaaagaggtttaggccaggcacagtggctcacgcctgtaatcccagcactttgggaggctgaggtgggtggatcacaaggtcagcagatcaaggccagcctggctaacatggtgaaaccctgtctctactaaaagtacaaaaaaattagccaggcgtggtggcacatgcctgtagtcccagctacccgggaggctgaggctggaggatcgcttgaaaccaggaggcagaggttgcagtgagctgagatcacaccactgcattccagtctgggtgacagagcaagactctgtctcaaaaaaaagaaagaaagaaagaaagaaagaaaagaggtttaatagccaaagttctataggctgtataggaagcatagtgttagcatctgcttagcttctggtgaggtctcagggaggttttactcatggtggaaggcgaagcaggaacagcacatcacatgacgagagcaggagcaagaggagtagtggggtgccacactctcaaacaaccagatctcatgaatttgcagagagaactcactcattactaagagcagggcaccaagccattcatgagggatccatccccatgacccggacacctcccaccaggccccatctccaacataatggattacatttcaacatgagatttgaagggaacaaaacatccaaaccatatcaaatatcatagaagaaaaaataaacatatgggaacatataagtgagaaaataagtttgtgaattatcaaaaagtggaaatagtaatatctaggcaggttagcatacataagtgatgttctagtggttctcaatctttgtggcagaatataatcatctacagaattcaaatcaaaacaaaacaaaaaaaactctggtaccctgctccctcccccagaaacactgatttaactggtctaaggtatagaccaggcatcaatatttaaaagttccctaggtgattgtaatgtgcagccaatcttgagaaccattgctttaaacagtttgtaaaatgtacgaaacagggaaagatgtttaattacaatgtttagttacatgactgaaattttatcaataagatctaaattctaatctaaacagaaattcatttgcctcttcattcttcaacagattagttcccagaggacactgttggattcatatctgacacgtaaataaagcccacacaccaatatccaaagcagaaagctgaaagggacctgtttccttgataatatcattgaaccattgaaatattgaccccataattgttccaattttgacttctaagaatgtagaatatttgtattttgtttcaactagatgttggaaaattctatagtttgcacccgaaagcgtttgaaacattcctttgtataaacacattttcttgattgtgtggtcaatctgctggacagatccactatgaattcagacagatctgggtttgaatcctggctctgctaccgtttaatgactttaacaatcttatttcatcatgcctccaaaaactgggagaaaatagaatacctgtttcagaaaatgattataggaattaaaagcatccattcttttattcaggaaacctttgagcacatgagtattccaagattgtattctgtacttggagtatataggaatgaacaagacagccacacttagcagaatgggagagggaggcaataagaaagttaaagaagagatgacaatgtcggtttctgatagaagctgggataaaaaaaggaggtagcaaaaaagtgtgaataggacaagtctgagactcaaatgataaaaggtagctctgcaaggaccagacaagcacatctaagtcagagaattgttaatacaaaagagtcttatggcaaaaataagattggtttatttgagaacaacaacaaaaaaggtcagagagcctggatctaatcagtaatgcagtggagagtgagaaaagtaagattggacgggtaaacagacgactgattaggtaagccaggaagaggagttgggatttattataaatctcatgatcagcatttataaaactttaagcaaggtgctaaattatctaattttatatataaaggggtaagagtgaagggggaaacctggttagcaaggtcttgtaatagtcccagtgagatatgatggtgccttgttttagggtggtgctggtggaagtgaaaaaatatatgtttaattttgctgtgaacccaaaactgctctaaaaaataaggtctattttttaaaagtatataaatgttagtaaaacacatagatttacatggtgggcactcagtttattagagatagggtctcactctgtgccccacgctggaatgcagttggcatgatcatagctcactgtaatctcgaactcctgcactcaaacaatcctcctgcctcagcctcctgaggagctaagactataggcatcaaatgcccagctaattttatttattatttatttatttttttgtagagacagggtcttgctatgttgcccaggctggtctcaactcctggcctcaagcagcccttcttccttggcctcccaaagtgttgggattacaggtgtcaaccaccatgcctggccagtaaatgctattttattcataatgttatcattaccattagtacaatgtggaagcaagatctggctctgtcattagcattgctttggtggaaagatttactaaataaagcagagagacttttccaaattgtatttattatctttaaaggctttcccctgaaggtacactgggatactaagaagacctgaatagcttaagatctctacaaaaggattccacataccggtttgggacttctaagggaaaatgcaaagattcacaacttttaatagacagtgatttttgtttctatatctgacggtcatataattatattttagcatcccaacacagttttgccataatggtgtgactctatgattgtgttgtattatgtaccacttcaacccaaattagtttaatgatgctatagaggcagagttgttttcccatcaaaatgggaacaagtatgcaaaagcaagataaacactatctttcagagtgatacattcaagcagcattggttttaagattaagcaaattcccactgccttgctttattagtatacttatgagaagctactttataggtcatataactgaagtgagtttataattatggcaatgggtctacattggaatgtagtttatagttactagctcaaatatctctgcctttcacgttatgttggaaaactgcatgctatctttatttcttagtttcacatctgtaaactgagattaagatctgcttttctgtttaaagactattgcctacatcagagaaatcatccttcagcacttgaaagactttgaaaacagaggcttcctaggcagataatattttgtttactatggttggttttcttttttccttttgaatagactttattttgtagagaagttttaggttcatagtaaaattgagcagaaagtatagagttctcataaacctcttcctatgccatcacacatgatagcttcccccatcaggagcattccatgcctgagtggtacatttcttacaattgatgaaacagtattgacacgtcatcacccaaagtacatagtttacactaggattcactcttggtgttgtacattatcttcatgtgtcaccatcataatatcctacagaatagtttcattgccctaaaagttctctgtgctgtgcttcctcattccctcctaaccactgtcaagtaatctttttactgtccccatagttttgcattttctagaatgtcatatagttagaatcatatggtatgtagcttttcagattggcttcttttacttagtaacatgcatttaagtgtcttccatatctttttttaatatatacatatatattttttattatactttaagttctgggatacatgtgcagaacgtgcaggtttgttacataggtatacacgtgccatggtggtttgctgcacccatcaacccgtcacctacattaggtatttctcctaatgctatccctcccctagcccccattccccaacaggccccggtgtgtgatgttcccctccctgtgtccatgtgttttcattgttcacctcccacttacaagtgagaacatgcagtgtttggttttctgttcctgtattagtttgctgagaatgatggtttccagcttcatccatgtccctgcaaaggacatgaactcatccttttttatggctgcattgtattccatggtgtatatgtgccacattttctttatctagtctatcattgatgggcatttaggttggctccaagtctttgctattgtgaacagtgctgcaataaacatacatgtgcatgtatctttatagtagaatcatttattatcctttgtgtatatatccagtaatgggattgctgggtcaaatggtatttctggttctagatccttgagtaattgctacactgttttcaacaatggttgaacaaatttacactccccccaacagtgtaaaagcgttcctatttcttcacatcctccccagcatctgttgtttcctgactttttaattatcgctattctaactggcgtgagatggtatctcgttgtggttttgatttgcatttctctaatgaccagtgatgatgagcattttttcatgtttgttggccacataaatgtcttcttttgagaagtgtctgctcatatccttcacctactttgtgatggggttgtttgtttttttcttgtaaaatttttaatgttctttgtagattccggatattagccctttatcagatggatagattgcaaaaattttctcccattctgtagattgcctgttcactctcatgatagtttcttttcctgtgcagaagctctttagtttaattagatcccatttgtcaattttggcttttgttgccattgcttttgatgttttagtcatgaagtctttgcccatgcctatgtcctgaatggtattgcctaagttttcttctagagtttttatggttttaggtcttacgtttaagtctttaatctatcttgagttaatttttgtataaggtgtaaggaaggggtccagtttcagttttctgcgtatggctagccagttttcccaacaccatttgttaaatagggaaatcctttccccattgcttgtttttgtcaggtttgtcaaagatcagatggttttagatgtgtagtgttatttctgaggcctgtgttctgttccattggtctatatatctgttttggtaccagtaccatgctgttttggttactgtagccttgtagtatagtttgaagtcaggtagtgtgatgcccccagctttgttctttttgcttgggattgtcttggctatacgggctcttttttggttccatatgaaatatgaagtagttttttctaattctgtgaagaaattcaatggtagcttgatggggatagcattgaatctataaattactttttatggttcaatagctcatttctcctgactgctgaataatgttcccttgtctggatgtaccacagtttatttattcattcacctgctgaaggacaccttagttggttttaagtttgggcaattatgaataaagctgctatgaacactcatgtgtagatttttgtgtgaatataagtttttagctcctttgggtatataccaaggagcacaactgctggattgtatggtaagtgtatgtttagttttgtaagaaggtgccaaactgtctttcagtgtggctgtaccattttgcattcccacaatctatagatgagactttctgttactcgacatctttaccagcatttaatattgtcagtgttttaaatatggaccatactaattgatgtataatggcatctcattgttgttttaatttgcatttccccagtgacaaatgatacagagaatcttcatatataattattgccatctgtattactttttgggtgaggtgtgtgttcagatctttggccatttttcatctgctgttttcttattgttgaatttcaagagtttttaacatattttggataacagtcctttatcattatgtctttttcaaatatttttcccattatggcttatcttttcattctcttgacagttacatcatgcttttaattgtagaattagacaacaatgaaataaccaaagccttagtaatcttaattagagattatcttctattattttctatttttcttgtttcacctgagttagaaaactgacctgcactgacttcctctttcacaataattccagtgaaatgaaagtgattagaaagtcttagcaaattcaccaaaagttagagccagaagactcacatttcaattctctacctaaagagaaggacaggcagaagccaaatatgtaaagagtttgtcagaagtatgccttggagccatgggcattgttcattactctgctgaatttatcttatggattttcccctccacattaatgtttcaatgatcttggttagattgttgaagtacaggttcctgctaggcatttctaactttttgttttaatattctcttatcctgttcatttactctcatttttccttttagaaatttactgccatcttctcttttagaaattcttttgacaatctgaaggaatgcagttatttatccctatgagcaattaaatacttttaatgggaatgtcatgtttttaaatcacatttcttataagaaaaaaatggtgtttactcaaatgaatgtggtctgatggtgatcctgatctatgagcagtaattgagatcatggaaataaatacaggaaagctggctccctgctcccttcaataaccaaatctatggtttagacattttttagcactttgctccaacctgttacagattatcaacattatatatgatgataataaatcagagcaccactttaaaacacaaaagtggttgcctctcagtgctatggcaaacatagaattttgaactttttgtatgactggtatttttttaagcgactatattttaataacgagctattgcatgtgactttactatgatgctcaaatatgttctatgtatgacggggaggaggaatgatgttaccatatgttggttctgaattcctattttattttattctcaggtggaaaaaagaaagaaaaaaggattcatcagcaatagggcaacttagagcggacacataggtactatggcagtgataagagatgagatagatcatcactatgcccttttcaattcttgggaactgtcttcgttaaacagttttagatgcaagggtaatttttttcctatggtgattgtagaaagaacacccagagattgggactagaagtcaggatgtctttagccttacttggttgtcagctaactgtgctgttttggacaatgcattcttttttggtattctgtttatcccactacaaaatagagatagtgagaattggattaccattgtcaatatgaagcacagatgaggtaagtgtgaatcacttgaggatatataaagtcatttaaaactttaataattataatacgataatatagttgttgatttagtttagtttcttacatatgatattctacatattcttatcacttcacagggaagcattgactggccaaagtaatggtgggtagagggaatcacttaccttagcttaaagagatgccaaaatctaggacctattcagagttatgaattatattttgttgagcagtgttcctccaaaattcatgtccttcctggaacctcagaatgtgaccttatttggaggtcacactggagatgagtgggctcttactccaatctgacttgtatccttataataaaaagggaagagacacagagacagatgcacacacagaggagaacattgtgtgcagacacagacacatgaggaagatggccagtaatgatgaaggcagaaattggaattactccgtaggaaggcaaggatcaccaaggattgctgccaactaccaacagctagaagactatggccatgctcacatcttgatttcagactgtgacccccaaaacagaaatggtgagaaaattaatctattaagtcacccagtttgtggttctttgttacagccgccctaggaaactaatacaggagtcaaggaggctgctgaacccagctggacactgaggggcatccacagaggtcaccaaagtggagtggccagaactagattttggaagccagatatggaggcaggaatccaagaagcagggagcctaatgaggaatagtcataaaaagagctcttggcagccgcctgttccagatgttggtgttgctgccagtttctatctgctcagtacccaaggcactttaatggactgagataggttggacaggttctgtttgaaaaaatcccttacatgcaaagtaagataaaaccaaaagccaaagtatcttgctttaccttgaagaaggaagcaactctccctgatcacagagcttccctacttggccataggatagcctcatgtgcacttagctcaatgttactctgagtttctttctactccgtctttctcgatataatcctaaaagttagggattcccaggaattatcatggaacaactggcttatgtcttagtttcctatcactgctgtaataaatcacggcaacctttgcaatttaaaacaacgtaaaacctattatcttagacttttgcaggtgagaagtccattatgggttgcactagtctaaaactagtgcaacactttttaccccctgaaagacatcaacactttttaccccctgaatctaaaataaaagttgaaattatttttagaaataaaaataaattaaaatgtttcgtaaaccactttggtttcctttctggtgtctctgaggcaaatgttttctgctcatttgagttgttggcagaatttaatttcttgtggttgaaggatggagatctggggtttttttgctggctgaaaactgagggccattggcagcttctagaggctactgtattcctagcccatggtgcctttcttccgtcttcaaagcctgcattcttctgcttctttgtccttttttaaagactcatgtgattagatcaggcccacccagataatccaggattatctccctttcttcaggttggctgctgaacaacctcaattccacctgcaacctaattcccttttaccatgtagcctaacatattcacagctctggggattaggatgtggacgtctttcaggagccatgatccttccttccacacattaactgcagctaagcaacatgactccccatcacgacagagtagaaggagaaactgaactgtgagaggggaaacagctttatcaaaacatagcaaatgtcaattataagcaaaaagagaaagtcaagctgcctataatatgtgcaatatatttattcttttataaacttgctgatatggaaattaaaaattaaatctacttaatggaaaatatttgatataagaacatcagacatatctttgataggcaataaattactttatagaatcgtttagcatcttatcttcagggctattttttggccctaactttgagcacattaattttgagttcctcttgtttctcttctatttgttccctcaaacccaatgtatcagaagttattttaacttaagttttccttgcctaattccatccacttatccccagaattgtttcatctcatgtatttattacactgttcacatatcaccttctattttcatgccccttgtaaacagcctaagaggcacattactggtaaagcctcagggtaaacaggcattgcctcccattttgatttcagctccatttaatgactttttatacccaatgtggacacatactcatttttagttttccaatgcagatttcagctatattttggctttattcctcttttttcatcctttttttctttttttttttttttttttgagacagagtcttgctcttttgctcagtctggagtgcagtgacatgatctcggctcactgcaacctccaactcccaggttcaagcaattctcctttctcaagtaatcctcctgaatagctaggattacaggcatgcaccaccacacccagctaatttttgtatttttagtagaaacgggtttcaccatattggtcaggctgctcttgaactcctgacctcgtgatccgccagcctaggcctcccaaagtcctggaattacaggcgtgagccaccgcgcctggcctacatccattttaaaatgaaaaaatatatatatatgtaatttatttgaagaaagtctattcatttacgtaacacttatcattgagcacttcgtaggtacctggcgttgttctagacactggaaacagaccactgattctgatgctcaagggccctgttggtggcattgcctttggtgcatccttttctttcacctcttatactttcgtgttaatacttccctacatggattgttttcttactttgtcatgtgtacactttccctacatggtgttttcttaccttgtcatgtgtacactttttttaccctttgcattatgaaatttttgtatcctgaatctcgtttggctatgactcaactttttaagctaactctatttggaaagagtctgattaaagaaaatgtcaccaaacggttaaatatgttatttctgtgcatgtttgttatttgtcaaggggtttcattttaacccaaatgaataactttttattggtggattgtacccatcctcgttagatcaccaaaggcagtatgtattctgatagggccactttgttgtgcctctctgctttcttttctctctctttttcttttctttctttttctctctctctcctttctctccttccttccttccttccttccttccttccttccttccttccttccctcctcccttcctcccttcctccctcccttcctcccttcctcccttcctccctcccttcctccctcccttcctctctttcttctcttgcctctttacctaatgtctcaaatggtaagtcaggccctgacctcacatgtgacagttaaaaagatgccagtgacatctttccccaaagcaatagaaaggatatttttcaactaacgatttaaataggtcaaagcaaacaggatactcacattaaaggaagaagaaactgcatgttatagaaagacctatgcattcagatacctttgcctgccctgaaattccatttttcaaattcatttgcctgttagctgaggacctttttaatggaactgatgttagtgatctcctagacctctgacagttcttgagagatagcaaaagctttccctgaagtgctagccatgtagcttatccctttaggcactctattgtagaagtctccctgataaagcttcctgtactcaaattcttaggggcagggaggagggataaacaattggaatacttttttgggatattaataattggttatttcaaaatctaaaaaaaaattaaaaataatcatttgaggaactctgttaaattttttaaaaagtgcattaggtttagatgtgatgaagcaacaaatgcaacagatgttgcaatgccaatcagatacttgactaagacaaaagtttaatgccaaactgcttcaccagaaatagcttcctacctgacagaggacactgaattgtgtcaaagtattagaggaggcaattggtaggtaaagataattaaagggacatccaacatgttttgagttctttctccgtatatatggagagagagaaaagggtatatttgtgccttggattcattagtaaaatgcattagctatagctgactgatttgcaactggtgcctgcctgaggtctccaaagagaggagatttacatttaggttttaagcttgggaaactttgaaagttcttataaaaaattagacagtcatttagaaatgtaaatatactgtatttctttctggattacacatttgctgaaattcaccttttagtttttttagaagggagcggtattggcatacgtgttacacttttttgcacatcacttttgaaatgaggttccagatggagtctcagccccagagtgtaacaaagagatcattggttacaacctccttcttacagactaacacactaaaacccagagaggttaaggaagagatttaaaatcacacaaatatttagcagcctggccatccatgactaggacccaagttaatcaaatttccatcatagtctttttttccttcccttcatcagcattatacttgcttgagtaaacatcttaaatatagaatgtttctccttttcattaagaggtcatctaaaatagtatgttctctattctccattaaacatagtttataagatttctttgcctttaaaatcagtttaattagggtaaaatttaatacataattgatcatacatctccaagttgaaacatctattctgtttttaggcttagtttagtcatttcccatttgtttgatttaaagtagggttgaaggggcacacagccccgggaaacttcagtgtaaagtgccatccaactctagccagattcttttatctaatcaccacactccctgaagtctctgataattatcaataaattgggtggtagataaatagcagtgtcatgagagaaggaaaaagctgaaggcacactagcagtgactctttctacctgtcagcaggatggaggagtaaagacagatctgtcctgtttgtcaggagcagaaagtatgctggcgaaaacgaactcctgggaagggaaggtgtcaggaagatgaattaccccaggaagccaggactgctctcccagtggagagcagctcacttggatataatttgccagctgtccgtcttgtcctcgtgcgtctctgtctttttcctcctttgcgctgccagcaacaagcctgtgctgtgtagatctagtgcagccacagaaccttgggactagctgaagggccgctagacctaatggcaggggtaactatttttgcaattgtgaatattcagcatgcacaggcttcctatcagctctcccaggagctctctgagagatggaccctgtgaggaaacatctttaaatgaacaccttagtagagaatgatcctgttaggtgaataaaaggctgattacatacccagaggtgagccataatgaggctcagagtaactaaatgcagcaatctgctgcactttgtatctggacttgagcctgagcatttcaaagtagcatctggaaaagaaaaaggctctggggaaaatcacacagtagacttgaaatatttcatttttttttctccaaagggaacttagggtagatttcttgggtaacggttttgaagaaagaaggcctggtgtgagaggaacatgttgtgttggcatcaccacctcacataaccaaactaacactctcctatcattgttgggtgctgagagagctggtggtccctgcctgtgtctttaaagtgacaagggttgcctagcctgaagattctagcacaacatcagcatcttacctacataaactgaagattcctcaagaatgttgaagcaatagtcattatgtttactacaggagtaagtgaggcatcaatctaccttctaccttgtgagttagccacataaagcagtgccacaggttgaaacaaaccttcttggtctggtttataatttaaattctccatggaagtagctgcagcttggaagctcattccattgaaaagttcactggctttggtgattcacaaaggagcatttcttatttggtgaattagtatcctaattaattcatttcatggagcaagcatctttgtgattctctcttctgctgcctactttctccctggcaggtacaggtaggattctaaagtataaagaggactttcacctggaaaccagaaggttgagttcttaaaggggtcatgatgcttgctagtaatgtgacctcctgctattcaatacttctgagtctccttttactcatctgtaaaatggggagaaaaaaaaactgtcctgccttttacccttttcttagcatacaagagttactgagaatgcttcagaagctattatgaaccactgtagcatcagctatatttatttaaggcacctattttgtatgttaaaatattctagagtatcttataactcttggttaatgaaactaaggactttctcactccttaggtaaaaaagtagtgtttatttcagagcaagatgttcaaaagcaagactaaacaatttgattcctgggatcatgccatcgggctgtcttgactctctctgattgctttcagtatttttattttattgggtagaagaacttggtaaaatgttaccctgaggctaaagagagctctttaaaatgactttagggatctgaatagaccagttgccatttattcccttaatatgattagtttcctaatagtcaaaggctgagatagcatttatttctcctaagtttcagtctaagccaatgtgggtgcctattagtgtcatagtgatgagtggcacagatgagcaaacagataattaaggaaaaccaaatatccttcccatcccccacctcacacccatttagtagttgactttggtgtaaaagtgtcttcctgtttcagtaggataatttggtgctcatctgtcagatagatggaggatggcaatgctaatttgtttctccaggcatacttgcctcagacttaaggactaaggttaccatgtagctcagagctgaaaggtaagagtcagaggcattcaatgattaaatagtcaatatgttctgacttctctgctaatttagcaaaaggaagaacatctcaattttgtcacttattaccagttgtttagcttgtcttagaaacatgccttgatttgaatagataaactacttttaaagcataagtcagcagccttttgttttatgaaatagtagtcctccatttggggcaattaaaatgaccatttctttggaaataaaatgttaaactggtgatggtagggtgaggtctagggggtgataggagagggaagttgagatttcaacagctaagtgcaaaagaaaattttaaaatacttagtattaaaatttttaacttgctactactttattggtctcatataaggacatgaacacctggggaagtaattggaaagggaaggaacataaaaaatattttatattctgtgaggtaaaaactgaggctaaaacataaataatttggcccaggtcatatggcaggagaatattagaatctggatttgatcctgcttttgtctggctgtggctgtgaaaattgagtccatcagttttcatcccatggcatctggaatcattgccccttgccacgtctttgtgtgtgtgcgcgcgcacgtgtgtgtgtgtgtatgtgtgtgtgcgtgctccaagttcatcccgatttctttaatctagccttgttaaaacacattttaaggtcagtttttaaggcacaaaatgtaggatgagtgagttgataggtagatatctattagcttgaaattgtattcaaaacagaacctcattcttaaaagtttaaaaatctatatcaattacccagcctcaaatatagttttcttctctttcaaatgttgtagaaaaatgcttcatattttctggctactgagcttcttaatattagagtaccatctcttcctacaattcggttacaggttgctcacttttagcgacattggctttctagttggagaaattccttagatttcaggtaccacatcagaatttctttcagttagggtgacagatccaatatactacatgtgtgtgaagtatagatgaaggtaatcagatctcatgcttcagggaataaactgattacccgcgatggtcaggaaggaattttcaccattagcatcctgcaaatacacaaacccaagtgcaagaatccaactttcttctatgtaaagttttcttgtagcacctcatcaagtgcagggcataaaatctaaacctatgacataatgtgctatgtataattgttgtcatacatgcatgactgtttattatgcaccaaaataaatactgtagcagttgagacagagtctagttagataactgagatagtgattcattaaatataaactacttaaaatcttttcatgtttcctccaggaatctcaaagtaccttcccaaaatgagctcattaatcctcatgaatattctgtcacataaattctgttacatttctctgaaaacataggttagtcaatcttactaactagtaagttctagcagcaagtcttcacagcactccaacacctttattgccttgaaatctcattagagatttagtttctaacactgttaatctagatggaattctttcatccctagctcattactacatttacccttcaacaaacatgtggtgggagtcaactgtgcgcaacgtgctgaatatgaaaagttaaatggggctcagggttcactgggaaagtgctggtaagttcattcacatgcactccagtacaacttggtatgcccagtgctgcctagcctagcaagaccctctttaatctactgttgccttcttgtacaggtctttatatcatgcgggctttgacacagataaacctactgtaatccgtgatttggttctaagagcctataatgaactccagttaattcagatgccatttagagaaacttggtcatattctaccttagaaaactcttggaataactttagttcttttgaaaattgcagtggtccagacatttttactctagtataactgctgtgtgtgtgtgtgtgtgtgtgtgtgtgtgtctgttgatcagaaactttataacgaggattagacttaaatttggcaagcttttctagataaattctagagaaaggtcccatgatgatcctagaaaatttaattaagagtaacaattaagagatccttttgaagtgcccatgtttaagttttatttgtttggttttgtatttttttctaaatattctttcagatcaaaccaagtctaaactggttactatttgacttaatgaaaggcctgacatgaaggaaggatgtaaataattttgagagaaaatacttttgaaatgttaaaacatttcttttgagcaatgttatttttattataaaggaaatagcactttcacctctgggagtgaataggggcttctcaatttgatacctaaaggatatttcctctcaagacaaacaaacaaaaatgtgcttactggggctgcaccttcagcccagcattggatatgttaattgctgacatacttgaggtctcactaagagaaaaatatcattagactgctggttcccaaaatacattcccttaaatatcagtcctatggagtggtccttgggaataaaaatcagggaacatattcaatggtaaatatatatatatatatatatatatatatatatatatatatatatataatatttatatatatattatatatgtattatgtagctctttattattattattattatttttgagacagagtctggctctgttgcctaggctggagtgtagtggcatgatctcagcttactgcaacctccacctcctgaggttcaagccattctcccgcctcagcctcccgagtatctgggattacaagcacctgccatcacgcctggctaagttttgtatttttagtagaaacagggtttcaccatgttggccaggatggtctcaaattcctgccctcgagtgatctgccttcgacctcccaacatgctgggattataggtgtaagccagggtagctttttaatactgctccctctctcttaggtattcacagtgcatattagcaaattaaatgttctgtgaagtcttgtattaagtacatcttttaatattttatttaagacttcccaaattcacttgaccattcactttgtaatattccttgacagaatacttgttaatatccagctcctgggaacacaatttgggaaatactacactaggaaaaaaaatctaggttggggaaatctaactaaacaagagtgtttatttacattagtaagttactttgtactttatgtgagtctccttttcaagtgagtttctcaagtgtcttaaaatactattttaaataatttttaaaacattgatatttttttgaaaatacattaagtatgtttttagaacttgaaattgaatgaattcccccttatcccttgtctgccagttctgttagtcttctcttcagtatttgatttatgagagatcaattcatatccaacttttcagagcatgtctcatgtcatgtgaaagacagcatacctatatttgtgtaagaaaggggagaaaacctacttctgagtgtaacataaaaactatgtgacagtcaagtatgataaaaggaaaatactggttatagggtcaagcaacctttatctctttttggcttactgtgagatttgggccaacaagtaacctctctgatcctgcctggataattgaaatgactattacttccctccaccagagagtgaatgatgtgtggattaaagtctgacctttgggcaaatgcctcctagtgacttgaaagaaggtgccctcatttctaacccacaccttacatctgtgtctatgatcccattcacagactggttctgaattaattctgtcagtcttgcattcttgcacttgccttcctgtcacctattcacttgcattctctctctacagttaggacattgtcaacacagattgtgtttgagtaaaaaagttcactcagagaaaaataattatagaaaggaaaagcatagatcaggagacaagtaaagacatacagtgaatctttaatccagagttgatttactcaagccttattgaaagataatcatgaagcaaaatgattaggtatggatgtgtaaatctgtaatgaatgactctgagtaaagattgtactcatcatcactagatttctctcataagtgcattgggttaaaaaaaagaattacctaagatcatttgaaattcagtaataagattctcttcagaagatcttttgattctgtagagaattaacatatctaattattatctgaagaccccaaacaccagatcctccaaaataatgttccttctgacattttcaacttgtataaaatttggttatctggaaatttactgcacataaggtccagcaagagaataattacactttattgatattttctcacaatgccatgagaaaatctggctgaagctgtgaaaaatgagttatatttataaaccagagatgttagctttccaaagtagtttcaaatccagacacccaatacacacacttccactcaccttcacgttctcacaaacttatacaagaaagtactcaatgatgtatttctaggcattaaatatttatatggtgtatataggtaggtatatatatatatgtatgtgtatttatgtgtgtgtatatgtacatatgttcacatacatttatgtatatgtatgtatatatgaatcataatttgctgataagcgttagacactattattataaatttcccttaatacacaaatttctcaatatcttagaagaaaattttcaagtatatgagagctcttctttctatcagcataggtgatagcattaaactgaatattaaccattccccagggtagagaaattatatctcagggtagaaaaatatatattttttgtatggaggttacttcttattgaagtgtgttagatctggccaggcatgctggctcacacctataatgtcagcactttgggaggccgaggtgggaggatcacttgaactcaagagttggagaccagcctgggcaacatagtgagatgctgtctctaaaacaaaaatttttataattagccaggcatggtggcacacgcatgtagttccagcagctagggaggctgaggtgggaggatcactttaacctggggatcaaggctgcagtgaaccagattgtgccagtgcactttagcctgggtgatagagtaagaccctctctaaaaatatatatatttttaaaagtgtgttagatctgcatattataaaatgacatgaattaagattcttcctccgtcatttatttctgttaaaaaaattcactgcttgcaaacatgtacatatatataaaccactgcacactaattatactgtatggtgtcacaagggtgttttttttttttacttgtaatgttttgcctaactttagagaaagcttgaaaagttaattaaaatcaacttatgtctcaacattttgttgcagtagaggaatttggaagaagggaaaagagaatagcaatgaattgattggataagaggcagacacatgtttttaaaaaaggatcagagcttgcccagtttctatttaaagtattgtaaggacctaatagctagctatagtgatacatttaagattaaaatgagcagatttggcggtacaggggagatgatggctagctggggatattagaaacagagctataaaaattcaacacaacctggaaaaatgcaaatgaatacaaccaacagtggggtgcagggttggttgcgggggacaggtggattatcttaggtgatatgctgtggaaggcatggagtttggctgcagggctgggtggtcacctagtaagaggaatgctttggctccttcccttgtctcttggaaatcagaagagacactgggccttttctcctttactccaagaagaaatgctcttttttcatatatctttattgaatacctattatggtccatgtgttaagagatggggaagcaaagagatacaactcatccaccctaccctggagaagcttattgcaaataccgtcaaatgcagtttgaaggaaatagtatgagatttgaattaaggacactaagattttattcatggattaaaatccgtattctgtttcttaatgattttgtgatcttgcacaggtccattaacctctgagcattagttatctgtgaaatgggagtaataattgagtctgcctcatgggaacactgtgatgactaaatgtgaaggtttatgataatgctctgaaaataatcaaaagtgctaaaatgatatggtttttaattatgaggtatttttaaatccaagcttgatagtagagtcagattatatacaaagggatcagagaaatagataagtatgggaggaatgataaatataggaagaacattatatacatcacagatgagttcaggtgcatgggggtcctggacttacaagcgggtgtgcttagtttaatgctctcctatcaccaccttgaaagttttaatattttttaaacaaaaggactcacttttttaatactaggcctcacaaattatgtagttagttctggttgtagacatattgcgtgtataaatacttagattagttacatgcccacaatattaatcattaagttatttgtgtatacatttaacagttacccatctatttatctatccctatagagacatattctcccatgtaggatgtgaggcacttgaggagtgaaacttgcttgaatggatctagggcccaggagagaaggcgaacctgaaaaacagttgttcggtctaatagttatcactagttggaagtcttgtacgttccaaggtcaagcgctgtgatgtgatacattacacacacacacatataatatttatttatatcatggaataaatgtgtaaatattactatattactaatgtatcttaattttcttttttacaaagatcctataatatcagtaggtctagaattaggtcaagaatctgcatttttaaaaaggcattccagcggcttctaaggcaggtggtttctagacaaactttccaaatactgagtgaaaagtttattcatgttgtgtttccattatttatgtgtaatttggagaactgggtgatcttttctccaggagcccctagcaacagatccagagaaagaatgtcatagctagcatttctttgtgttatttgggaccaatttcaaagttactgcaagatgtttgctttgccaagagatatcccatatccagtccaggccctattggatgccaaataactattagtgtacagaagcccccacttttccatgggggaaatgatctaagacccccagtagttgcctttaactgtggatagcaccaaaccctatatatactatgttttttccatacatacatgcgtatatacatagttatgataaggtttaatttgtaaattagtcacagtaagagattaatgacaataactaataataaaatggaaaattatgacagcatgctgtaatacaaacaatgtgaatgtattatagtctccctctcaaaatattttgttgtactgtactcacttatttttggaccatggttgaacaagggtaactgaaactgcagaaagcaaagtcgtggagaagggggaactactgtacataaagaaatagtggataataacaatgagaagatagattggggcctttaattctggataaaggatctgagactcttctcagaaggcaatagggaaccactggtcatacagaattaaataaaggagaaggaaacaaaaggtaaggagatcacttagaggctattacaaaaaaagtagagaagaggtaacaaaggccaaaagtgggcactaagagtaaagattaagaaaaaatatctttaattatggaaaatgtatggagattcctcataaaactaaaaatagaactcccatatgattcagcaatcccactactgggtatatatccccagagcttgaaatcagcgtgtctaaatgatatctgcactctcatgttcattgcagcagtattcacaatagccaagataaagagtcaacctaagtgttcatcagaggataaatggatgaagagaatgtagtaatgtggtatatacacaatcgaatattattcagccttaaacaagaaagaatttctgccatttgcagcagcatggataaacatggaggacattgtgctaagttcagaaataagccagacacagaaagactaaaacagcatagtttcacttatgtggaatccaaaacaatcaaatttatagaggcagagaatagaatagtggttaccagaagtagtgggtagggggaatggagagatgttggtcaaatggtaaaaaattttagttagaaggaattgatgataagtatttaagaaaatggatatattaattagtttgagttaatcattctatactgtacagatataacatcactgtgtaccatacaaatatatatatatgcaattatagtatgcccaaaaataatctctaagtcttctttttaaattttactttcataagaatggtatccatctgattgaagaccatcttctttcttctccatatgcaaatgtattccttatagaaaaatgcactcctgcccccaccccagcaaccatgcttcaggccccaaagaagttttcctccctgttaccttgcaaaggtagcctctcttgggaatcgctcactaattcaccctggaatactcttatgttagtttcccttatggtccctaacagcctttatctgttattcatctcccaggtactcacagcttgctgaaaggctttttctaatcagcattgttttgtcttctttaaaatccttgatcatggccactagcatccttgacagtctctggacacttggtgagaaaagaataaactcaatgcacaccagtgagagatcatgcccttttcttctgacaactttgtggcatctttggctgccctttttatgtgcttgtctttgtgctcccctacatcaatctcataaaacatcctttttttcatgcttgacatattgatatcatcccaccgcagataaaacacagagcagtgtaatatggacaggtgttggaattatttgcaatgcacagaaatctctgctgatgtttaagactaggacaatattaaacacattactttccctgacaggcattttcattacacccatgccatgcaggtgcagaatctagaagtgatatcttgttttccccaatagggtctatgcaatacaatttaaaagtgtgtttgggtgtgtatgtgtgtgtgcatgtatgtgtccttccccctttatatctttatctttgcaacatccacagcctcttgtttaaatcacatctgaattcacttggaggaatgacacaaattccaaagaacctgtagttaaaatagttgctatttaccagatcagtattcttatggttggtagtgtcacatggtcaggtttagagggcaactctgagataggacaagatgaaaaatagcctaggaaagatcaagaaagaccaacatcagaaagccacatagtcctccagagtgagttactatgtagcttagtttcatcaaaaagagaatcatggccaaggtggctgtattagtctgttctcatgctgctaaaaaagacatatccaagactgggtaacttataaaggaaagaggtccagtggactcacagttccacatggctagggaggcctcacaatcatggcggaaagcaaaagagaagcaaaggcacatcttacatggcggcaggcaagagaacttgtgcaggggaactcccatttatataaccatcagatctcatgagatttattcactaccacgagaacagtatgagggaaactgcccccatgattcagttatctccacctggccccacccttcacatgtgggtattattacaattcaaggtgagatttcgatggggaaacagccaaaccatatcagtggcaaattcaaatggctacagtaatgaaaacaacaataacagcaacaaaaggtaatattacttgaggatttatcttgtaccagaaacttttacatgctttacattcatgttgaaaattaaatgctggccaggtatggtggctcacgcctgtaatcccaacactttgggaggctgaggcagacagatcacttgaggtcaggagttcaagaccagcctgggcaacatggtgaaacctcatctctactaaaaatacaaaaattatccaggcgtggtggcaggtgactataatcccagctattcgggaggctgaggcaggagaatcacttgaacccaggaggcagaggttgcagtgagcagagatcacgccactgcactccagcctgggtgacagagccagactccatctcagaaaaaaaaaaattaaatgctcaaaacaaccctatcaggtaaatcactgtaattagcacctatttatcagatgagaaaaacaagactcataaaagtcatgtaacgtgtataaggtaacacagccagtgattcaagcccaggtctatctgactacaaaacttgggctcttagctttttgggattctatactcatggagaggtaaagctcagatcctagaagatcagctggagaagttagtgtatgaagtaggcaagccagatctgaggccaagctaagggcagaaaacaggagtcctgggccactcagcatgcatgctggctcaaaggagtgtgtttctgagcctagaatcttcactgtctcctgctcctgctaaatgttagagacctctaaaataaataattgcagtagctttgtggcgtgttttaattggctaccctctgggttccattagtaggtttacttactctaccctggacctaaagctgcagtgagggttgttacctccagcgaggagagtatttatcatgccctctccagaggtaactgcaattttgcttaagtgtactaatggcatctgctctcagctctgtgtttttcctctctgggtcttctgataaggtcattaggaagtgtgaggcagacaacctgagggctaaagtctcattcagctccatcagtcagattctgctgggactgcacaacccaaggatcctgttacagcatctgcctggaagattcttaagaaggaacttgcagttcattcattacatatgttctatgctgaggcataacagtggaggctgttttacagtgtatcatgccaacagtacatctgctgctggcaattatgctactaacatacaggaccttaagaactcttccttcccatagtttcactgagaaaaacaaaatcccagaagaatattaattgacattaatatgacacaattaaccatttattcaattggcctttccacctagaagtttaagcattcatctttcctgtatttcagatgaacaaaatgagataatgcattcatatactgattcagcaaacatttattatgacttcccatgtactgggtactatatagatatgcgagattaaaacaaagaaatacaatgtaaaaattcagattcttttaaggattccaccgtctactaggggaaacagatgcaatgatgtcatctataatataattttctgtgttgtgatagaatcatacataggacagcatccaaatacagcagataagcaactggctcagctagatttgggaggaggtcaaggcttcatgggggattcaatacctgagcagggtattaactaagagtgtaacctatataaaaggaatcttttttttgagcatttactatgtgttgaactggatgcagagtgctttatgtgcgttgtcataatcctatgcgtaaaacaatccagtgaaatctgtactatagccacatgtctcatgatgatggggatacattctaagaaatgtgtccttaagtgattttgtagttatgcaaaatcatagtgtgtactcacacaaatctagacgatatagcctgttgctatatggtacagcctattgttcctaggctataaactcatacagcatgttactgtactgaatattggaggcatttgtaacacaatggtaagttttttgtgtgtctggatatatctaaacatagaaaagggatagcaaaaacatggtattgtaatcctatgggaccatgatcatatatgcagtttatcattgatggaaatgtcattatgtagtacatggctatattattatcatattataaaatttccaagtgacaaaaaaaatctgaacccctgctctcaggctccagatcccagcttttagcagatatgccacactatcattaactacggtgtttcgcttaggaacatcaccaaacaaagctacttgttcttcaaggacccagtaatcatccttatccttgcacaattatcctggctctatcgtttgatgattttctttctgcaactaatgatttgggtagaaagaaaacctgccgatagtcatctttgatattgactggtcagtcccaagatctaggcattgaagtttctaagagtctctctccagtcctctatattgttctctgcatactcctccaatgtggtactgtactatgcagataagcacatggatgtgacctgatcctcctcaatcctatgctccctgacatctaaaatgggcccagaagcaaaacactttgcctgccgatttgtgcttttcagaagatgagcattttcttttacattctggacacacacataaaaaaacttttctatcattaacctgccacagccttatggaaattctgagaagtccagttcagcctcataacgcgtgaacgttatttatcttgaatgctgcaaatttggcatattggtggggggtgacaaggttaggtagatttattagcatcctgtcaggaaatttcccatgagcggtagaggtttgtcagaaaattcagtgtaattgataggagcaagttggactaattcttagtgctagatctgtactggctctgttcacacctttcctttgcagacaacaagatgtgctgaggagagctcattaagaagaccttcctgcaaacccattctttgcaccaggtttctttttccttcctttcttttatataattatttcagttactggagaagatataagcgtatattggaggcattactgaataggcaatgatttcaactcatttgtatgtatcttttaagtctccaagggaacacttaaactctagggaataaggattaacaagaagccgatatctgttcagtgtttcgctctattttcactaaaggattagaggtttcaactgtcgagtctaaaagccatcaaggcaggatataacagtggaaggaggttagcttttgaattaggattcttgggtcccagtctcaagtctccagcctgcgagttctttggccctgggacagttatttaaacttgctgagctttggtttcctcctttgaaaggtgaggttaatgatgcccatctcacagggttcctaataaatattaaatgaaatgaaaaatgtcacagctacttgacctaagcatctttcaatctctagttccagcactgctgcccctgaacagccttccttgatgtggccaagtaataacagccaccatttattgtgactttatgatgttgccacactctatgcaccatgctttgcatacttcatgtcattgactcctcagaatccagagagacagggagagaccatgggaagagaaagggagagaccatgggaagagaaggagagagagaagagaggagtagggagagagagagaagacagaggaaaggaaaaagaagagagagaaaaaagcgagatgagagagaagaaagaatgaatgagttctcatgtaattatggtcaagatattcatctttcctaagcctcagtttccttatcagtaaaacagtaaattatcacgtcttaactattttgatgactaaacgaggtgatttctgttacatgcaacccacagtgcctggaacataataaatccctaataaatagaataaaatattgttgtttctgatgataagtttcatttttgttgcaagcactcctggcacacattgcattatagattccatccactgattttccgttgtttatttcaatttcttcctcctctactagtctgcaaggaggccagagtcctttttaaaaaataatcactgcgatactgttcatcacacagaaacacacataaattgtttttaaaggaagaaaaaagggaaagaggaaggagtacaggcgcgtgtttggtaaggtgtcaagggtcataggtccttagattctactcaggtttttcttcataaagatgccatttctattggaaagtgatggctctgcctctgaaaacatttcacaaaaaccagaagaggaaaacaaaccaaaaagaaatattgctggaacactatagtgtgggcacttcaatgtagttttcctattccttatatttttccatagttggaattgacactgtaagggacacttttcacaaagtagcatattcccatggctggaacaaaataaccaactttgcaaagggagttgaattacttccattccttgttaggctaaaagccatttggcctagccagggataattttggcctggaaagctcagatttctaatctagcctgactgacctattcccagttccaagattttccacatactttcttccctcactcatggagcgattacatggagttaaatacaatacccttagtggaattgtttggtacaaattgtggtggcattgactctgtccgaggttctgcttacattctgtatgcctggatgctagccgatcctctccatccagtggaatccagccttgtctttatctagcataaacctcacccttcccttgtgatctccaaacatgtgaacagcctttttttaacacacacacacacttctctctcttctcacatcatggccttctttaaatgtcaggtgttttgaaagaagttagaggcctttagaaagtgcaagatacaagttaactctgtttaaagtttaatggcaaaaatcagaataaagcaaaactggatcaggtttacagatgatgagttttgttttccctgcaacaaggttaaaaactttttgagacaacattttaaaattgaatagtgtagataaaaatgagctgtccatgaaaattattagctactcttggcaaatcagaagacattgcaatactagacttgcattcccatgtagcaaaaaatttgctagtgattattagtgattgttttggacattctttgggtatttacagtccccaccattgcctatcatcccactaacaccaaagccaactgccagttctagtaataacaaccaaatatgaaaatgcttgagcaccagaatttgtaaacccagcccatgaatttgcattacctgcttgacctctggggtcgttggttttgcaaaccatactgtaaaggaaagaaaaaggaaaaaccaagttagatgtgttacataatactatttcattatattatctcttttttctcccttctacacttttcatttaccaccactccccaccccctgctacctaaatatctttatcccaatggaagatgcgttaccaaagattcacagtttatggaccagaagaaaaatgtggcttctaagtaagtcctgcagtcttatttctcacttctgtcattgacagccactaaatcaagaagaggttaagtgaaaattagcaaaatatgcattgccatactaacaggcagtaatagaacaatctgttcatgtccccacttcacaagtccactttcccaaaactaatcaaactcttccatctgtggaacttgccacagcaggtctttttcagcaaagaaagagcaacaagtttccctgcacatattttccctggcagaaatttatcaccttatttttctacatttcaaaaataaatattttccccttatacctttcccaatcttattttaaaatggaaacagccaaaagctaggtagttgtcttattctcttttattttcattgaaatcatttcctagactgtatacatacacattatgtatgtaatttatgaagttttgtttatatgagaaagcttcttttattttttaacatgcatttatgttgctttttgggctaatgtccttaaccttttcaaaacccaggagtttttccacctctattcttctgcatcacaagaccttacattgtgtgtgtttactggccttcataaaaaaattaaaaaaaaaacactctaaattcacatttcaccacttgttatctatcaccctctctcatagcttgtgatgtttacaaatgcttctgaagtattcagtccctagagtgagctttctttgactggtgggcaccagtacgatcatagttcacagcagccttgaactcctgggctcaagtgatcattttgccttagcttccaagtagctcagactacaggcgtgaaccgccatgttcagttgaagtccacatatgataacatttctgcctccacttaaaaccctccagacagcccttcaatgacctcggcttacaatacaaatgtgttatgattttccaggcccttcttcatctgctctcccttccttttgagcattatcccatttcatgcccccacacagattctagccataccccatgacttacaatttcccacaaagaatgcactgtggctccactccaggactttgcccatgctgggtccccttcctgaaatgccttctagctgttctctcttccctgtttgctgccatttccgtggacagactatacttgtctttctgttctaattgctctgaaatatacctctggccccccagctttcctgctcccccatcccctgtagtccttctagttttcctgtgtccccatgggacttctttatcctttttgaagcacctatcacactgagccataactgcatacctttctggatgtctctttcagtggaccatagttgcacactctcttcaggaagtgcaacttgtttgtcagtgagtcgccaatgccttatactgtaaccaaaatgcagattcagtcacttgccacctgccgagtccaattcacaagagcaagttctagtataaagaaagtgactttttattccaaagctagcttaagggaagaagtataggcttcctgccttaagagtactgcttacttttggagcagaaagcaggcacttttaaaaggcatcttggcatgaatggctcacaggggagggaaatgcaggtggggtcatgtaactcactgcagtgcctaatctactgcgtggttgagctggtgacagctggtgccttcatgggcagaactaggttgtaaacgtggccaaaactctcctggtgggagacagttttgtagcaggcacttcaggttgtacattgactgttgtctctcgaggtgatctcctggtgagagggagttctgctctggagcttctaagcacatagttagatgaacttgccctgtagggagtgtctggaaaaaggaaggtaaaaggttataattgcatgtctaaagagctaagtaggaagtagggaaaaaagaaaagagaaaaaatacattatctcttataaaaatgggggtactcattacaaaactgtgtctggcacatgaatgttcagtgatgttgactgaccaaggagagttacaaaacaaaaacttggaagtgggaggggcatagcaatcagggtcccaaaggaaagaaggcatacacaaaatggttacatgaagagaaactaatgaagggatttatttcccaggtaagaaaattagcaagtgctggtgaaacacttagggatgagaaaatgtgaaaagtctcaattgtccctaggtttgaatggccacagaagacaattggattccatgaacatggctggtgttgcaaccttgtgagagaggcaactcggttatcactttggtcctaaataaaataacccagctactggcacattcataacacatcagggagggttctggaaggaagaatgaataaatgcccaatgtttctcttattgagctctccactgccaaaatatacaagaagccagaggaaaaagacagtcttatgatgtgatctatacagcttatagcagtcagcctttctagtgggcagagaaggaaaggaagtgaatctgggatgaaagtgagaatatctaacccagtgtacctgcctagcagcagaggggaatctttgactataaaaatgtttcgttgttaaattttgaaataataaatgactataagcttttcataaagtatatacctgtattattaatgttcttatgctaacatatctggttattaaaaaatggtgcttatgcactaataaccaatcagtatacagagagctgtcaagtcactcatctgtaagtgctaccagctggggttaataagcagaactgtgacatgtgaatatttccttcatgcaaacataaacagaaatttgttttattttaaaagatagaggaattctaaatatatagtaaaaatagtaagtgtgtattccagaaaatcttagcaaaaagtcagaactaagtaaatgaataataaatgagtgaatgaggtaatataattggactacagagactaggcaatgtgaaggagagaaatatgatgtaggctttgggaacatgaaaggtagagtttgcttacactgaaagaaaagatagagaaaatgtgaacaatgtgacaaggatggatgttattaaattttcatcctaaattgtaagattcttgtcctcagagaaggaaagagggaggaaaactagtatttattgagtctctatgatatgctgagagcttttacaaacctttgcttgtttaattctcacaagtcactatgagtattattatctcatttttacagtaaggaagccaagacacaaagcagttaaagaactcactggttagtggtaaaaaccaggaaataatcccagattcatctctcagaagcccattccctgtttgcataccatgcaacattcaagaatctagtgaaggaaataacacacctatcaataattatatatccaagacagaatgtaaaaatactatgccagaagtagacagtgccttggtaacacacaggacagagaaactctaatcaggaattctgatccaatttcatgcagtggtggcatttaaataagtctttgagagatttttgaaatttgaatatctgatagacaacatgacttaaaagaaagaatcattttatttatttttgacaccttggtacttgacacaatgtccatcaaatagtaagtttcagtaactcaatcaaaaataaaaatgggaaaaatgacatcaggtgtgttcagggaaatggtgatttgttaaaggtctggtagtgagtatgagggatgggttagagtgaaggctacagctgacatgataggacagggctagtttgtagaggattttgaatactattatgcagagttagaactttccataggtgtgaaataagtagccactgaaggattttgtgcaaagcagtgaaattatgtgggctgcacattaggaagatttctccggggaaatgtagcaggccctattcgagaacagtgttggcagctaagaactgcattagtatgccattgtattcattcaaagaggtactagggaatgaacagcactctgagaatgggaaacaggggccgagctgaatgatgctgtggagatagtcatttctctagtttagatagggagagggaagggcgtctttcaagaaatgacttcagaattttgagcctgaataaatggaaaaattatgatgtcattaactacagtatacaacgtacaataagtaggggtaaaatgaggagtgaaaagtaataaggaaaatgatgagtttggatcatctgtagaaagaggtccagtaggtggttatggttcggattattggatgacatcacagatatagatctggggttcctccacttagaggaagtagctgaatccatgggaggattcacaggtggtgaacaataccattgaggatagagctcagacctgggagagcacatttttaagtgacgggtgataggagaaaaactaatgggatatttgaaaatgagaaattgtcaggttcattgcactattacccccatttttctctcttttattctctcttttctttttgtttcttttcttttcttttttttttcagggtcttgctctgtcacccaggctagaatgcagtggcatgatcatggctcactgcagccttgatctcctgagctcaagcaattctctcacttgagcttcacaagtagctgggactgcaggcacaccatgcccagccaattttttattttttgtagaaataaggtcttcctatcttccccaggttacatttttctctttctgatagtacctttatctagaacactaagtagctaatcctttctacaaaattaaagatagttactttagttgacagttaaatatcctattgtacttaaagttcttgtacattccgacgggttaatcagatgcctccaattccacctctttcaagggtggtgtatctgaatgtcaaggtgattggcataacactaatgcataataaccagaaatcgagtttatcttccaagatcttaatagaggatcctcctcaagagaaaacctttcagacatatcagccttacaactggaatctatttacttttcatttgtttttcaccctatttatgtcattttcctttttaattgccagggatatttatatggaaaagagttttcctcttcttatttctgtcagatcttgtagttgacatcttgtttcattctgtcatgccaatgattaaagctcagtaaaatgtccattttgcatatatggctttctaaagatccatttggaggagatcagatgttaaaagagaggatgtttgttgggggggtggtggtgggaggtgggtagggatagtactttagaaactgtttcagatctaagagggaattaacaggatttcagagggtgcgagaaaagtgggataatgttaagtattacattgaaagcagcgaatgagacctttccaaagtgatgacaaatacaacagaggagtgagggctggggcagtcagcaacacaatttttccactcacttgtggagctagaacataccttccctctgttttgtaaagatgagcctcctccctttcttagaacatttggagaacttcataactttcaatataacattcaagacatacttcaagagttgcccagccacatccattagtctaggtggcacctatgtggttcagtcacatctgtatgaagacttgaagactcccaaggaacttacatcagaaggagagaaaatggggttcttcatggaaacttgccatggatgaaggtacaacatgacccattgactagaccaagtagcgtgacctggatgttgagggaaggaggtggttccaggtcaagtttgaaactggttctgaacattcctagatctgttctcctgccttgtctgtgtgttttggggaagagattgtttgcaaaagaaagaatcctgtcacttgtgtctttactgttcttctgtgggaaagggctctgaaaggattgcgttttgacaggaggaaggtgttgaaccactactcgtagatagacagggaaccctgtgcggccatagtttaggtatggttgccagttctgtggggaatacagtaaaagctttcaaggacaatgacatacgtggcctccagagcatgaggctagaaatctgacatatgcgagaaggtcctctctcacccaaaaacttttacagaaaataactagggagggacatcctagagggcaaaattagacttcttgctaaccaagtgtattagtttcttcttatattgctactcttattcttcttatactacctgaaacagggtaatttatgaagaaaagaggtttaattgactcacagttccacatgtctggggagacctcaggaaacttacaatcatgatggaaggtgaaggagaagcaagcacattttcacaaggcggcaggaaaagaaagagcgaggcaggagctgccaaacacttttaaagccatcagctcttgtgatgaactcactcactatcatgagaacagcatgggggaaaccacccccacaatctaatcacctcccaccagatccctccaacatgtggaaattacaatttgagatgagatttgggtgggaacacagagccaaacgatatcatcaagcaagtgggtgcccaaaacattgaggcaaattgtggagtttctttaagtagaatacatttgtaagttcatagtttcagcttatgaactagctcttatttgatcagcatgagagcatctaaaagagaaataataaaacaaatggatccatctctcattatttccattccatggtctaacttatttttttcttgactacccttcttcctataagaagaagaagagaaaggtctgagaaaaatatgtgcccccataacactctggggcaacctgaaggccatcttccaaaagtcccctctgcctttctcagagaagagattgttaggctgatccatgcttctgtaacacacagtccacaagaatgcatggcatgcagtgacaaaccaagaatattctgataatctcagttgaatctaagcattctatggcagaaactcgcttttagtaatctgctatctgttaaagaaagaacaatttggtctcaagcagtggggaagatcagctcatttacaagactgtcacttaatgaagctccttggtgacttttctgtgatgaatttagacattgaaaagaaatatttcacctcttcactctgctccataggctcaagcagaaaaaatgggagacattgtatttctagtttctttcatccaaagctttgctcacttatgttgacattgtgctgaacagctgacgaacatgcgggcaggccaaggaggatgctgtcttactgttggactcttctctgggcaaagttcattattgtgctggcctcagaccactttagctgccatcagttgagaggaaaagaaagaactgcattaaaaagaatgtcttgcattacaggctttagaggggaaactagtgaaaaaactgctgatgctttgggaggcaatttcttccctccctgcctgcctccctccctccctcccttccttctttccttctttccttctttccttcctttctccctttctcccttcctccctccaactcttcctccctcccttcctttcttccctcctttctagtagatgtctctgattctacctcttttttcaattgatttatgtgcttttgcttggcaagtttgcgctaactcccataattgcttggaagggcggtgttgatttaagccttgtttcattgaaggagaatagcattccttctttcataacagaccaattaaagacgacacaatgacttcttctttctgtaagctttccttgattccctgagccaattttgaaattaaactcttcttcagtcctcctaaactcattgcacagaaacaatcacaaactcacactgtcaggagtggcccaggccatctggttccactgtttgcaagcctccatagtgccgtcatagaggcatttccacagtattctagagacactgtaaaccttctccataataggccagattttcctagcagggactaatactagctgatgatagctaataggtactgattgcttaccctgcctggtgttttacagatagtgtttaaatggcagtatagggttaagagtatgacaaccagagccagagatattgggttccaatcctaccatttaatccctgtgtgaccttgggcaagatgttttacctttctaaaccacagttttcttctttgtaaaatgggaaaaaatttagctactgcaagttgttgcattaaatgagataatttaaagtagaatgtgaatcgtaatacccagaatgttctaaaaattaatgttaattatcatccttattatccattgcttatctccaaatgctttagtgtaattttcaacatggtgctacatagcgaggattatgccctctgaaattgtcacacatcaagactggtggctgaaggccagcaaaatggtaattgtgatcattatctagcacattttcttctctagaagatggattttaagtctctgctcataagctgattggtagtgctgccttagattggtatcttctgttttggggaaagaaggtgattttgccagatttcctcagttttgatcattgggaatatacaataatggaaatttgccatgggaggctgggaacccataactaaacagtccatgataatcctatatccaactcttggaaaagggaaaaacaacacttcatctcaggattgcttcagggtgaatactgtgcctactacccatattaaatgcatttctttatgtccatccctcctctctctctctgtctctctccctctctgtgtgtctttctctctctctctgtctgtctgtctctctgtctctctctctgtctctctctctctctctctcacacacacacacaccccccagaagagcattttggccacttaaaggaatgctgtgaggaattacagattttgactgcgtaaaatattgtgcgttgttccaagcaaaggtaaaattctcaaactgttgaaattgtttttatcagcactactcctaatcataattactgttgtcattagtcagtgttgggtaccactaccttctgtgataacacttaacacattgttagcaattacacagaacttcccaattctgccagctccatgctacatcatcaataccatttcctgtagtagagtgccccctagcacctccacgcttctctcagtttaatttgctttttgagccccccaaagagagactactaaatatcaaaggcagctttcactctttagggacttgggctttccaagtggttaagtgcccagcattaatctcctgagatttgttcatctgacttcacagcagctggaacagggacagagatcttttggacagcctgttctgccagaagcagagcaggtggctttctctcgggtcacaattgaatttaaaaatcccattaattttgtcaagtcaacttaattctcttaacctgataattatcttcctttggaaaaagaacaataaaagagtaggcagacctctgttaagcaatgtttaaagtgtgtgtgtgtgtatgtgtgtctgtgtgcacatgtgtgtgtgcatgcatacatgtgtgtgacagaaagagacagaaagaaaggctgcctgactgattataggtttataaggttcacttcttagttcatctctgaaaacaagagattttggctgctgtcttatttgtccttaaataatttgggtgatccacctgggcattaggtcacagccttgggccctctttttaaagcacttgcatgcctgggaagaaggtggtaggctcttacagcagcaaataagagtgtattgcttaaacctctctttgaaggcagggagggcgagggggaggtgtgagatattttaaaaataagatgtgctgctaaattctctgccaacctccgttcatgctgagtggagtgtaagtaacaagtatcagatagttcctccagatgtcagctatttaaagagtcacatgctagaagttctgtggatagcaattgtcttattcctggtggtggtggtggtggtggtggtggtggtggtggtggtggtgatggtggtggtggtggtggtggtggtgatggtggtgatggtggtggtggtggtggtagtgatggtggtggtggtggtggtggtgatggtggtgatggtggtgatggtggtggtggtggtggtagtgatggtggtggtggtggtggtgatggtggtggtggtggtggtggtgatggtggtggtggtggtggtgatggtaatgatggtggtggtggtggtggtggtggtgacgatggtattaggaggtggatgctgcctcgcagaaacttttatcagcaagaaagtgtgggaatgtgtttgtgcatttgagaagtaagacaaattagaccagagggaaaaaaatgacctaataactcaggaagatcatgatatcaacctttgtacaagtaacatttgatttttaaatgtataaagcaagaagaatgtccaggaactctcaattcctgtaaaattattgtattttccttaagaaattaacttataggccgagaaattatacaataaggaaaatgattcttattcaattttaaacttttctctactgctttacctaaaatagactggaaaaaaaaaagttgtgactgttctcttttgttatctctttgaatcccagtggtaaaggacttcttcctacaagacataatgaattgatctgtttaagttagtaatcactgtgaggaagtggtagggtcaagactgattagagtcttcagaatttccccaccagttcaaatgatgttttcttacactcatgcttaaaagttctgcataagggtcacaaaaattgttaagcttcatttcttctcttctcttctttatttaatttttggagacagagtcttgctctgtcacccaggctgggatgcaatggtgtgatctcagctcactgttacctccgcctcccaggttcaagtgattctcgattctggtgcctcagcctcccaagcacctgggattacaggtgcgcaccaccacacctggctaatttttttgtttttggtagagaccaggttttaccatgttttccaggctggtctcgaactcctgccctcaagttatctgcccatctcggcctcccaaagtgttgagattacaggcatgagccaccacacctggcccattccttatatatttttaaaaataacctgttcttcttcagtttctacaaattctggctttattcttttgcttaatttgaatttcagctgtgttaataaccagagggactccaaaggatgtagttttataatttctctgagggtcagttcttccagttttatatggaagagaaataagatagctcccagctcttggctcattgttggtgacaaactcaagtaacaaacactgcctttctaatgggagatatcattatgctcaattcctcctagtgtctcttctaaaacagatactcagataaaacacttatctctgggagaaacagataggcagagaaaagaagggtatgtgattaagtgaaggtagcatttctagaactgaaactttgtcttttccttcaacttccatggcccttttgagtaatagaacaaagtagagataggtttggttgtgtcaaacacagtgggatcagatgtccttcaaacagactttgagagacagtgtggtcatgggttttattttttttcctcactttttcttttctggaatcttctgcaggcatcccaggttgagacacttgcaaaaaaaagataagaggcagctatacaggggagaatcgcaacctgtgtagtcaccatgtgaccacttgtaaaacagtcccagcatcccatcttagtttgtcccttggtagggcaaggaaggttgtgagcttttgttcgtgatgttaaataaagaacattgtgtgtcaaaagaagtagacttccttatctgctgtttacagctatgaaagaggaggtgttggtctttcttctaagctctatcttccagcttttttttcctaccttctgtttcacatgatctcatacagaaaacttctgactttccaatgtagggcttgttctgttgtcagcatttgtagtcagcatttctctagtgtttttctaaaacccttatctgcagggaacgtcaacgtggttgtagcatcaatagaataaggttttagttatatatatatgtatctacatatatatagttatctatatatatagctgtatatatagttatctatatatagctatatatagagttatatatatatagctatatatatggttatctatatagctatatatatagttatctatatatagctatatagttatctatagatagctatatatatagtttatatatatagttttatacacacacacacacacacacacacacacacacacatatacacacacacttagcttttctgtttcaactttgagtcataatgttgaatgaaaactgagtccaagattgatattctggggtcatctacatggagcactgaactatcttcagtgcattacatgggaaggttagatattggtaagaaagttaggaaatcaatctaatttctcctattctgtctcccccacctttccttttaccgtccattgtgtgcagaattcaagagtgccattcactcagttgtgccagagcataattgctgataaagtagagctgatgaatttgcactatggaatgatcctggtcatatgttttcctgaaattttctcaagttttgcaaatttattttctatttcatacttgtctaatatttttgatatgtacaaatatgtatctaccttattactttagtgagatgggactcatgttctctcatacacaaatacatatatcttatgtatttaaaacatatccatatctataaattatattttataagactcacatatccatatctataaattctattttataagactctagctaaaactgagtagtgttttaagaattgttaaaaaggcagacacgtcttgggatgctagcaggtgggaagtatgatctgtccttaataaaacatgattaatctcacaaaaaaggaaaaactctcccatttaaggcccagagaactaggctaaaccagaaaacagagaggcttgtgttggggagtacttttgacagatccctcacccccatccgcacagccacccacaacataggtgtatattgtctctgtatgatttcgtatctggtgctgttctgcacttctcagtttgggggctgaattcctcagcatccttgccacattacagaaatagaaagcccaatatcatagtcacaccaccaccccacttgccacccacaatgtaacagaagagcaggcagccctcagtttccgaaagggttgtattctcaatgttactttataaattctcagagctcagattatattttccagagaaatggtatattctctttccagaactcaaacacctactaacccagaatattcccaatgtcctagtcaagagatactatagtcaagtacctggccacataggaaatgctttctaaaagggtatgtatttggaattttaggttaggataccaatgacatatttttcaccattacagatttgataacaagatctgggctacccaaacacctacttgctgtctgcaaagatcctaggctagttagttctttatccaggttcatggcaaagtttgagaggagattcaaaggtaagaaaggggctccagctggaaaaggacatggtgaggtgctggacttgatgtgctgggaaggggtgaggaggagggtgagatatatgtgaggggcataatgggagcagtgggaattgggagacacagggagaagaaacgaaagctgaaggagtggactttgagggttaacaaagaagagaagcagaacataattcaattcaattcaacatactttgttgatcacccaatctggtatgtgccagaaaagtgagcaaagttgaatgagatgtgttctccacaggcgagatctcctgtaagggaaggagaaagggacatatgcagatttgcattcttggagcagatctgttcggttccagactagagatgcagaaagggcacagagaaggagagatttatcctgacttgaagatgaggggacgtctcatggaagaggaggcagttaagctagacctgaggatgctaagtgcctcacataagtagggaaagaaagcataagtccagtctgggaaaatggtgagtgagatgaaatcccacagataagaaaggtgctgtgtgtgtgtgtgtgtgtgtgtgtgtgtgtgtgtgtgtgtgatggggtgggggcggggggatgacaacatgcctacagaatacagggggatgtgaaagaacaatttaccttccagaataaacttccttctttagcactatgcacatattatcttggcctctaatgagactgcaatcctgcgggcaagttgtggttctcatgggatagaagaagtgaggatgggagagggtaccgaggaggggctctgggactttgagaatttggcagtttggggctagtgggcaaggagatttttcccacttcttgcttctctagatcaactactacctggcctattgtatgactctcagatgctaatgtggtgggagtaaagaaggaagcatgtccttggagcccagattatatttcagggtatccaaggcatcagagaagggaaacacaggggaaggaaatttttagaggaaatgtggaggcttggaatgctccacatttatacaatgtttacacactcaacattgtataaaaccagtatgaaagacaggattagtctgaatttcatgaaacattctcttgggcccctcctgcccacaacttcttttaaaaggaaaaatgaagtgcccaatcctcacatttcttcccatgcaagtgaacccctgaagaatggatgctgaggttggggctgctctctgatcagcaaattctgagatactagaaaaaaagaaggaggaagaggaagagaagcatgaggaagaaaaagaaggataagaggaagaaaaagagggagaaggaagaagaaaggaggaggaggaagaaggaaaaggagaagaggaaggaggaggagaaagaggaggaggaaggaggaaggagaaaggaggaggagaaggaggagaatgaggaaggagaaaggaggaggaggaaagaggatgaggaaagagaaaggaaggagagaggaggaggaggaggaagaagaagaagaataacaagaaggagaagaagaatcatttttccaaatatttgtcaaaagcataatgcttctattaaaatgttgaagtgcatatttatgtttcaggaatttggggagaggacaaatgtgtacaaggaggcagtcactcctgtaagtgctgcacacatacagggccttcaaagcaaagagagagttctgcatttcagggaaggcaaatggctatggacattcacagaaacctggagaaagtggatggctcctgggtggatagcaacactgataggtacaaagcgaagaaggaggtgggtagctttcggactctactttatcatcttttagggcctgtgtatctgactactgctgggattgaatctgctggatgtctacagctggaggttaggggatttcacacttaaagtatgggtgtgtgcatgcatgctgtctgtggcctgtttgtttgacctcagtcttaatgatgaactaccaggaaaatggaatttgaggcactcactacctcttggccattcctcaagtgaaaggacacaaagactttatattaagatttatagcaacttcaaagctataattttgggtcttgaacacatcctttaatggaattcttttgttaaccacacatatagaaatctccatgttttcagccacagaataccacatctatataacagactaggcaaatattggcatatttcttttaaaagattaccaatcttaccatttaaatgaatatgctgaaatttaagtattatgttcatatctttacactttgaaaaacaggaagacatccctctgccctagctcaggagctcaggtgaaatgataaaatccggggaaaacatgttttggtactttggtaaatgtgtgtgtgtttatctcattcattagtaaccagagacaagcaggaacatgttaaccatcaaatcaggaggtgggagatcctggatctgatttttacttgtttctatccatttttgagcactatgcctttctaggatttgaatttctcctctgtaaaatgagggaggtaataaatggctcttaatgaaaggtaataaatagtaataaatgaagtaataaatggttcttcaacatttctgggtcacgaagttctttaaaaatataaagaaatctttggactttttttccagaaaaaaaatgcatacccaaagtaaattgaatatagttttggaaaggagtttttatcttatcctaccatagatattatgtactacacaactccgggggcacaattcacagactgtggtgtaaatgacaccaccttggaggtgggcaaagaggtgactctctttatagcagtaccttgaactccaagctaagaactcttttgccagatgagctttaagattctctctggatctgaatttcttcaattccagaaatgtcattattattaccaacaaccctatactaatctggttaggccatctttacaaaatactacagaatgtgtagcttaaacaacagaaatgtatttattttattttttatttttatttttttgagacagggtcttgctctgttgcccaggctagagtgcagtggtgactcacatggctcactgcaacttccgcctcccaggttcaagcgcttctcccacctcagcctcccaggtagctggggttacagaagcccaccaccatgcctggctaatttttgcatttttagtagagacagggtttcaccatgttggccaagctggtctcaaactcctgacctcaagtgatctgcctgccttggcctcccagagtgctgggattataggcatgagccatcatgtccggccaacaataggaattcattttctcacagttttagaggctggaagtccaagcttaaggtgtcacaaagttaggtttcttctgagatctcctctctccttggcttgcaaatggctgccttctctgtgtgtttacatgatgtgtgtgtgtgtgtgtgtgtgtgtgtgtgtgtgtgcgcgcgtgcatgtatgtccccaaactccgagtgtttctttgccttcttataaggacaccagtatattagattagtgcctcacccttatgacctcacttaaccttaattacctctttcaaggctgtatctccaaattcaatataggaattttaagagaacacaattcagtctgtaacaaatcccaaactgataaacacattgcagagagtaactagaaaaatcaaaacatctttcagatcccttctacatgcaaataagtctatcaaaaattagaatgaagtatgctacttttcaaaatgggaatttatgataaataaccagaatttatctgctactatgcttactaaaggggaaactgttacagaggtttatttagtattacatatacacgcatgtatatatctagtatatatgtgtgtgtatatatacatttatttaaaaactaacttgatgttgtataaaataaattaacttttaaattaactggccaaatgtcgtatatagtaggacaaagaatgagttaagatggaaaaaattttaataacctataaacattcttagtttttgtttttctttgggtcctccaagtgatcatcttcgtgtaacataaatcaaacaaccaaaaatctcttccacatctggtaagtgagggtaggaggaatgggggttgctcttttttttttttttttttttttttaaattttcctgatttttctttaactataatggaggatcaggggctgagaagaaaaggccaagagtttcttgtcatttttatttatgtatttattatttctcccccagtgccacatatagtaaccaccaccttctgagtaattcccgaagcaacaaccattctacaccccacccccagttaccctagtgccaatggtagctaaagaagagaaatgttcaagaagaagatttacatattgctggatgttcttattcttaaagcctcaccacgattctatggctgtatagtccattcagcaatgagtcaagcctgtgagttagcagtgttacagactcaccaagaatgtatggcaccacccaatagcatactgtcctttcatccttttttgctttgcatgtactgacctttttctctattcatcttctgtacaccgacaaggtatacattttaggaaattacatctatcaggcacaatgactccctctgtgatgtttcactcccacgcaacactcccttggatgaaatggcttgctctctgcctgaattgggctaagatatatgcctgctgagggcttctgccctcccatctctcttctaccacccctgccttgtgaattatcttctttattcctagggaatctacagtaaatactttgtcatctatagtcatttgcttgaaattaacaggtgggtggttggccaagcaaggcaggagagacgtgggacaggaaaaataaatagtaggcacaagcataccagcaggtgttattattccaaagctgtgtagctctttagcccctgtttctattataaaaattaaaatttttaaaaggcacctgggaatctataggagagagtcagtggttaagtgagttgcctgatatctggcaattaatgtttgagccagggactaaaatccagatatttttgattcctaaagtgtgattaaaatatgtctcaaccatgacatattaaactattggaaatcatacgtaatacagtcctttctatattacttcaaaacctggtttaaagaaacaaaagtatgatttttttcatgacttttcaaaagccttctgattttctccagctataaaggttatatatatatataacctttagagccaaatatatatgctttctcttctttctcttaaaggtaagctttatgctcattattgggactgatgttattgatcatatcagacttctcttttggaataatgtttccaggattttcactttgagaggatcaaaacccaaaaaacatcagatgcatttttctggcatttagttcccaggttgggcagtacattttcaaagtataattgattttgtcaaggtcttgagtttgggagtgaagactggagtatcaggaaatgtacatctctagccatcaactagtaacaagaatggcgtaaatgttctagggactcactctgacatccaaagggaagggagcaacttctgagattaagagacctttggttttgtgatgggaacacaaaaagtaaacctatttgtccatatctcctaagactccaacaaattatatgaacaactgcaagttatctgaatatggaatgaattatggatcatcaactaatttaatgtaaccccaggttgcaattcccgtttttagagaggtaacacaaaatatttttaatctctaaattgtaaattgctcaagcaccatgtaataaatatcaatatctaacacaaatgttttggtcatcacttaactatcatatatataattgaaagttgactgtaagtattgcacaggagggcacaaaagatatgtaaactaattattatccagtagtccacactgactatcatttgtatgtcatttgttttattttattgcaaagtaggcatgttgacacgtgtgttgggtgacctgttataaacatatagaaaaacaaaaggagagaaagagagataataatttgatcacagttctctttctaaaagcattgctttaatattctcttatatacaggtagtgataattaaggatatagaattattttctaaacacgcataaatttatagttaagagaaagcatctcatttcaatgataaaatgagagatcatttaattttttttttttttttgagacagagtctctctctatttcccaggctggagtgtagtggtgcaatcttggctcactgcaacctgcacctcccaggctcaaccgttctcatgcctcagcttccctagtagctgggattacaagcatgcaccaccacacccagctaagttttgtatttttagtagagagggggtttcaccatgttggccaggctggtcttgaactcctggcctcaagtgatccccctgacttggcctcccaaactgctaggtgagctaccacacccagctaagttttgtatttttagtagagagggggtttcaccatgttggccaggctggtcttgaactcctggcctcaagtgattccccctgacttggcctcccaaactgctgggtgagctaccacacccagctgagatcatttaatttttgatcacaactattgggagtattttaaaattgtaattgacgtagactggtatgacattggggactgatgatatggaatgttattgctgattcttcagtatgtggacttcttgcattatgttccatatattcttaaaagaatggggctctcatataattttatttcagatatgtccattatttctggactgttagttatgccatttaaattaggtatagccttgctacctttttccagcttatcagttttaagaaagatatggtaaatttattcaactaatggtaaacactttttctaaacattgttctaggttctgaagaatcgacagtgattgaagaaacaaaaacatttactcccatggaacatacattttagtgggttttttaaatcacagatttgtcattttttttagtcagtgtgtgctttatatattttgaggttatgttattaggtgatacagatcaggactgttacagctgatctagttaattgtttttcttcaggatataacgatgtttttagatgtaaagtctattttgtctggcaataatatttccgtatctgttttcttttggttaacatgtttcaagcatattagttagaatatttgtttgacagtatggtagttctgcttctctaggtcacctccagatccaggttgcctttttcttgttgctcagccacagcacattgggcaacctatcagttcagcaaatgttaaccagaagaaaacatgtggtaatgtccacatgggcaaagttggctcatcacctcatccacattccagaaaaggggcaaagagaaagcagaaagaaaacgtcagcctcttaaggtatgacttagaacttgcacacataaattgcataggatttagcaacagaatagtaatgccatttagaccgtagacacagtagataggtggtttgggttcaaatactggctctggcacctcctggctgtgtgagtatagacaagttacaatctatgcctcattttctccaattgtaaaacagagatacttataataatatatatcttatacacattaatcaagtattggttattattattacctttatttttcttctgcagtttctagaatgcctttgtttaatcacttcaaccatatttattttggcaatgtatttcagattgttctattacgtcacattatttgatcccttgttctaccattgttgtggttattaactctctctcatggtggactattttcttactaaatttttatttttcttattttattttattttattttttgagacggagtctcgctctgtcgccaaggctggagtgcagtggcacaatctcggctcactgcaagctccgcctcccgggttcacgccattctcctgcctcagcctcccaagtagctgggacttcaggtgcccgccaccacgcccggctaattttttgtattttcagtagagacggggtttcaccatgttagccaggattgtctcgatctcctgaccttgtgatccacccaccttggcctcccaaagtgctgggattacaggagtgagccaccgcatccggccctatttttcttattttgtactgaagtttatgatactgtaggagctatgcatgcctcactctagaagaaaattccagctattctgacattaatatagcatatgatactaaacaagtcactctcttctgtatctgagtttatcctaggtatctcctgaatagctaacatccttctttttcttaccggcgactgaggagagatggccttgtgttggttagacagagcaaagtagttctgcagtctgtcccacggttctcaggctacacgtctttatttagggtgattcatttttatttatgtttagcccaccatagttccatgctgaagaggtaaggaacaatagggtaagcaagccagccagcatattcttcccataccgatgagcttttcaccagaggaaaatgccctctcagatcacagaaacagtagctgtgtaggtgttgctagtggagaaaaaaaaatgtttggtatttaaaatagaaacataaaattgttaataagtctacagacaacttgtattgcatgcagaaataaaaaatgaagtcctagtacaacaatactgcttagtcttggattcattttacagaagtttaagattcctcacctcaatgaatgagattttaataaacagaagtgtattagaatatttgcagcatccaggcattgggtttgagcctcaaaataaggccagggatgacatttaagtaaattcagaagtaaaaagcaaatggaaaacacttttaatgatgtgtcacataatgtaaaatgtgaaaaataacttagaggttatatactccatcctcttgcttcagggtccctaacaggcatctctcacttgagcataccctgtgatggggagctcactgccttgcagtgaatctttgattttgctgtggctccaaatgttggaaagtgattccttatgagataattgcatattttggaggttcccccaccacacacacatacacagaagaaatgttctcccctatagtaattcaaaatatctcgatagtattgcacaaatatccattaagtgtctcctatgggcctaaaactgtggacaattggagataaggaatattgtcgttttcattttgcctgtgagaaaaagagttttcggaggctaggtaacttgtccaaggaaacgattgagcagagatttgaacttaagctctctggccctggaatttaagctgtctggctctaggactaggccctcattccctgcatgatttcagaattcatgattccatgaatcatgtagggaacccagatataaatcaactgataataacagaatgtggcaagtgtgaacagaactgtactttaggaagctaggaaagaacaactaattctgcctgtccagattggaaatagtaagttttgaagacatagacaccatcaatgccaaagtattgttatcataatgttgtttcacctattttaagaaaaatctgtttcttctacctatgacataaacttacatttcagtatcccccacctcacctcgtcatcagttttagaatgtgctaaattctcaatactactgagaaatgcccttattccccatattgcaaagatttctggggctgcttaataacactttgtaccttctgttcagagaacattcatcttattctcctctcaaattctctgttaagtaaatttaatactacatagcatcaagaggaaagtgaccatttattttagatctgtatctatcttagacgatgtacttttcatggaatagtgagtgagacagacacttgagtcaggtgatgtttgaactaggatgttcccagaattaaatggtagtctcttaaattggatctcatgagtactttagtatctgaaaagtaactacatggaataaattaaacagaggaaaactcctggctatgccattattaaacttttttaaaaatatggtctttatttgacatttctgagtatggcaacccattccttggaaataaagaatgtggcttccaacacatgagtttccccctccctctcccctcccctcccttaccttcctccttcttccttccccttccctttctttcccttcccctttctttcctttcccctttttttcccttcccttccctcccctcccaccccttaccttcccccttcctgtctccttttttccccttccctcccctcctctttcttccccttccctttccctggcctgccctttccttccctttctcccttccctcccttcctcttcccttcccttctcctgccgtgccttgcctttctgtatcccatggaatacctctcttttgcattggaagaaaaacttgatcccttttggagctctttgggctttaaaggtttaagtgccaagtgaacgctgggcttgtttgcctcctttaggaagccccgtgtggatgattccacccctcattgataatcttcttactttacactcccctttctctgccaatttaaaatcattcaaaatcaagttcatcataatagtgaacgtcaatttacaatgctcttttccaagataacttcttttcaaaccctcaaaactattctatgaggtagagatgattcatagttgtacagttgaggaagcaggctcaaaaagtttaaggtaacttgttcaaagtcatatagccagtggacccaggatttgaactctagtcttttaacactcagtttacgtgttaccttgtctatgaatccttcttgatggtccctgctttccctgccgtagatcagtagatcaattccattctctattcccctgtgtgctttgtttatacctttgttctagcacttatcacattgtatttgggaagcagtgtatttaaatggatttgtggctggtctaatttggtttaggtttttttttttttttttcctgttagtttatttacttcctaaggcctgaaatctcttcttcattatttgacctgctggacttcatgcagtgctttgcccatagtatgtataaatttagtgttcatggagaaaatgaatcaatgcaccaaagtgaaggacaggggctgcggtttctttgtatcctgagtggaacctagttcagaggtacagtcacaatcacttttaaaaaaatgttgaataataatgaaatactacataaatccaatagaaattcttaaaatatttagaaggcatgttttctaggaagaaggctaattattagaatttattttttattctagagaagaaagagagaaaataaagaattaaagaaataggaaagagaagtcactagagagccctttcacgtcccagagcagattaggatcttgagagctctaccctactctgacaaataattacttataaaacaattctggggtttcatagcctgcattacctggttccagggaccaatcatgagcttcgttgttttggagttggcttggaggacatttataagaaacatgtgatgaagttgcccctttttctgcagaagataggcaaagagaatcccatgagttgggtaacatgtgggacagattttgcattccgtgatttgaaattatgggtgggggccgggtgcggtggctcacgcctgtaatcccagcactttgggaggccaagacgagcggatcacgaggtcaggagatggagaccatcctggctaacatggtgaaaccccatctctactaaaaatacaaaaaattagctgggcatggtggcttgcgcctgtaattcccgctactcgggaggatgaaaaaggagaattgcttgaacctgggaggcggagattgcagtgagcagagatcacgccactgcattccagccagggcggcaatgcaagactctgtggccaaaaaaaaaaaaaaaaaaaaaaaaaaaatgggtgggagggagggtgtttactccctgccctggagatttgtataaacaggaaaagaagactgttttcttgtttagtcttttaaactaaagacttttctctcatctggagaaaaaaataataatggtagtaataataataataataaaatgggccgggcacggtggctcacgcctgtaatcccagcactttgggaggccaagacgagcggatcacgaggtcaggagatggagaccatcctggctaacatggtgaaaccccgtctctactcaaaatacaaaacattagccaggcgtggtggtgggcacctgtagtcccagctacttggaaggctgaggcaggagaatggcatgaacccaggaggcgcagcttgcagtgagccaagatcgcgccactgcactccagcctgggtgacagagtgagactccgtctcaaaataaataaatacataaaataaaataatttttattattgatcatttttgtgtgtcgggtactatttctagacaatttacatgtattaactttaaacttgacaacaaacctattagatagatggtatgattactcccatttcacagatgaagaaactaaactacaaagaagctaagatcgagccgggcatgatggctcacacctgtaatgccagcattttgagagtccgaggtgggcagatcacgaggtcaggagttcgagaccagcctggccaacatggtgaaaccctgtctctactaaatatacaaaaaaattagccgggcatggtggtgcattcctgtaatcccagctactcgggaggctgaagcaggagaattgcttgaactgggacccgggaggtggaggttgcattgagccgagattacgcactgcactccagtcttggtgacagagcaagactccgtctcaaaaaaaaaaaaaaaaaagaggctaagatcttggccacgttttcacagcagctaacaagcagaatcaggatttgaacctaggccgtggagcaccagagcccattctaaatctgaatgcactctcaaagtgtcttgcagggaggtgagcccagtctgtctctctcagacttcaagaccatttgcagtggtccccatacctattgcaatgattctgaataaagtctcctgtaccaaaaaaataaaaagtattctctaaatctttaatattttatcctagaaacaaatgagattattccttcttttattgtgataacatattatgataactcattttatttgattccctaaaaccggacagagatttccatggtgctgaggatacgaagtttagaccttcgatagctagtctaagcttagtggagatctgatatccaatctaagcttagtgaagacaaacaggttgtaaatgcccaaatctctctatgagaaactaattaagccctgcctttgagtaaaagagaaaaaaaaaaaaatgcttctatattaaaataacttcatttggagttcaaaggaagctaaataaggttttcacaggaagagttcatatttttttaatccttaaagtaatgtgtataagtttcaatgaagtaaatgtcccagctacattattcaaactcaagagattaaaaatattttttttccaacatccaaactcctgatatccctatttcagccacagggaggacaagggcataactatggatgtttattagaaggataagttaaagaggcagaagcagtatatacattctctaaactatacatttatacaaggatgccattgtctttttttaagcaaatacttgtagaagtgatgtctaaaagaataaagcttctcttctatatctccaaatagaaaatataatcaaaatccgcttttatgtaggatggcttttttaaataaataagcagaaggatgaattatgtggctataaataaatctactgacatgtaataaagcaaagtcgaactgttttatggtgtcactgaaacccttagatatatttatagccatgttaacagtccccagtattttttcaggacttttatttcatttcacattatgagagtttagttgtttgtttttctctccctaaattgccttctggagccctttgtagagatagaaagtaaggatctctactcttcatatttggaaaaaaaaagggtcttcaccgaaaaagcttagggctcacacagaaacagtcggttctgatgctttctggtctgcctgtttctgtgcagttcatatgagatgtgcctgcgaagaacaacttgacaggtagctcctgctggcagcaaagtggcaagtcagagtctatacaagtgaggagaggcctgtgcagagataaaatgtacagtactgtagaaaacaagcagatggacagagcaactttgcattagattcctgatgcctgacacatttaaatacaatcacaaggcttatttcagaagccaaagaatctccagactatcacatagccgaggcacagaccaaaacaagataaagggtctgatgggtaaagatgctcacaccttaccctgggacattctcttgcagggtgaggatggggggggggacatttaaaaagcaagaggagaaggtttataataccagttctaaagcctgaagtaatataggggttttttaaaattgtattccatttagaaatttcaggatccaaagagtatggttaggattccgtggggggtttattcaagtggagctaagcgtggttgttcctgtgaaattatttatatttttcaacttgaaatctgggtgagcatagtgtttctaaatctatttctcttcttttctatcttaaaagtggactctcattttcatcctgtagctatacacttgattcccaagtgttatcactcaagggacccactagaaaagccaactcaagaggaagaggagagcttttgatggtaggacaagggatgacaaatccttcagctggaactctagctacaggcagtatttagaaagtatcactggagctaaaaatctttaaaaatgtatttaatgtgttagactaatataggctctaaaagacctaaaaagaacaggatccagaaaagaagtcgaaataggaatgtgttaactagagggaggggcaggagggataagaaacacatgaaaaaattaacagtggggtaaattggagagggacattcattttattaggataattgggggttgtctctttgtagtggaagaagtaaaatagacctgtcttacatttgtcctctgaagagtcttctcagtatttaactgtgttcccaaatggaatcagccttaccaaaattcacggtgacttcttttgacattttgcaaaaagtaaataaataaattataagtatgacaagtgaaatgaatagttccagctgtgatgcaccagcagcatttccagattttgtactgcattaaggatttattttctctttattgcctagcagagaattaattggaaggtccatctaagcttcccacacatcctcagaatgaagtcaaagcagtctccaatgctcaatgccaattaaaaaaaaaaaaaaaaaagaaaaacagtaagtgggtaggtggtcagtttatcaactctggaaaagcttgtctttgaggattcacactgctaaagccagacaaacgcatcagcaaaattaatggcataaggaaaatgtgagtatgagattggcaattgattcactgagttcgttcattcagccagtatttactgagcccgtatgatgtgctacctattttttcacacacacagaaaacaggagaaaatgaagactcagccctcagagagcttataaccattttaaggagataaactatgaacaagtatacagataaaataatttcagacactggagagtgctgtcaaggaaataaaacaaggtaatgggaggggatgccttccaggggtggtggtcaactttaaatgaggaccagagagggtctctgaggaggtgacatttgaaatgcacccatcacatgaaaatcttggggaaaagccttccagacagaaggggccaacaatgctataaaggccttgggatgagaaaaaacttcccacgatcaaagcagaaagacctggggaactagagagtagggaggaatggggcatctggcaggagatggagctgaagcattagagttaagcagagtcatctaggccgccttaaggccaaaagtgcagtggaaatccacctggggactaaatcaaggagtggttgaattgagtggaaattatcatggatatttaggatattaagaattttttctggcttttctagcaataatagcataagaccctaaccatgtacttaacctgttcttcacctttttagagcttcagcttatttttctagtggacaaagaatattgccactgtttgtcaggtgctctaccagatactgtatattttctcattttaaacccccaacaacctcgagagggaggcatattcctcattttacagaggaggaaactgaggtttcaatggaatgtccataaaccaccccttccccttgctgtggtgtccctgagagcatgctgctggtttaagacactgcgtgggggcacacccaaaagtatgcaagaccttgtcagagggccatttcctggggggctgtggatcctggaccacccttacaaatgagagccagggcagttagggtgactgtgtgcatcatttactacgggcagcttgaagcttttggaggacaccaatttcagaaccagaataccagttcactgccataaattctgaaatggacttgatgtatgaccttgaaggcaaatcacctgtaggtttggtctttttgttagagagacataatgctgtttcctcaacacctccttggggtgtctcaaggatgaatagggctgtcttaatccctgttctttatcctcagggggtttgaaatgagagtggagtatataataggtgctataagctccttttaaaaaagcctcctaaatacaacatatatatgttttaaccagcaagtattgttcactcacctccccttcctccctgcaaatgtaatgggctttttacccaaggtgaatggtaggagggagtcaaagctagcaagacctgtgtggacaacaacctggcctgagagggcagcctgttgggtttgtccttcctgcgcatgagacatactggaggggtggatgccgcctagtccacagtgttaccgtgtcctggcagagccttgggtcagtcccctcctggagtcacagatggccacgacagaggacaggtgctgccattctggctctcccctgcgtgttcagtcgtgaggtaaacaccgtgctgtctttgatgcccagcgcccaggggacttcacccacctggggcagcccttctgcagccagttccggacaggcgccagtcacttctctttgagccagccgacttggccctctccccttctgaagttttttgatcaggactacaggcgcggacgataacctctggattttgaatcccaacagtgtcctatccaccaccgggggtggcagccaccttctggaaggactgccaatcacggagcccttcaccctttggagtccccaggccaccgctccaccttcacttttgggagtccggactcagattcccatcattcgccctgcgggaggggccctgggcattttaaccccgggagacacacgcgcctggagagtggtcgcccaagccaccgccaggcagggaggagcgcgcgtgcggcaccaccgcgtgcagcagctccagcgctcgcgctgcctcaaggggtttatttttatttctatttggagctacttcggccttagccgccgcccttacttttcctccgaaattgtgagaaggtgccttcatggctggagtttggtttcacgcgcctgggagaagagcagggcacgggtgataaagaaggcgcagtgtcggtctgtcggtgtcacacacgcgcgcacacacggcggggcgggagccgcgcgagcgagaggagggcgggcggcgtgtgctggaggctcgcgcgggtgtatacgagcctgtgcttgaatgggaagggccgggattccgggtcgctctggcccctccttcctccggagccagccagtccctcggcagagcgctggggctgcactgatttgctctcgggagtgcgctatttgcatatgacttgcccatttgtgaatttggctccccaactcctcgcttcacttcacctgtgcctccctggtccgcgcacttcgcaggcgcccgcccgcctctcggccacctctgcagcctgccaggcacctcctcttgcgctctcgctgatttcgcccacccacctccctccaccccgtgccacgttggtttgggtggctgctccgcaccgggttcctcctcctctcctctttccctccagtccttcttattctcttcctctggctgcggtggctgctgctgctgctggttttcatccagttgggaaacccaggaagccggcggctgctccgtggcgctagtccagcacgcccagggttaaaagcctcgcgcccttccgcggagactcccaggaacacccgaagaactcttccacctgcagcccccttttgcctggcagttctgcattgcatctcatggaagtggaaacaggaaaataaaaatgttcaaactccttggatgttgggataaactcacctgaacccacttgggttcgggctgcctccttctcttccttcattgccacctttcctctgtgtggctcccgggagtgtgcggttaagtcatcagactcgaagtgcctagagatccggaggaagccgcgccggtcttcccctgacatgcgtggcatgccggggctccgtaggaggtttgctatacctgggaggaccctggcattctaaatttcagctccgggaaagagaaggggctttttgccttttatcttttttttttctttctttaagtagtaattttttaactgattcattgtttggaaagcgcatattgcttccctcttccccgaattctggcaactcttcctcctgctatgatgggcccttgggcatcatgaacttcattactcctcactggctggaattcaaactgcccatctgtagtggtcccgtgcgttgaccatgcacctgagaatccacgcgagacggagccctcctcgccggccggcctggacgcttgggatctggttcctgttctggggatgtatcgtcagctctgtatggagttcttctaatgtagcttcctcctcctccacctcttcctcgccggggtctcactctcagcacgagcaccatttccatggcagcaagcatcactcagtgcctatttctatctatcgttcccctgtttcccttcgaggaggacacggtaggtctctctgctctttatccttttaatggggcatagcaattcgctaacccactagccttgcaggtagtgtcaaaggtgggaagggaatttaaaaaaaatgaatttaaaatgatgaaaagcatcgtatgtccatgagggaagcaaatttctactttctcataaaggttagtgttttctgcccctagcctccgacaaccatctccacttttctctaaagggttcttttccccttagctccctcattcatagctgcacagacaccacactctctcttttgcaaccttctactctctccacccccacggagacaggcaacttatcaggtgagtcccagtgctgtacttggagaaatattcattcaccttgctttcacccttctttgctgtggtcttgcttgggagctagtgggggtggggtgggaatagctgacaacaggaatcaggttttcagcctgaagttgattgaactgttataaagtagcctgtgtggtaatggtcagggaaaagtagccgaacataagaaggcagaaaatataattaacaacctgtggccatttgtgttgaatttggcagctttatgtttgtccacatatctagtggaaaaagcagctatctctaaaactacacatctactattgctatcagaaaggaagcaatatgtaagataaggctaagttcatttataatttacccaagtgtaaatgacagtaacttggattccccgtgtatgcaaatgttatttcatctttaggtagcagagatgggcttgttcacacaatacaggtacgatgggttttactccaaacaaccctccttacatggctattgagggaagagatctatggctctgaaaatgatactcagctgttagccggctgcctctaaaagggcgatgtctgcagctaaggtaggagcttgctgtggtaaactgttctaaagaaaggagcttcttaatttgtttactatgcactccactctgatggtaaggagagtaggacacacagaaatggagactggtcttgcttgggagctagtgggggtggggtgggaatagctgacaacaggaatcaggttttcagcctgaagttgattgaactgttataaagtagcctgtgtggtaatggtcagggaaaagtagccaaatataagaaggcagaaaatataattaacaacccgtggccatttgtgttggttttggcagctttatgtttgcaggaacagccctccagggaacatgagcgtgaaccatactagggggttcctgcccttgtattttgaagactgataacatccagaccctatttggaaagttgattcttcctgctgcctcctagccctgagctttggctttatgctgtctgtagtgtaagtggaagcacattgagaaaatgccagcacatactctggctctttttgactctgtctttaaattttatttgatggagttgtcaagcagctcacagcttgtaaggttggtggagggggatggtgaaaagaagggattgcttgatcttgatctggtggctcttttctctgtgactcctgctgggtctggtgttggctcccttaaaaaagaaagaagcaaacaaacctaggagaaaaaagagccacaaccaccaaaaaagcaatttcattgacatggaaacttagctcctaagggggagagggactggggggagcgggtaagacaggaaaaaaagagggagtgggagataggggaagccagagagactgttactaatagccataattaaacacggaaatgctcagagattagctaaattttgctaattactgtaaatgatcagcagggagaggaagattatgcattacaggttatgggtggcagggtcttgatatcttttgttcgggttgtaaacagttacagcagatactagtaagtgatggaatttgcagagcagtacttccctagggtccctaagtcagagtcagtctctctctctctctctctctcataaaggggttgagccttgcacaggttaaacatgaccctttatttagtttatttcttcaacgattggttgctcagtctcctttaaatctttttgactggtccccagtctagtttctcattaacctacatctgataaggttcagtgtgatggaaaataagaagaaagtaagtaaatggctagagaccccagaaaaggccctcagactcaccagagctgtagagtacagtgaactccatccagggtctggcatggctgagataagaaaactcatgaattcagctcttcagaatcctctttcaatcctgaagtcccaactcattgatttggggcttggagagtgaatgcatctgtattaagtagactccttgcatatttaattggtgtttttgagcataaaatcaagagaagcagcaatcaacaaaatatccctacctctggcttccatcctgcacccaagctgtgaccctttgcgtctctaactaaaaggaccagaagaccccacagagctttgctaatgcacttctcattcttacttggtgtacacttgctttttcctagtccaagacaaagacctagctaacagcaattgttttaaaaaatatttttggatggaggtggtaggaggcatggcaccaagagactgatggttgttattgatgatttactgccaatcttattccagagttaaaggcagcactctctgttgtctgtgaaaaagtaaatgcccttgattttggtatgaaagaaaactagagccttgagtccaagaatcttctttggacttaagagattgttgtttttttaactacacttgctcttcccttgcccatttcctgagaagccaaagtcctcaaagctgctgttcatcagttggtgctcccaccccctttctctactatccagacctatagagagattcatgctaagacagatggaagaaacagaaatcctccaaatagctgatattttacctacacttttgcctgtgcttggttccaagctttagaaaattggttatattatagatttgcttaaagcctttatcccaggacagcctagaggatgctgggattctttgtaaattagggagactaaggccacacttacctggggtgcccccaaaaaatctcacattaggattgtgtttcaggataggattaaccttcttcttaatgggaatctagtaggctcttccccattctgttagagtcctcaccccactttcatgctctcttctgttcaccagtcagtcaatactctttgagcacatactctgtgccaggctgtgggctactgctgaagatacagaaccgaataagacattgtggtgttcagctaggaataattgcaaaagtatatatatatatgcttccatattttaaaaagtgcaaggagtgggtggagatccaaataccaagcgaaattaatacaaaatcaaaatatcctttataaaatgaaggtttacattatcctgttatttaaaatatccctccaggttccttttcatccttggctttatttccatatgtaaatatcattttttatcaaagtgcaaggtagtttagtgattacagatatataaatagtaaaatatatttgtttaccaagctttaattacataagcaacttttgtatattttttccttctttttttccctctctctcttaaaggtcattggacctttaagaaatccaatgtgtctgggcatggtggctcacacctgtaatcctagcactttgggaggccgaggtggggggatcacctgaggtcaagagtttgagacctgcctggccaacatggggaaaccccgtctctactaaaaatacatatatatatatatatatatatatatatatatatatatatatgtatctccaatgtacatctgcctaaaaaatgcttcagtatttatagtttaaatgcaggtttctctaaggattcaaggttttatatgtaccttaaatgctattctctataaaacagcagactttcctgcctctgtagacgatttgtggggactagttgaggacatggaactcttggaaagctcagttttaaaagggaacacaccacgctatatttgcaggaagaactcttgctcagaaaccagggtgtgtgaaaagggggagtataaaagtcctattcaaaccatcttagcagaagtggtggtgatgggcccccttgtgacacatgatcctggagtctttcttggactcattccttgtcccagggatccacccccaaagttttttcagccttgggggcttgttttgctttgatctattgagtgccttcttctgctcagccagctgctttctaaccactttctttatgcctgccttcttgagattcagggagttgaataattcatagtgttggttgacagatcaaatgataagatttatatatctttggccttggtgatgaattaattagattggtttctccatctttggctcctctagatgcgttgtttttcttctttaaaattcactggtgagtggtgggtctggagattaacttgttcttgagagaccaccataggatgattataatatcctagtgtcaatttcttcaggactttcaacatggatcactgggtggtgtggagtaggggcagctatatcatagagaggagagataagatcatcagaacaaaaaacaagacgcacacacacacacaaaaacttgccgatactggctgcgggatgaaattttacagtaagaacttgattgctttcacctcagattttgaatctaaaagagaaatgtatttcattttacattttagtaaatgaacttatcagcccaaagaagtttgctttactagaactctgggtgaccagggagggaagcaaatctctgaagataaatcttgaacttactcatactttcctccttgtattagtttgctagggctgccataaagtagtaaagtactatagactgggtggtttaaacaagagaaatttgtttgctcaaggctctgtagagtaaatgtctgagaccaaggtgtcagcaggtttagttctttctgacatctctctccttggcttgcagatggctgttttctcactgtgtcctcatagggtctcaccttgatctacatgcatgcatccctggtgtctttgtgtgtccaaattctcccttcttataagaacatccatcagattggattagggtcctccctaaaagcctcattttaacttaatcatctctttaaaggccctgtcctcacatacactcacattttgaggtaccaggaataaagctttgacatatgaattttgaagagacacagttcagcccctaatgctctttctcctcaccgtgcgctgccccccaccgccccccaccatcccccgcccagttattgggaaagaagtaaaactgtactgttcagtgaatacccattggactcaaactttcacagcagaaaaataaaacttcagtgacaatggttgcaatttacaaaattcataagatagtgccctaagaggtaatgttgtgtttacagatatggggaaaaaaacagctattggttcagtgaagacttgtgttttctttcttctcagtttatcttctgtgactgagtccagatctttatttgcacatagactaattctgtctgactgcagacacatgctctaatgtccacacattaaagctttctttacctagacctgctacccttctgacccagaccctccactcctgccactgactcctttatgaactacagttgtttgctctttgcctttcctgaaacacaaattaccaactactttcacatctcagcctttggtgaaaacaagagaaaaaataggttaactaagtataaatttctcgtttttcaattttcatatttctcaattgaaaaatatgttaaataggcatcagtttaattatttttctcttcaattttattttttgaaagttcatctgaaaatataaatatgaggtaaattgtctacttcatgacatggttatgaagcttggtgagatgattgagagaataatatatatatatatatatatatatagtgtatatataagttctggttgttctaaatcctaagcaaagcattccatctttggggaaagggtatacctttctttgtctgtttgtttctgtgctcaaaatgcgtgctgatgttgataatagataaataataatggcattctggtggacagtgtggtgttaggtgaggtgggaacaactatggttggaggaaatagccttcaacctcaacctttggttctaagaaactttgtctctaagaaactaagttactaagaaacattgtgaacttaagtcacaatgaataagtcacttggtttcactgagactcaatttcttcacctttaaagtgagcaataataatagttaaccatacttatatcacagaaattgtatgagagattaaacaagttgtattttgtacattctaaaccaatgtgtacaggttaaatattttatgagacatattttcatgataaggctgccctctttgaattccttgcacaaagaggagcttcaatgttgatcatttgctggttggtagatagtggttaaagaacatgcatctgctggttctcctcattttcctatctatacatacacttttttgcctcctagagattatttcatttacatagtactctgagtaaatgtagatgagaaacactttactgtattttcatgtttatggcactagaacacagcatgggacaaaagtcagcttgtgatttttggtaatggtctgcttaggtagaaagtcatgccaggcaaattttagcatggaccaacacattatagcaaatcatttagaagctcagggattcagtaaagtgaaaagagaggactccaagaaatactctgagatcattttggaaattcagaattggatcccatttgcagtaaacctgtgcagaattcaaacattcctacatggttctcagtgtccattgtaaactaagatttttaatctggtttgtgctgggaagaagcaggtgtttttagggacaactaccttcagatgtggaagtgaagtacttcttttaatgcaatttcttaggcttactagggctcaaagtttgtagagcagataggagcacaatattatgccagaactcttagaattgactttgtgaagcctgaatttgaaacagaattcttactgagagacatggtcctgatacatagattttgccccagttttctccctgaccagctctgtaactttgaattataacattatatttttaaattatattcatcttttaacttttagacattctgtgtgataccttgatttcctaacctatattcttggctttacctgtagttttctgcatggcatgtagtatgaaagctccttaataccatagctggggaaaactttccttttcatatcttcatcatttgtacaatgagagatttgagtgagatgatctctccaaatgttttccagcactggaactgcatgagtctctgatttgtatgtctttaaagacaccactgtgcatcttaaacctatctgagttccacaagtctgccagtattttataggtctattttcttgactatcataataacttatgccaaagccataagccaggttttctcttttcccctcagacagaagcagcataatgtaccagagtggcacactgtgatgttataaagcccacaatccaacttcagtgcagtcacgctgagatgggaagaatgcagctttcatttaaacacaccttaataatgctagaaaggagctctatgttatgtttaaaatattctgctgtgtttagccatatcagagcagggggcagactagcaactgggtttataaagaggaaatggtttatttctatttacagttaggattttgagagagacttgcttgagttatacaccaacacataatgtacacccactgtgtgacaggtactcttccaaatgctttacatatgtgacttcatttaatcctcactagcctttgaacctaataaagtgactattttacgattaaaaacattgagactcagagaggttaagtggcttgattaacatggtgttaaagccaggattcaaacctggttgtgaccagaaaactcttggtctttctgctgtaccacacagtctgtcaactcaggaaacagactacacaaacacatcaagctcttttgtcaggaatcaagtacacagattgatgaagcactttgattaatgcagctaacacacctttccaaagcatctacaagactttccaattcctaataagtatttgaatgttttccaatctgcctgaacccgtttcaacccaaggagatagtaaataaaaggagcagactgatgaaacactcacacttgatatgtctttttttttgaatgaatgaatcaatgaataaatgattgagtgaggttccacatgatcaaatctcttgcactaggaaaggagggatgctagtttataaaagaagcaaaggcacaggaagttatgcacccttcaaaagcacaccaatgggctcgtagaacttagagatataagagagctcaatgttccaggtaggcagggtgaggactcaactaagagcatccagttagtgtcaggactggtcaggagcacagacatcatgactctgagtccattgccttttctttcctctacttctcagtccttcaagacactttcttaaattacaaacttgttccccatctctctttcttcagagaaatctccccttatccagattatgtcctgcaggcacatattctgccagtgttggacttgccaggccttccattaaaattaattattggctgggcgcagtggctcatgcctgtaatcccaacacttgggaggccaaggtggctggatcccctgaggtcaggagtttgagaccagcctggccaacgtggtgaaaccccatctctactaaaaataaaaaaattagctgggcgtggtggcatacgcctgtaatctcagctactcaggaggctgaggcaagagaatcacttgaacctgggaggcagaggttgcagtgagccaagatcacgccattgcactccagcctgggtgatgagagagaaactctatctaaaaaaaaaaaattaatcatgagaatccttctaataggttcctggctttgtgtgccaaggtagggtttcttggtgtgttctgaaggcttcctttgtataggaaacctcagtgtgaaaaagtgctcagattcggggttctgtgaaagatgcttcctgtcctggttggatgtcacttgccagaaggcaggaaagaaatggcctgtctgttcacctgttgctgctcctcatctggaagttgtgaccaggatcttgtttgaagacctgtccccagccccagtcctgacctcttgcttaccagctattgagtggctatgaaaacataaagcccctggaaaccagcaagccacattttctgagatactgtcctgccctcccttttttattgttttgaaatattcctctcacccccccacgttaaaacataaccatgtgtattcactcctgagtgactttcccccaaactatgaatttcaactatttccgaggcagtcgttcagaatttgaatataattacactctttgggtgaaaattgtggtttttgctacataaaaaactaatggaaatgatctgcctgttcctgtagtttacagattatatgcttcagaactgacgatatatatttaggctgcttttctgtgtggcacatttaaatgaaaatgaactcggggtgagccaccatggttgctaggcaatagagcgggttgatagagcacggtattaaactgaacccacattggtgttttacttaacatctatttgcttagcacctttgtcatctgtggtgtcatagaagggaaaggaggaggagacaggcagagtctggttatctgcagagactcaaacaagtaggagaaataatcatcccaaacaccaaagtgacatgagcattttcaaaaatttgaggttgcagcacagtcaactcatttaatgaagaacatgcaagacctgaagaaatgcataagcatagcagacatattcatggatgtggtagcaagaggaactaaagagattccccaggctgggttttgctctggtggttccagaaaaaaaaaaaaaaaaaaaatagccaccacgctggttgaaaattttaaaaatgcgtctatgggtcatttaatttcctggcctaaaatcccagatttatcatgagcaagcggtgataggcagcaaaagcattgcggcttctttacaattgataactaatagaggaactccaattgctttgaaaccctggttttaataaaagctgaaagtctcttataagaaaacaactggatcacaataaagcaaaacctcgtcagactctttgggtccattctagccactttctgatacatttaaaagtttgaaaagatgattaaagggttaaaactcagctgtggggagaatttggtctcatgaataatttgggcagagagaggatcctgtgatttggatagccaaagttttattgtttattttttccaggagccaattattatatatcttttttcattgaatcaatatctctgcataatggaatggtcacctttgaatgttctcttttcttaaaacaaacttcttagataagttaaacacaagatgataggaaacctctattttcataagaatgacaataacatctactttggtttttattatagcaattgatcactttttattatgcctaacatttttgcctttcaatatgcctgacatttctataaacgttatagttcatttaattctcccatgaagtaggtggagttgttttcccattttttaagttttagttatttattttagcagagatggggtcttgcggtattgtccagaccagtctcaaactcttgggctcaagtgatcctcccaacttggtctctcaaagtgctgggattactggcatagccaccatgcccagcccattttcccactttaaagaggcagactcggaggcatggaaagtttgagtcagttgcctaaggtcttataggtaatataaggcacaatcaggttgggtatttaagcagtttgaacctgtcctgttcaaactgcttaaatacccaacctgattgtgccttatattacctataagtatatactgaaattatactgaaaacagtatactgaaaacagtacaatatttcataaatactcttaaaatttcagtatttatgaaatattacctgaatggtgggaaaaaatttcaaagtggtattcttaaatggaatactgggccatttttaaaaggacctcttagggtctacctagatacaggataaattatgaagacagaatattttctaaacaggtaaacacctacctcatatgaggtattctaacaaatactttagcttactgcatttaatctttactgaccatccttcaaggtaggcactattgttatcatgaatttacgggaacagaaactgagccccagagggttaagcaactcactctagttcttccacttactaagcagttagcctatagcatctgttgaactcttaggtcaggtaatctgtgcaaatgtagaacagttcccggatactgaaagcaactaatcagaatgcttccctagattcacaaattctattacattataggagaggcttttcaaaacagcctttggaaactcacaccagttccagaatctgctggcaatgaatagttacatctttacatcttcaatcaaggacccaagagtgagggaccccctctcctttgacagggaagcccattggtgcctcattctcctcatgtttaattcactctaagaatccgtttttttcaggaagtttcttttccagtaattacgataggctttctccccaacttatgattttaggcaagcaaccaaactttcctgattttaattctctcacctgaaagacagggaactgtgaggtggcctgccagctttgctttcaaaagtgtggcattcatctttcattaatgccaaaaggcaaaattccaatgatttctaaaatacttcctcacccttatcagatcttattagatcaccttgaatctacttttaatcttggcccttcatacatatggtagtagttctttaaatatgagggtgaaactaatgaatacgttaagaggggcagtgggtttccaacttgagtgaatatgtgtgtgtttgctttcacatgtaggtaaatgtgtgaaccaaaataaacgatgtaacagaaaaccttcatagcagcccaattagttcctagcttagaatgtaaagatcagacatgagaactaagtctgccgtgcattacagacgtagggaggtttcagtacctgcttcttactgctctggtatcatttatcagtgcagtgttgtcacaggctcatgtcaacatgtcaataataatctcaggagaggatagcttttatgtgaaataggaaggtaaacctagagtcttggccttatacagacaacccccttctttgggatgactagtgttttcatgtttcttgttttttccatgccagggagccattttatgtgtgtgtattggtaacctcatcaactgttagctattaaagactggttaaactaattattattaagaactctctttcagaaaatcctgagatagttccttttacttcccttcacaaagtaacttgatattggtccctgagaaatagatccacaacctcatcaccaagttctccaggccctgaggaatgatcatgcccctaaaataatgttctgatgaaggactttctttggactcaaaatctgctttgcatttgtggaatcatcaaatgcgaaacctgcaagaggtctttagaagcccttttcaatcaagttatttttcatgtgaaaaagctaatagaccagaagtttgtgaatagttttcccaaatcacacttttcaaattagaggcaaggcgagggcaacgtgcaagctttcagcttcgctgtttagtctctttctagtctctttctactgcatcacaatgttagcactcaggctttccaggtgtcatctgttttgctgtggactgggaaactgggattgtctccagcaccacttggataacaaatgagcacagaaggagcagagagcagcatgacaaccaagatactccaaacactcgcactgtttcctgtaattaccatccagagagcagctcccactccgtgtcaggcatgtcaccccctcacggggtctcctgctttctctctgccccagcagcctagaggggaaattcagcatgctgcatttcaatcaaactgtttgatgagagcttttgagcctaattacatggaaggttttatccagtgaaaagaaagaggaaagagaaagagagaaattaaattgaagtataaatcagtcaagagcttagatcccgcgcttgctttctttttaatcaagagtgaaatgagaggagagttttaaggatcatcacaagacaccattaactacccaaggagctcttggctgaagatggtttgtcataaaaagaaaagtgtacaatctgtccataaagaggaagtatctgagggtcgtgctgcagtttaggagcatgacactaaaaggaaggacgcttggtttttccgtgattattttatctttatttcccctagatacctagcatattttctcgcacacattaggtgttcttgttctgtattttaaatcaatgacttggtaaataacgtagtgtgttaactcaggtaattattacataggaaagggtatgttatcaactcattcaatattagatacaacacatgaaatcagtattcaaagttttggccagtttccctttgtggttgatgtagtttgggcatatccctctaatattactgttatttatagaatgctttacagtgttacagagaaaattcacggtaattatttgatccacagcacagccttgtgtggtaggaggacaggtagtatgattgttatttattccatttttttaagctgatgtaatcaaaaccaaagaagcataaatgacttgatcagagtcatccaagtattaagtgacagagcaataactgctacccagcttctattacatcaccctgtatgacctagaatcttgtacagaatttctgggttcttcagtataagaaggataggtaaacagcagagaggagtgtttgcaaaagaaatgcattggaattcatactttattattgagtacttatgatgagcaatgcaaggcactggtccatgctctgaactggaatgtgaaacatgagctttgtccccaaaggcttacagtgtggttacaattcattaaaatgatacttagatctatcctttccatctctattgcattttcaaccatatcacctaaacagttgtgacaacctcccttaacagaccttccttagcttctgtttttccctcctgtccatgtttccctcaccattggagccatccatctgaaacaccagtctgatcatgccgctcttccatgggctcttcgtgtcatttcctctgtactcagaacaaaggctggccccttatctttatgatctggcccctgtgtatccccaacttcacctcctaacatatttgactaccttggccttcatctttttctttttccttttttccccccttgaatatatcaatcttgctactaccatagtgcctttatttgatcagttccttttctctgggatgttttcatccagattgccgtatggccactccttcttcttatacgtcaggcttcaacttcaatgttatcccctcaagagcccttccttaatgacccagtctaaaaagcactcttttttagaaggatcaagattatatgaaaaaatttaaaaaaataaaaaataaaaagcactctttcaaatgtctctccagcataccaccttgttttgttttcactgtagcttgaatatctctgttacagttccttatgtgtgtattgcttccattaacccactagaatgaaagttctgagagcagagaccttgctgatcttgttcatggctggactcccagtacctaaggcagtgactggcaaagactgagttttcataaatcttgctgagtaaagggatggatgaataaatggcatagatgcttcacaaatatgggctcccacctagcattttaacctcaatactcagtaggccctttaaaaacatcagttttagtttgtacttttcccttgattgagaatctctcctatttggtagactgctactaatttttcacgttgcagctgactccataatatctggtctgcaaagttttccctatctcccactgcacagtgagtttcccagccttctgtgtttacttttttcgctatagaagttttctcattgaataacaaaaattattaaacatatattcagtcttctactgttttccaggcactgtccagggtgtcagactcttaaacatacatcagatttgggccttgcctacaagaggttcacgccttggtggaagagctcactctcattttattaaacatgtaacattgcattgctgttatttattgatggtgattgttttcctcattaggctctgcctttcttaagggtaaggaatgagtcattcatttctatattttgattggctgacatagttcttcttttacaaaaggtgcttaatggcactcattaatgaaaaaatagagtgagtgggctgaaaaggtaagaacatacagtattttaatgcacgttgtagtgtgacaaacatcatgagataagtagaaactaccgtggggatttagaggggaagatgtcacaaccaattaggtcattaaaaagtgcttcatagcagaaataaactttatatcatgttttgaagaattatttccacaggcatgcaggagatgggctgaaatatacttgggaaaaaaaaaaaaaccagatgttccagaatcagtgactccatttgctgagttatgggcttgtagagctcagttgtgagaagggctggtgaaggagtttggggctctttgatggaggacgttgagtaataactataattataatggacatctttggcatttacagtttgcagatcagtaatgtaaatactatatgacttgtccctttcaattgccctgtaattcttttatcatgatcactatttacaagagaaaaaaagggtcaaggctgagaagttgatgcttaaatcttataggatggtgctgtatcttttcaaaatgtaaaactggttttgtaaatccctggcttaaaaagataaaacaaaagcaaataaataaataaattaagcctctttcttcactgtttccagtgccctctaaatcaagataaaaatgtttaatgtggcctagcagttcctgcgtgatctggcatcactagcatagcacgtttagcctcatcactcaaaggtccttctgccttcttgattccagcgccctggccttctcccaaccattcatattcaccactacagacttgcctttgcttatcctatttaagcagaatcctcacttcttcctttgatggtcacctactcagaactaagaactcttctttagtgtagcacctcctcaaggaaatccccctgccatttctttgagaaattcaaattcccaggccataggttctcataaccttctagaactctctcctgttgctcatttcacaattcctttttatacatttggttgtgagattatttgattaatatccatttcctaagtagattccactggggttagacagggttgttagaaaataaaaatgcaagacagccaattaaatttgtattcagataaataactgactttttaaaagtacaggtatgtcccatgcaatatttggaatatacttataatttaaaaattttgttgtttatttgaaattcaaagttaactgggcatcctatattttatctggcaacctatattttatctcatcagagactatatctgtttttttcttctagcataatcactggggttgtaacaaacaggtaatcatctaatgttggatggataaataaaatgagtttaaaaaatattctggcagcgcatgtaggctgaattggaatgacaagagactgaatttggaaggactcattagcaaactttgaaaatcatcaaagggaaagttaaggacagggtggtggcattgaggctagatagatggagatgtatagaaggaacatttccaagtggggctcagaatttgcacaggtgttattgggtagcaacccagcactgcgaggaagaggccaaagggccatttcaaattattagtgatcaggattaaaaccagtaacggagagaaaaataaatataatgcctctcatttatatagtgcttcacaacttttaaagtgctgttttatgttccccattatgccccttggtaggagagtattgtttctaaaaagacagccatttaattatcacttttctttataaattcaattacatttcccagtccatgtagttcatcagttcagagatgtttgtcttcatttctgtctattttttaacaggtttcttttatttaagttcctcatttctcagtcctgaatcctttatttctgaagcaccaggtaattttgtattacgcataacaaatctgaaatttatttgtatgagcagattgattttatatccatcagattttctaaaaatgggctataactggcttataatgacatgaccagccagaggctaatttctgtggtatttcttcctgatgccagaataggtagacaagtcagaagcacccacttcagataataaagatataattccagttattcaaatttgtgttgaaagcaaatcctttcactgcttatttttcaattagtgccaagtgtggctccatggcttctagctacagaaggccaggtgatcgagcattcttaaccagatacatgaatagggagaccacggttctgcagttgacatttcttcagctgctctttcagaggtcttaacattttttctcaccagatacttgcctgtgagctgctatttgaaagataaggtgtgctgagtaaatgattaagcaagtgagacaataagaagcaacgtaatctcatcagagactacatctgtttttttcttctagcgtaatcactggggttgtaacaagcaggtaatcatctaatgttggatgaataaataaaatgagtttaaaaaatattctagaacaggggagaattctagaaggttatgagaacctatgttctgggaatttgaatttctcaaagaaatggcagggggatttccttgaggaggtgctacactaaagaagagttcttagttctgagtaggtgaccatcagaggaagaagtgaggatgctgcttaaataggatgagcaaaggcaagtctgtagtagtgaatatgagtggctgggagaaggccagggggctggaatcaagaaggcagaaggacctttgagtgatgaggctaaacgtgctatgctagtgatgccagatcacacaggaactgctaggccacattaaacatttttatcttgatttagagggcactggaaacagtgaagaaagaggcttatttatttatttatttatttgcttttgttttatctttttaagccagggatttacaaaaccagttttacattttgaaaagatacagcaccatcctataagatttaagcatcaacttctcagccttgaccctttttttctcttgtaaatagtgatcatgataaaagaatcacagccatgtagaggacgaaatgtgagcttttaactccacatacctgagtgtcactgatcactctctcagtaggtcacccagaggttagcaaacttttcctgtaaaggaagagagtaaacatttccagctttgcaagcaatatagtctctgcctcaacaactactcaacactaccactgtaatgtcaatgcaactacagacaatatgcaaacaaatgagtgtgagtatatcacagtgaaactttatttacaaaaacaagaccacctagtctgcagacccctgcccccagatttcagcttcctgttatgaaaatggccattataaaacctatatggcacagttgttgtgattaaacatttttacatacccaaaaaacttagtaaagaatcaggcatattaatgagagttcagtaaatgctaacctgtatcatgattataagttttagggctgcaaggaatcttgggtgtgacagacaattttctcctttcaaaagatacctagatggaggattcaagaagtatagggacttaaccagggttacaggatctattttcccgcaatcctatttgtataccacttccagaaaccccaagaaatatgatggcatgaagccaagctatatattgcgggatatttgagcatccattcagcatgtatgcattgaatgtcagccatgtataagacattgtgcagtatattgcaagtgacacaaagatcaataaagttcctgcgttggaaaatctaacagtttaagtcaccctagtaactataatgaggtggaaagcgacaagtatcaaaggaatgagtgacccctacgtgccaagcactatgttgaagtgcttacatgtgttgtctcatatgatcccccagcaggtggatttttagcatttcatcctcaatgacattcaaatgttaagtaatctgctctaggtcaaaagttactaagtgatagaacaaagatttaaactcgtttctctaattgcacagtgtgctttctaccagacgctggggaaatcctcatacatgaagtatggtttagttagctattgctacaaaacaaacaacactaaaaagttgtgtttaaaatgggcatgttatttgcttgtgattctgtgggtcagcagtttagacttgactcagctgggtagcttggatgatctcacatgaggtccctcatatagctccagttatctggcagatagacgggggatgatgatggtctaatatggtctcacacacatatctgccagttggttctggttattaggctgaggagcctcacgtgatatctctgtgctttgtgacctctcatttggctaatgttgactgcttcacttggtggtctcagggctgcctcccagagaggtatataacaggagcagcaactcttgagagcttggaaatcatacaagaacactttcgctgtattctgttggtcaaagcaagtctcagaatcaggctagattcaatgggcagggaaataggtgacgtgtcttagtgggaggaacagcaacatcatactacaaaagggtgagcgtgcaaggatgggagggtttcttgctgtgtttgccaacaatttaccataaagtgataactgagttggaccttcacagaaaataaagatttgggaaataaagactttgccagagcagggattataaagaagagcattacttcagattagctgagaatgaggccacacgcctatattgcattattgaggaaatttcctcttgcctttgctccacaagcacattgcttctactagttgcagggacataattaccaatttcatatatataatacttctaacttttcagaggatttttatttctcctatataacgtttaatatgctatatagttttgttgcattgttttactctgctcattcctttcctctctgtaagttggtgtcgtcattgcaacaaagcccaggttcccagctcacttcccaaaagacaatcatgtggactatctgctgtgattgactgtggctgagtgtttgccctggcagcttttttgttgctgaagatgaaagtttgatggactttaagatggaaaggaaggaagaggagaaatttgatttcatcggcagctgtcttactcatcttcattaagatgggttgtggacacttcaaggccattctgaaccagtggtcataaaactaataggtgccactcaacctgcgctgctcgtattattgcctgagacctgtcatctcggtagttattgcaaaaggagaaggaatctactgtagggaacacaatggtccttgtgtgacagaagtgaaactgaaagaaatagatttttctattagctgcaaatcaaacccttgcacatcatcccttggaggtgacagtgcctgattctctaaggcagggttcaaacaaatcatttgggcttgcagaaaataatatgagattaatatccaagtgtgtgtgtgtatgtatttgtggggtgtgtgtgtgtgtgtgcgcgcgcgtgcatatatgacaactacgtggctcctcacttgaagttttggaattagctactaatatatgtgtatgtttaagggatgcatttgtggacttgaagttgaaatagggaaactgagatgtattctgaagagggaaggagaagagggaatccagtcctgattaggggaatattgaaataagtaggtgaataatattcagtctcccaggtttgtggctatgagctcttttcttccagaagtatttgctgaagggagggaagaaaacactccttttcttctgacaatcaaacttttcaaatgtcagcatgcatgggtgtttctctctattcttgaggctcctttttgtttcagtctaacacctcacatcctgtgggttgtaataataatggtagcagttaccatttattaagcccttgtcatatgccaggtgctttacatatattacagtgtttgtaatccatacaagaattattacaagatagatatcactatgcccaggtgtgttagtccatttgtgttgctataaaggaataccggaggctgggtaatttattagaaaaagaggtttattgggctcatggttttgcagactgtacaagcatggcatcagcatctgcttggcttctggtgaggccccaggaagcttttactcatggtggaaggtaaagaaagggcaggtacgtcacatggcaagagaggaagcaagagagataggggaggagttgtcaggctctttttaacaatcagatctcatggtaactacagagtgagagctcaatatttcaaggagggcatgatatggttcgactctgtgtccccacccaaatctcatcttgaattgcaatccccatgtgcagagggagggacctagtgggaggtgattggatcatgagggcagtttcccccatcctgttctcatgatggtgagttctcaggaggtttgattgtttaaaagtgtgacccttcccctctgtctcactctcctgctgccatgtaagatatgccttggttttccctcaccttctgccatgattgtaagtttcctgaggcttcccaagacatatggaactgtgagtcaattatacctcatttctttataaattacccagtctcaggtagttctttatagcagtgtggaaacagaccacacagaccaccaagccattcatgagggatctgccctcaggatccaaacacttccctccaagccccacctccaatgttggggatcacatttcaccatgaaatttggaggggacaaacatccaaaccgtatcaacagggaactatagctcagggaggttaagtaacttacccaacaacacacagcttatatgttgcaatgtaggaatccaaacccccaaagcttgtgccctcctactgcgctaccctgcctcttccaggcttggggctttagggaatgccctttacaagcagtataaagacgcatttaggaatttttcaatcagctcttgtctagatcttctttggaaagtcttcttagttactggcaggtcaaaataccagctacttgatctaatagtgttatcagcaagaaactaaaaatcatgaagcaatgcagactttttgaatcagataggacttactaggccatcttgtgattctaatctaacatcttatctggccactttttctgccttgtgcaggaagtgaggtctggataggtcaaagggcatgactagagcattggagttaatgggaatggggaatgccttctttgcttcttgacatttctcctccacaacactgcacatcccttgtgaaataatttactattttttagacatcatgtcaaagactgaagtgaaagccaccctcttgtgatcaactgaggtcagaagttggcaaatttttttgttgggggtggggggctaaagggccagataataaatatttttggcttttcacaccagaaagatctccattgccactagtcaattctgcatttataactgagaagcaaccacagacaataagtaaagaagtgggcagcactgtatccagtataatattatttacaaaaggcaaagagggctggatttggcttcccaatctctgccttaggcctttaaagatatagcttccctggggaaatctctacactttgagatttatactccagtactaataacatagtaagagaatagtaatggtggtggtaataatagcagtagtggcatcagcagcaacaacaatggcaccttttaacatttgcttaatacgttaaggtttacaaagtctttttacaattatcatctcacataaaccttttaaattcctactcaagaactacacaagcaagggaaacgtgctagctgagcagtgtggtacaatgaaaagagaatgggatatactgcatttagtcatagagattggtggtgtgggatgaaaatgcctagagagtaggtgtgtgtctcctggccccattaggggacagttcattcagcagcagggtgagtgtcggagttcccaaatacatggctgctaatcagttccctcactctgtaggcattttgcatttaaagctgtccagaaaagagaggcttggtctaagaggttgtggtgtaagaaaatctctacatttccacccattgccttttgggatccctgtatgttagtgagcaacagtaaaaagtgacctgtgttaaaaaggtaatggaagcatggtacaattttagagttcatttgagcaaacagagattcatgaattgggcagctccaaaccagaagtggtatggggattccaatgaagaagtatgagaactaagctattataaagagaatgcagacctaatacaaataaaatatttgattgattacagttataaagctgtctttgctgggaaattcctagttatgtaattataagtgtgattggttgagcttaagttctgtttgtcattattataggcatttacaagaaatagctcaagttaagttctgctgatgtttgcaattcaagcaagtctaaggccacttatgaggcctaactggctctgtctgctcaggaattcttgcaccattgaagcattcttcaaggtctccattttaatttagtttaacacctcttaacaccacgccttcaataacatttatttaacacaggtctttgcttcgtgctaaaggcaaacatgtatatgagactctgtccctaaagcatctgtaactctccaaagacatacccctaggaacatcctgaagattctgaatcttgcagcctgccagaagcacagcagtgctgttggcatctctagaccactgtctgtgattgacttctggctctgctacttgtcagctatgtaaccttgggcaagtttctttttctagtctctttgtcatgttcttcatctgtaaaatgggtattttttaaactacccatttatgtagtctgtgatgatttaagagctaatatggtatgtgtagtggttatttatgagctaatatgtgtatattagcttaatgcctagcattcgtaaatactcagataaatgccagtcattattattatcataattgctggtgaaattaacatacaaagtcctgtgcaaaccttaattttctcactatggacttcatacattttcagaatcctagctacttggttctcagaacattcttctaacacctagagattccacagccaatgtatctttgggaacttattgactaacacagagctaaatgaagtaagcagcatttgtaccctgacattttacagatggaaggaatcatagaggtcatctcagccagaaacacattttcaagatagggaactgaggttcatagaaagtaaatgactttgccaaagtaatacactcaggacagaatgagggctagaaccccggggattagtttttttcctctggcctcaaaactcttccttctgccatttttaacttaccaatttcacctaataccttccacatatttttgtgactgtttcaaagattccactagctaccatagaagaagtaatgaactaaccttataattccatcccagtggcttcacctcacctgccctcagtttcctcacctgtccagtgaggcaaacttacattggaagatccctaaggtggttcccagttcagataagatacaatcctaacaaataaagtggggtcggagtggaatgttcttgaaatcctggtatcaatgggactgggatattactctaaatctatggaaacttcaagaacaatatatttgttttaacctgaaaagacagttgcgttccagtgtgaaatagccaccaggctggatgaaaatgtgtgatgtgattccatcattgaaatgagcatgtgttgaccgtaagttcttctctttctctctggggacatttgcagtgctgcagagcttctctgtgagctgggatgctctgtcagcttaaatcctttccagagtgataaatatacattgattttatttgatttggcccataggtgggggataaaaaacaagacatcacagccacactatactgtatattcattccccctgaagacaacgcacacatccttgttgaagtctcctcatttagacaactcttcctttttatgcttcattataatgccactttcatgtcccttcccctcaacatcgtgcaccttgttccacatccagcactctgtgtttttaaattaagggaaatgccatttaaatatggtttttctctttgtaatatactcacctataaaaagtctttaaaggtaatgctaactgctttggcagaaattcaggcatatatatagttattttaatacaaggctatttgtttgcttgactgtttttaatgactactcattaacaccatgatcttatcctcatttcctctgcacagagcttgagaggtgctgttcacagcccctgctgcctgctttctgaggtctccaagatgctagctttctacttttccactcagccctgacacctagttcatcatttgagataagccccagttgtcggcaaattgcaatctcatcaggtctgcaagatagcatcttgtttgactcttttcaacaccttccattaacactttgggactaggtctttgggaagagccaggcctcaccacatgggcgattgtggttgatgaacagattctagttttccccattattgacttcattaaacttgacagcctttttagtctccagatagggtgaaccttttttcactgacccttattaagagctgtctccttaagaagggtcattcgagaagggatagtgggggccactccttctacttccaggaaatagctgattttggtaaacaactttgatttagtttttagagttctttcacctccctaattaggacagccacaatttatcaaatgttagcaatgcaccaaagcctaagaatgatcttatttcttcctccttattcatgggttttattactactatcctaatttcctcatatggaaatgagcctcaaaaacattaaataagttactctaggtcccatatcaataaattgacagagctggaattggaatcaacttaagtctgacttcagagcttaaggttttaaccatcatattctaccaccttcataatacctttagttactttattatattttaggtttaccccttgttattggtcttcaaaatccatgagttcattctgattttatgaggtgtattggtaatctattgtttcatgaaaacttaccccaaaacttagcagattaaagcaataaacacctattatctcattcaggctttgtgggtcaaaaattcaggagcagcctagctgggctcagggtctcttatgaaattgtagtcaagatattggcccaggctgcagtcagtcacctgaagccttgactgggctggaagatgtacttccaagtttcactcacatgcctggcaagttactactcattattggtagaaggctttcgttctccagcaatgtctgatcctaattttattttaccatagattagtgcagtcttcacatgaggtttcatttcacctctctttctctctctctctctttctctctttctttattttttttctctctctctctcttttcccctggcagtcttcttttggtcaagccatttgtattagtttgctaggtttgccatatgaaagtaccagtggcttaaacaacagaaatttattacagttgtggaaactaaaagtccgagatcaaggtgtcatggagcattgttttctctgaggcctctgtctttggtttataaatggtgatcttgtctctctgtcttcacatggactttcttctgtctctgtgtcctaatcacctcttcatataaggatactagtcatgattgaggctcatgcatctgagctcattttcacttactcacctctttaaaggccctgtcttctaatacagtcacattctgaggggtgttaggacttagggggttaggacttcaacatatgaatgttgaaatgaagtaatttggctcataataccatctttgtcctttgtatgtcttgagaatttccttttacactgtcttacctattacttatgtcatttctccattcttaacctctctttgcctcaagttcccaaagctattgtgcagccaactttaagagttaactgcctgcctttctgattgctcgttacacttgaaggacttaggatgctatacctgaaggtcttagagagttagactggtcctccaagcttatgaattttctagaaactttttaacttgcatatggtattctcctgaagaagctgtggctaaagtcagatatatttttataaactattctttgatcatgtatgagtgccaaaaaaaggagtctttaattactttgagggaggggtctgtgcatctttcttaacccttttcctggctgccctgtagatattccagaaagatttgatgtcttgtggaatggtctgagaaccagatggaagctagatgaagaacaaaatcaaaagtgtctctcttgtcttgcatgatagaaactaatatcactaagaacgcaattgagagcaaattattaagaatatgcactgaatgtgtacaacagccagtgtttgttcctcatcagcacagggaagcattcttttttttttttttttttgtgagtaattttattttattttattttatttttttttattttatttatttatttatttatttattttttaattttttttttattatactctaagttttagggtacatgtgcacattgtgcaggttagttacatatgtatacatgtgccatgctggtgcgctgcacccactaacgtgtcatctagcattaggtatatctcccaatgctatccctcccccctcccccgaccccaccacagtccccagagtgtgatattccccttcctgtgtccatgtgatctcattgttcaattcccacctatgagtgagaatatgcggtgtttggttttttgttcttgcgatagtttactgagaatgatggtttccaatttcatccatgtccctacaaaggacatgaactcatcattttttatggctgcatagtattccatggtgtatatgtgccacattttcttaatccagtctatcattgttggacatttgggttggttccaagtctttgctattgtgaatagtgccgcaataaacatacgtgtgcatgtggctttatagcagcatgatttatagtcctttgggtatatacccagtaatgggatggctgggtcaaatggtatttctagttctagatccctgaggaatcgccacactgacttccacaatggttgaactagtttacagtcccaccaacagtgtaaaagtgttcctatttctccacatcctctccagcacctgttgtttcctgactttttaatgattgccattctaactggtgtgagatgatatctcatagtggttttgatttgcatttctctgatggccattgatgatgagcatttcttcatgtgttttttggctgcataaatgtcttcttttgagaagtgtctgttcatgtccttcacccactttttgatggggttgtttgattttttcttgtaaatttgtttgagttcattgtagattctggatattagccctttgtcagatgagtaggttgtgaaaattttctcccatgttgtaggttgcctgttcactctgatggtagtttcttttgctgtgcagaagctctttagtttaattagatcccatttgtcaattttggcttttgttgccattgcttttggtgttttggacatgaagtccttgcccacgcctatgtcctgaatggtaatgcctaggttttcttctaaggtttttatggttttaggtctaacgtttaaatctttaatccatcttgaattgatttttgtataaggtgtaaggaagggatccagtttcagctttctacatatggctagccagttttcccagcaccatttgttaaatagggaatcctttccccattgcttgtttttctcaggtttgtcaaagatcagatagttgtagatatgtggcattatttctgagggctctgttctgttccattgatctatatctctgttttggtatcagtaccatgctgttttggttactgtagccttgtagtatagtttgaagtcaggtagtgtgatgcctccagctttgttcttttggcttaggattgacttggcgatgcgggctcttttttggttccatatgaactttaaagtagttttttccaattctgtgaagaaagtcattggtagcttgatggggatggcattgaatctgtaaattaccttgggcagtatggccattttcacgatattgattcttcctacccatgagcatggaatgttcttccatttgtttgtgtcctcttttatttccttgagcagtggtttgtagttctccttgaagaggtccttcacatcccttgtaagttggattcctaggtattttattctctttgaagcaattgtgaatgggagttcactcatgatttggctctctgtttgtctgttattggtgtataagaatgcttgtgatttttgtacattgattttgtatcctgagactttgctgaagttgcttatcagctgaaggagattttgggctgagacgatggggttttctagataaacaatcatgtcgtctgcaaacagggacaatttgacttcctcttttcctaattgaataccctttatttccttctcctgcctgattgccctggccagaacttccaacactatgttgaataggagcggtgacagagggcatccctgtcttgtaccagttttcaaagggaatgcttccagtttttgcccattcagtatgatattggctgtgggtttgtcatagatagctcttattattttgaaatacgtcccatcaatacctaatttattgagagtttttagcatgaagggttgttgaattttgtcaaaggctttttctgcatctattgagataatcatgtggtttttgtctttggctctgtttatatgctggattacatttattgatttgcgtatattgaaccagccttgcatcccagggatgaagcccacttgatcatggtggataagctttttgatgtgctgctggattcggtttgccagtattttattgaggatttttgcatcaatgttcatcaaggatattggtctaaaattctcttttttggttgtgtctctgcccggctttggtatcagaatgatgctggcctcataaaatgagttagggaggattccctctttttctattgattggaatagtttcagaaggaatggtaccagttcctccttgtacctctggtagaattcggctgtgaatccatctggtcctggactctttttggttggtaaactattgattattgccacaatttcagagcctgatattggtctcttcagaaattcaacttcttcctggtttagtcttgggagagtgtatgtgtcgaggaatgtatccatttcttctagattttctagtttatttgcgtagaggtgtttgtagtattctctgatggtagtttgtatttctgtgggatcggtggtgatatcccctttatcattttttattgtgtctatttgattcttctctctttttttctttattagtcttgctagcggtctatcaattttgttgatcctttcaaaaaaccagctcctggattcattgattttttgaagggttttttgtgtctctatttccttcagttctgctctgattttagttatttcttgccttctgctagcttttgaatgtgtttgctcttgcttttctagttcttttaattgtgatgttagggtgtcaattttggatctttcctgctttctcttgtaggcatttagtgctataaatttccctctacacactgctttgaatgtgtcccagagattctggtatgtggtgtctttgttctcgttggtttcaaagaacatctttatttctgccttcatttcgttatgtacccagtagtcattcaggagcaggttgttcagtttccatgtagttgagcggctttgagtgagattcttaatcctgagttctagtttgattgcactgtggtctgagagatagtttgttataatctctgttcttttacatttgctgaggagagctttacttccaactatgtggtcaattttggaataggtgtggtgtggtgctgaaaaaaatgtatattctgttgatttggggtggtgagttctgtagatgtctattaggtctgcttggtgcagagctgagttcaattcctgggtatccttgttgactttctgtctcgttgatctgtctaatgttgacagtggggtgttaaagtctcccattattaatgtgtgggagtctaagtctctttgttggtcactcaggacttgctttatgaatctgggtgctcctgtattgggtgcataaatatttaggatagttagctcctcttgttgaattgatccctttaccattatgtaatggccttctttgtctcttttgatctttgttggtttaaagtctgttttatcagagactaggattgcaacccctgcctttttttgttttccattggcttggtagatcttcctccatccttttattttgagcctatgtgtgtctctgcacgtgagatgggtttcctgaatacagcacactgatgggtcttgactctttatccaacttgccagtctgtgtcttttaattgcagaatttagtccatttatatttaaagttaatattgttatgtgtgaatttgatcctgtcattatgatgttagctggtgattttgctcattagttgatgcagtttcttcctagtctcgatggtctttacattttggcatgattttgcagcggctggtaccggttgttcctttccatgtttagtgcttccttcaggagctcttttagggcaggcctggtggtgacaaaatctctcagcatttgcttgtctataaagtattttatttctccttcacttatgaagcttagtttggctggatatgaaattctgggttgaaaattcttttctttaagaatgttgaatattggcccccactctcttctggcttgtagggtttctgccgagagatccgctgttagtctgatgggctttcctttgagggtaacccgacctttctctctggctgcccttaacattttttccttcatttcaactttggtgaatctgacaattatgtgtcttggagttgctcttctcgaggagtatctttgtggcgttctctgtatttcctgaatctgaacgttggcctgccttgctagattggggaagttttcctggataatatcctgcagagtgttttccaacttggttccattctccacatcactttcaggtacaccaatcagatgtagatttggtcttttcacatagtcccatatttcttggaggctttgctcatttctttttattcttttttctctaaacttcccttctcgcttcatttcattcatttcatcttccattgctgataccctttcttccagttgatcgcatcggctcctgaggcttctgcattcttcacgtagttctggagccttggttttcagctccatcagctcctttaagcacttctctgtattggttattctagttatacattcttctaaatttttttcaaagttttcaacttctttgcctttggtttgaatgtcctcccgtagctcagagtaatttgatcgtctgaagccttcttctctcagctcgtcaaaatcattctccatccagctttgttctgttgctggtgaggaactgcgttcctttggaggaggagaggcgctctgcgttttagagtttccagtttttctgttctgttttttccccatctttgccaagatggccgaataggaacagctccggtctacagctcccagcgtgagcgacgcagaagacgggtgatttctgcatttccatctgaggtaccgggttcatctcactagggagtgccagacagtgggcgcaggccagtgtgtgcgcgcaccgtgcgcgagccgaagcagggcgaggcattgcctcacctgggaagcgcaaggggtcagggagttccctttccgagtcaaagaaaggggtgacggacgcacctggaaaatcgggtcactcccacccgaatattgcgcttttcagaccggcttaagaaacggcgcaccacgagactatatcccacacctggctcagagggtcctacgcccacggaatctcgctgattgctagcacagcagtctgagatcaaactgcaaggcggcaacgaggctgggggaggggcgcccgccattgcccaggcttgcttaggtaaacaaagcagccgggaagctcgaactgggtggagcccaccacagctcaaggaggcctgcctgcctctgtaggctccacctctgggggcagggcacagacaaacaaaaagacagcagtaacctctgcagacttaagtgtccctgtctgacagctttgaagagagcagtggttctcccagcacgcagctggagatctgaggacgggcagactgcctcctcaagtgggtccctgacccctgacccccaagcagcctaactgggaggcaccccccagcaggggtacactgacacctcacacggcagggtattccaacagacctgcagctgagggtcctgtctgttagaaggaaaactaacaaccagaaaggacatctacactgaaaacccatctgtacatcaccatcatcaaagaccaaaagtagcacagggaagcattctaagcttttgccaggacgcctgcttattatatgctatggtctgtccaaatcttctgtggctgccactacagcctgatttcccttggaaacttggcagcccgtgagttacgatggaattcccaggtgataatgtatctaatttccctcattgtacttcttttatcctgtaatgtgctgttgattcccacggctgagctgtgatggagaatagccattattattgtaatggcattattcagtccattaagacttaaaacatacctggtaaaaatagtgaaagcttacaagtcttcatagcaatctcaaagactaataacttagttgttagtcttttcctcaagtaaactttgacaggtgtttgggaataattctttcctgggctgatagtatttgatttgtactatatattgttctaagtaaatgcaggaccaatgctccatcctattcgaaaaaagaaaaggggtctctgtagagaaactattaaaaaagtttaaacagcctttacagaaacgtggtttggtggcaaagaaagggaaaccaccaccccttccaaagctcaccaggagaaaagtgagaaataaaatatcaaaatgaaattgactccacacaaagatatctgatcaccagacaaaacaagtaccaaagtgcagaaaaatattacaataaataacatcagattctttattcaagccaggcaaaacttatgtagtttttcctaaccaggttaattattttcctcatcttcttttcctttaatataaaaaagggatataagaaagcaagcctgagtatattcttggttgctctgtttcttgtgttagcctagccagaacgagctacaatagaaagaagttatactttagaaaacaatctatttaatataattcaatgctacacaaagctttatttcttaatatggacaattatttgctactggaaagaaagcagagcgagatatggccctttggggagatggttaaataagaaatacatttccagatgatgtcacatgtaaatagcactccgaaatcactaggcatcaaaattaatcaggctgaatccattgctttgtaaggtgtaaatcgctagccttacttaaccttacttcagtgctgggactcccgaatcgcgaggaaggtatgattcttatttcttcacacacacacagactgagtgttctcaagacaggaacatgattgagaatgctggaaaaaacattacattaatctacattgtaagagtaccatgcaaacatttgcttgtttccaacaccttgtaaatgtatctcgttgttgactcaaaatgaacatttggtgcagatactgagaaaaaagaatgtacttagaacagggatttcattacttctcttataggtctcagctgtggagattgtttagccaacaagaaacccaatctctgttaggtatcttgtctgagatgatattaaaaatattcaacaaccagtaggaaatggaaccaatgaaaatgactcaggtcccctgctgagactggcattgacctgttagttgttgaattgtggaaagaggggaaagggaccggatgatcggtggtaagggtatgtttgaagcagtgacattcatcatctatttatgcaagtattttaacattttaataattgatacagttatctgggtgcatgccagttgacaacttgccctgcatattgataattttaccatgcagactccactcctcaggtaactcttgttctattacactggactttatcatcatgtaatctgtcctgtccctctctctctctctctctctctctctctctctctattgaattctgggggtgtagtagtccattgtttagagggaatttagaagttttcctatattaggaagtgtattcatttcctaggaatgccataacaaagaattacaaactgagaggcttacaacaatacaaagttatcatatcatggctctggaggtgaaaagtctgaaataaaagtgttggtggggctggacacggtggctcacacctgtaatcccagcactttgggaggctgaggcaggcagatcacttgaggtcaggagttcgagaccagcctggctgacgtggtgaaaccctgtctttactaaaagtacaaaaaattagctgggcgtggtggtgggtgcctgtaatcccagctactgaggaggctgaggcaggataattgcttgaacccgggaggtggaggttgcagtgagctgagatcgtgccactgcactccagcctgggtgacaagagcgaggctacttctcaaaaaagaaaaaaaaagtgttggcggggccaagatctctctggaggctctcagggaggatccttccttgcctctttctaacctcttttgatttgctgacaatctttggcattctttggtttgcagctgcagcactttgatcacggccttgttgtcacatggcattctcacctttagtgcctgtgtgtcttcccctcttcacataaggatgcaagtcatattggatgacttatcctactatcctactatgtctatcctactccaatatgaccttatcttagctgattacatctgtagtgaccctatttccaaataaggtcacactccgaggtactggggggttaggatttcatcatatcttttgggagagacacaattcaactcaggacaggaaggaaaagccccggcaaccgaattgtattgttctgctagatgatgacaagtcataatgtagagaagttgctccaaagtgggatacatacattggagggcagcatagaatgaaagttttagaacatctatttatatttattttaatcgtattcctttatatttttgttatagtctgtttcatagcacatttagtgtataaatataataatacatgtctacgtgttaaaaatgaatgaaaatacctacattgggagtgggctgaatccacagaaagttttactgatggtggttcagggaatgtaagcaaaaggatttcaaaccaatgtaagagcatgaaatattaatgacatgtttcagataaaaatctctgtgtaggtttttcatagccccaattcaagttagactgggcaagaaatgagattatttaggcaaaaaaagggaggagcactaaattcatccacaattttaaaagtatcttctttcaggaggcttttggacagtaacatttccaaaaaaatatagtgttttatgccacagagaatcaagttgcattgtgtatactaaatggtcaagcattttcaagaacatgacaaaataaaaacatacaaatttatatctcaaaaggaaagtatcttctttcatgtcagatcatcagcacagaagccctcgatgcatgcaaaggcaagcacaggctctgcagatgagatgtgaagaagcaattagggaaggaaggaagggacagtttggatgctgggtcctgacccagaaacaacacggagtagatctcggatttgctttttcttaggtccaatgctaggacgattactttatctgtggtgaggaatgttataaaaaaccattgttggaatgccaccaaaatacttctttcccttttagcatcatcaccaagattctagaacgaagtaataacagttgccaaccttgagccattctccagctgttgtcatgtttcagtcagacaggaagtgttggcgagtaatatgggatttattgggagtgttcctttacgtgagtccaggaaataagaactagagatgagcttgggtgcctctgcttcttttatttctatggaacattctttggggtcagttttgaataatcactgggcattatcggatttctatcactattttttgcatgttcttgtgattattcaccagggaacattttataatactcatattaaatttttatttcttaatttcttgcctcattactcccatttgcattggctgcagactctctaagtattactttcccttccttgtggttcataccctaatcattgaatattgatgttctatttatttctatgcactcactttgtttttgaccaagttatatagttatttggttttcaggtaatgctttcttacagttactcaagaatgtatgctagaaaatgttgcccataactgcttaaacataaaagaggatatgttttcttgttttccatctatgttacagtctgtttctgaaatatcctttattatgagtagaataaaatctactggacttggaatccacattcccttttaaattaaaagtattcccagactttcaaattttacattccttagcatgatctcttctctataaagacagaagaggggacagaaaattctgactgatcatttcttgagctagaagcagctataatattcctgttctccatcctttataattactttctcataaatactaaactacacccccctgagcatctagaagatttaaacactgatcaaaggcaggtttagctgtatcctcaggacaagctgattcaatgaagaaaagctcaggctcttggagagcttttagaaagagaaataaattaacaattagcatttaacagcagtaaaaactgcttagcggaagcagacttgatgttttaggggatttgagatattcggagtgatgagatgaataggaaaaactgtgttccaattaggaagacagagtgaaaaggtgtgagatgtggtcttctagttcattccactggtgatatagagcctttcctggacagatttttatcttttttgagtaattattatccacgttataatttcatgcctgttgcttttaggtaagctcagaattatagtcatggcttgagtaaagatctcattgcagttgagtactagcagtaccactactcttgcatgagttgcattctctcttgaccagctctgttaatgggtgtccttatgtatgaaactgattttcttactaatggcaggattctgtctggttaggatattccctgaaatgcccaagggtgtattttgcttaaaagcaaggctggccagagaggtttggtttatgtatttatttttaaatttcttttgtacctaggataataaatatattcctctagtcttggataataatataaaattacagccatactgacaaaattaaagaagacattaacaaaaaattcagattaaaatataaagttcatgtctttggcaagtacacacaggattgtggttttgcccaaggtgtctaattaattactataatttttcaattccctgtgttcaataaaaacacgtctatgaaatgctattcataaaagcagaactcactggtcattaaacatgcaaatatccacgaataaatacacaattctctcttgcaggaaatgctatcagtagactaaataagtggtggacatttttctacagtaagtatttacttttcctacagtttgatcttaaaataccacagttggccagggcctcatgtgttgctggtgcaatctccgcattgttaatgggtatatgaagctcatgatgatgtccacaagatgataccgctattggaaaacttcctcattcttcctgtctaaccagtagcataatggatatgtgaatagtgcctgttttgtacattttccctcaggtaaactgtgataggcctttgggaataattcttttcaaggcctgaagcatttaaagtgcactgtatattgttctaaatgcaagaccaatgccccattctatcagagaaaagaaaaagggtatctgtgggaaactatttaaaagattaaaggagctttgactgaaatgtggtttggtggcaaagaaagggaaaccaccatcccttggtacagtattaaggctatatctgggaaaaccaacaaaacgtgtcatatgtggatagatcatgacactgacaccattagcaaggactttttttttttttttaacagcatttcttgtgctagtttcccagtgccaagaatggcttctttatttattcttgaactccaatacctatcacagtacttggtccttacttggtactcaataaatgtttgttgaatgaatctattttttatacttttgtatcaaactatcacatctgagcgattttgtaattttattcagctgatgatattctttataccagtgcaattttccatatgctcatgtgtgttttatttctcatgatatcagtttttctttctttgaactttgtagttccctgaattgcttagtattgtttatatatgactaaaggcccaggtggataagatggtatctttctttgtttattgtttatatatgactaaaggtccagtgaaaggtaaaaaatgagtttgttagatttcaaaatcagtcaaaaggtaaaatcagtgtgaagataagataccatcttatctaactggacctttagtccagtgaaaggtgaaaaatgagtttgttagatttcaaaatcagtcctaactaaaaaccatttcccctactggatgttgtaactcacatcattacaatttatggcttaatgaaacatttatttttctgaacaacttggatttcagtgagcagatttcttaaaataaggacattctatttttcattatagtactaagaatgctggaacaaatattttttctacttacatacttgagttcagttgaattattttatcaggtatttgcaagatgacctggaatatcttggaagttattatatgtaaattatacatacacatatatgtgtatagttcctggcattgggcaactagtataaggaatgctgcaaaaaaaatccttgctaatggtttcagcatcatgatatatatatacatatatatgcatatgtgtaattacacatatctatatgtataaataactatattaatatacttatataagctactacatattaataaatgatcaacatacctatattatttatatataaactatatataaatataactatatatatacacacacacacatatatatatgtagttgtagaaagggtcttttttagtgaattaagacttcatgaaaggccagttatagtggctcatcatgcctgtaatcccagcattctgggaggctagaggatcacttgagcctagtagttcaagatcagcctgggcaacacagcaagatcccatcttaaaataaaaaagatctcatggtaactaatatttgatatgtatgatatatgactttaagcaatattacgtgacatcacctttctcacattctaggttgctgtttacattttttgttcagtaatgaaacaaactcacgaggaagtaaaccaatcaacattttatgcatggagttttctaaatccttcatgtggctttggtagcattttgattagaagcccttgaattctgtcctgagtgcttacccattatctagtgatttacagagtttacaggaggacaccgaaatcacaggcttgaccgcatttacggatggcacagataccagatccaaaaagtttttaatgatctggaaccatgaagtgaaataaacaaggagcccagatttcttgaagacctcctctatgccaggcattttatgtctctcaattctttgagagaacctatggcatgaagttattaatttttttctagatggcaaaactgaaaataaagtatattcaattaatttctcaaggtcatgggattgaaaatactgtgactgaaaaaaatattttaagtcttcctgatcctagagtctatcttcttacattaaaataaacatattaaataaataagcacaatcagtttaggaaagatttgttttgatagaaatccatgcaaagcaggtcagggaatttcagttgaccacagattcaatggggaacatcagctaatgagagaaatgtacagtgcaaattatttcattgtacttagtgctagtcaggcttaataaagggtatgatactttggcacctcattgctttcacaaacaagaaggcattctgagtaagaaaacatgaagacaaagatcctaaacctttatcttgtggatgacagctaagaatgctcaggtaagaaatgactgtagtgacggcaggggatggatgagggctataacatctgttgcaatacatacactgaatggtgactttttcttttttaaattgacacggggtctagctctgttgccctgccagagggcagtggcgcaatcatagctcactgcagccttgaactcctgggctcaggtgaccctcctgcctcagcctcccaagtagcttggactgcaggtgcatgcaaccatgccccactaatttttttatatatttatttttagtagcaacaagctctcactatgttgcccaggatggtcttgaacttctgggctcaagtaatcctcttgtcttagtcttccaaagtgctggcattacaggcatgagccaccatgcctgccctaatggtgtttttaaaggaggaattagctgtggtcagtacagatttatttggaagaaatggaatctgtgcttagaagccaaaaggcccattattattcaataaaaggaagctctttagaacactttgaacctgaaagagttaatgaagcatgagacattagggttcccatatttagtttagatctatgtggcactatttttagaaggttacattgtttttaatattttatatagtaggccgggcgtggtggctcacgcctgtaatcccagcactttgggaggccgaggcaggcagatcacaaggccaagagatcgagaccatcctggccaatgtggtgaaaccccatctctactaaaaaatacaaaacgtagccgggcgtggcggtgtgcgcctgtaatcccagctacttgggaggctgaggcaggagaatcacttgaaccaggaggcagaggttgcagtgagcctagattgcgccactgcactacagcctgggcaacagagtgagacttcatctcaaaaaaaaaaaattatatagtataattctaataatgggatgctccacttcacttgcaagtacttgcatatggaggtgtttttttccccagtatgaggagagatcaacagtaaatacctatattatttctattgctggtcaatgcagaaaatatttgttaagcacgaagagtgtggatgtgtttgatgactacagaactaaggatttctcaaagaaacaaagagagaagtctaagttcaggtgtggaagcccttgcctaatttgcttcttcacttttgcccagaaataatttggccagggattgtgttactattgttgaattaaaccagacagaatcaggcctataagaagagccgtttagtaaaggaaatgattctgtgaaaattttagatttgataactgacatgggaggtgtttaccttcttttgaaaagcagatttaaaaaattgaattaaatatacacacagacttttacactcattttcagggaagcaagaactctatcataataatcaccaaatatcaattaatcagaaggaaaaataggcttgcaggaagagaaaatcagttcctttagacaaatggtattgacatagagattccaggtatgtttagttatataccatgcattctggatcaaatagagaggcttgtgacttgtatcagtattacctggcttcacagcagcaggagcagagaaaatatgcactatgtttagagatgaattaggagagtatgtctgaaagaaccagggatgcgtgggcaggtagatttggtcaggcatatttataataatgagccattggatttgggattgggtggagggaataaagtcagaaaaccattgggtcatcttccctaataaaagagaacgtctgtggagttataaatagaattgcctaatatttcatctaatagctttattcaatcattagaacctaagctttcttgtatcaatgtaaagtatgtgtgtgtatatatgtatatatattcatatgtgtgtgtattatatgcatatgtgcatatacatgtgtgtaatgaaaaaagaaaacagccctgaagaatcctcaagaaactgtcagacgtccttgtcctttaaaagctccagttgcccttcttgtctaaacacatcagtgcagtgtgaatcctgcattattcatgaacacataaggtctgtatttgtatacatttatctcttggctatttatttctataatctctgccccaaaccctcgccatgctttgtctttctcttttcctacttttcttttttttctggtagtttgaaaaataaacattagaaatagctattttattgcttacttctttcctttaacatatggcatttgcttaacctcttggagagttgtggttttctgaccctggagttctgatgggaaagataatgagaagtgtttacttagcatctaggccagcaagctaagaaaaacattgtgccatgctagtattgacaaggtgacagagagcccacacttgcctcacatgttggccactcccgatgctacatcccactttactcttgctggaggactgacattaatgcttactgttttgaggtctggacataatcctggtagattctaaaactcctagcaaacagtggtagacaagtcaagggtctataattgcgtataaacagaaaagtaaagacttacatatttaagcaacctgctaatccccatggtcatttagttccctagtggctatttttaatttgtcttgtttttagaggcactctgaaagcatgaggcaggtgaaagcgtgtctgtgtgttgcttgcatgcacatgctttttcaagaaggtcttcttcttttcttgtcaagactgcagctgtcaactgttccccaaaggtgttgcctagaatcagcatgcagcgctgtaggcaacctgtcacttagatgagacaccttgtatatatgctgtagttcactctctgacttgcctgtgtgcacaatgccatcttgtctgttagaagacagggccatcgtgagatgcagtttctctttgagatatatagtagctcttctttcttcaaaaggaaaaaataaaaaataaaaaaaagctactcttgctggaaaggtagagagaagggtctgcgggtgccctctaccattgtggtttcaatgtctaaatcttctggagaggattgctgcagtgatgagataaaagcagctgcctttccaagtactgtctatttgcattgatatttacattctttgccaaagtgacatcattaacatttgcttagtatttgtgccacagggatatgttttacataatttaagacttggaagtgatgataatgtatttcagatgggcagtagaggccacagagtgctgaatttcatcccctttcttcttaaggaccttagtgcataaataagtccctagtccgtatccctaaatcatattaacaatactgcttactgggtgccaacaatatgtctggtactggactagatatatgtgtatatattgtttagcccccatgacaacagtatgagggtaggtaccattatctccattatatagtaaagaagcaaggctagaaaaattggtgacttgcacaggtctgaattcagagacatctcaccgcaaggacttttctccttatgctgtgtcattctatctcccatcttgtagcctacttgtttcttcagatttaagaaacagaaaccctatattttctcaggacatgacacttgaaataacaagaaagaatattgtgggactctgaccttggtccgtttctgtctctttcattctcatctttactctaggtgcccagaaactcttctttgaaataaatataaaagatctgtgtttgctttgagagaaagccacataacattgtcacaagccagattattgaactctgccagatggcccttatttaccaaatatatgttttagttttatatacgaacagaggttttaaaaagataaagacgaacaaaattgtgtttaatgtcctgtatgataccttttgccttatttacaaactggtcctctctctgactgtacctgctcctgatgccccatcctcaatgtcctccatcagcataaaaaatgtgaaacctctttttcaaaaacaaatttaaaaaaaagtgctcagtctctcatcttgagatggagaattagaagcaaatttgcccttgcttttcttcttaatcttccttcttcccaccttctttccctcgctcccttctttcttctttctttcacaccatgtgccccagaatgacagctcagggaaagtaggcattataagctgagtagccttttccttgatgtcccttgaagggctccttatgttcagagaatatatcactgcatttgcagctcccccagaaatgccgtagcttggaggagcctattactcacttgaatctctttggtgtagacctataaatagattctcgtcttttccttgtaaccccctatagattcttgattcaagggtcaaaaatggagagatgagagttcaatcttcttggaacttactgacaccctagctcccttttaagaacttgtcctccttactaacaccatctacatggccatctgggtcttctcagctcagaaacaccctgcaacaatggctggcggaaataaggggagggcccatttgaattagcacattcccccacaagcacacacatccatactgccaggcctctgtttgtccagtttcctcctcttgtgctgttcttcccacccttctcctcagtgcagttcagatatcatctgtgtcccatgaagtctactctctcccaggggaaaccctttgaatttccattgcatattattctgtgcttctttttatgattaatcccatttaccttgtattatataaatatattttggtccttattagattatatatacttggaggaggacagtatctttctttggtccattggtgtggctaccacaggctcacagcatggcatttggttgcctaaaatgatatgtcttatccgttctttgatgtacagataagaaaagcctttatttagtttggctttcattttgttcaagaacagtggcacagtttggtttttcttgatatctttcccttattcatggttgcttttctcaaacagcacatgtggggcttaatacctagatgatgggttgataggtgcagcaaaccaggtggtacagggtcctgtgtgactctaccatggtgcacatttacctgtgtaacaaacctgcacatcctgcacatgtatcctgaaacttaaaatttaacagaaaaggaaaaagaaaaagaaattattataaatgtaaagtaattaaaagtatattatttaggagggacagtagatatcacaaaggtaagcatgtttcattctcaaatgaaatacacaaatttataaaagtgaattcagcaccagtggtgaatataaaaggctgttaaggaggaggagctaaagttttgattggaacttgaagaaaaggtatgttgttataggcagaaaacttgccatgcaggtgatcatgttagaatcagtgtcagacattaacaaaacattttcagtcaagggcagagagtaaatattttaggctttttggaggctgattacataatttgcacaatgaaatagtgggtccctttttcaaaaagcaataacgaagtgccatgagaagtacttaaaacataaagctctttttcctttttccatggtttctctctctaaacttgtcatgttgttttatatttgctcttcagtgtcattctaaggaaagaaaatgttaaattattagcatgaattttgccattcatctttatattatgccatgccagtcttaaataagttctgaataagaacttctaattcatttgcagaattactgacataggaaacatttcttatttcatagctcatgcagtgcatatatgttttgttcttaccagaaaactggacacactgcacagattaactcacctgtttttatttatttcacttcttgatatacacatattcaacaaacactctcttcctttggcttcctaatgagtaagaaaagactgaaaagaaaagaaactgagttgctttttcttttcttttccttctttgacataattttcagctgaggtggttggtcaattcatggaagtaacatgagtaagaaaggctataattaggttccttagtcatttatgtttcttagaatgccatcgttttctttctgtgttcaaagcaagttttggttccaatggaaaacatgttctttaaggactgtcagcatcccagcttactcagagtagatgtgagagactttgcaatcgctttgagtctcattgagtgtgcatcctaagtctaccagaatcttctactcccggggtattgtgagagctatagggggtgaagtggcaagaaacaatgggcatgtgtatagtatatccatatgtttatgcatctctcttttgctactgcacatgcctaattgtttcattagacttcattcaaaaacacaaattcaaagataaaattattaagtgtttcaagacggagagacaggagaatattaaaccaagagcaggtggtacagggtcctgtgtgactctactggctgcatacccatgaagcttcacctgggttttgcaagccatatggtctctgtctcaagtatttagctgttgtaccatgaagtgcggctataaatgatatgtaaacaaatggacgtgactgtgttccagtaaaactttatttacaaaaaacaggtagcagccagaatctggtctgtgggccattgtttgttgatccctagttaggcaaaaacatggagatgagaatatgtgagccttgtttgagaattgcttagctagtgtgaggtaagtcagggaatttcagaagaaagccaattatgaaagcatggattggactgtttgaatattttcctctagttgataaagtgactgatggctttagctactgaattaacgtgatcaaaagagtttttttttttttttggagatggagtcttgctctgtcaccaagctggagtgcagtggcatgatcttggctcactgcaacctctgcatcctgggttcaagcaattctcctgcctcagctttccgagtagtgggaacacaccactacttccagctaatttttgtatttttagtagagatggggtttcatcatgttggccaggatgatcttgatctcttgacctcatgatctgcccgcctcggcctcccaaagtgctgggattacaggtgtgagccaccgtgcctcgcccatcaaaagagatttttagtgaattaatatggaagtgtcctatcacagagataggaaggggtggatctgttaatagacagatgaacaagggagctattgtgagagtccaggtatgagatgataacaacttggagtattaagaagggatttgcaatgatggaaatatttgattccagaggaattttaagtgaagtgtcaccaggatgtggagagtgatttgatgttggggctgagagaagaaaagatgggaaatttcaaggtcttgtgcccggaaggctgcaaaatggatagccattcattccctgaacctgtattgtgtgtatcttctgtttgctaaaataaccatgaacagaaatggctggtgggctgctgattttaggtggctgcagaattttggtctatttgagttgatgttgggttgcctaatacacatgatgcttacaaggcattcaagatgtgtcactggcatagaggagtggagtgagggatagaagtaaaggtaggtagcccatcttcacagaaaggtgaattagaccagcgacagcagataccatctcccaatggagaaagcatagagaagagaaagaaaaagaaagaggctctaataccctaatcacttacataccctagtgtagtcctctatgcttttcaaattaagtagatatttcactttcctgtttaaccttgcctggaaagattgagaggtccatgtctagtcacaatgttagaatgaaataaatgtgtgaaataaatcatgtttatagtgtagatccccttcatcttcatctttgagtcaaatgccaaagccatttgttggctcagtaacgtttcacttagaaaatgaaacttttattttggctaaacgagtatggtgtcctggtcctttcccaaaaacataccttcaattttaccctagctggctgattgactgtttcctttacagatgcagtctagggatgctaagggcaacatcctttgtgataatgaaagccttataatgtattttttccagtaacttaggatgctgtatattaagctgtatattggtaaatattttgtctatgtggagaaatgtaaatgagatttttttttcttttcatcattcttctctacaaatgtgcattgaaaagacactgaactttggtcccatgcttatgcacaaggtataaaagttgcttatattcctaacctctccacagagttgtctagattcacaggactatttggtcaaatgttctgcaattcagttccactgcttgactgtaattcacctataaacccagaaaaatactgctggagttcagaggccctgactgttattagacagagaaaacctatagcacactggaacaatcacatttaaaagatttgcctcaagctttctatggtcactattactctttaatttatgcttttaggtttcaactttgaaatgatattgaaattttcattatgggcaaccctgaatctggaaaaatccaaggcagcttttaggacagtcacctttaattacccaccaccgttaagattaggaagtaaatgctgaaattcccatgtaagtgtattttgcaagaaattttcacactatgaaataattggtctttatctctcatcctgtctgattctctatcaagacatatcaaacatgcacccctctgctcaaagtgtaaaaaaaaagtttgctttttaaagttttaattaaggcttttgctgtgtgtgtgtgtgtgtgtgtgtgtgtgtgtgaaagtactacacactttagttgtttaggtgtcattgttgagacatttagactgtatttcattcaggcagatacttttactttattacattcccaaatgaggaaatgtgctgattagatggaaaagcatgtgtgtatcttatagtgttagcaatttggcacggtttttgttttgttagctctcagcatggttgccttcaactatatttacaccacatgggtgggcatgtgttaaagatacaaaaatcctcagacctctgaattgcattcctgaaggagaccttaattctattaggttggtgcaaattaaaatgccgttacttgtaatggcaaaaaccgcaatgattttcgcaccaaccttatactgcttattgcttttgcctcttctgtaatgaaaggcttctaactggtttgcctgcctttgattttagctttttgtgtagccttggtcatatcaagtttctgctgaaaaatttggcatggcctttgatttcccagtctcatctcctacaactcaccagtatgcaccggtagttccagtccgcaatacgtcctgcgctgtcgagcttacgcacctttctgtgtgctgtttcctctgctaagaatgtctagtgaacttctactcaccgtttaagaccagatttaaatggcatcttccttacaaataagttgattgatctatcattttattgattctgtcattcagaaacattccttcaatgcatgctatgttctgggaaactttctctaaacggactcaaacatttcttcttctgggttttcccagcgctggatactctgagtcattactaatccacactgggttcttgttttctaggctgcatccctcaatagactgtgaggtctttgtgagaatacaattgcttttgtgtttagttccatattcacagcgttcattctagtgtctggaacatagggttccactacatgcactacacatttgttgactagaaaaatgattcgttttatcaagggactgtcttaggaaatactaagtggggtgcctttctgatacattgtaatgaccacccttttctctgttctctaacgttgtatcccaaagtagataaactagagttttatccttaccaaccatctttctctcatctccatcctactttcccagcactcccctgcacccccctgctgtgtgcaaagctccaatcccgggaaaataccatgcagcgctttcattctaaaggggagcaattgaaagcatttctttggtaatttaagcacacagcagctacctttgcaaaagcctggttgctaaattatcccctcaactactcattttgcaaaagggaaaagaaaaaaaaaacacactggggggatagagactctaataagaaaagagtctgtgttttctttaggttcagcctgattcctctccacctcctctcccttcagtgactgcaaggctcctggtgtggctcgttctgctacttttccttttaatgttttaaatgccacaaatgcttgtcataaaccaccttcttaattatgcagaagtggagctgaatggttagttagcagttctattgcaattactgcactttttcaggtctgctgctgttttatgtggcactgttttctaagttgctgattaagatgatgtagtgggtggagttcttcttcccaccattggagaagggccgctgaagcctgggataatgagtccttaggcaatagtttatggcctaataagagttaaggatgggagcaaggaggagatggagagttatgctcattcatttccttcttaaaaagaaaaagccctctggttttgttcaacttttgcttctcctttgtccagtgtagatgctgaaattgctagagaaatatccatgatggctcttagcagtcctaatcttatttggacctgatattctgaggcttttaggcatcttcagatatccttgtgcagtgaaagagccttgcattggagttgaaatgatgacgagaaaatttaagaactgttgagaatttgaatcaatctcttcatgttgccatctctctctctctctttttaaagccaaatatgaatactgctgtgtgccgatcttgagccctgagaagctgcacttccagtgtagttctaggtccccactgaaaataaaataatgtgaaattgaaagcagcatgctattgtaaagtagtgcaatcattcgttcattcacaggtacttactgaatgcctactatgtcctaggcactgtgtgaggcccaggggatggggctaaaaacaatataaacttcttgcctttatggaatggcattctagtcaggtatactgatattaaaccaatctggaaataaatatatactcttcaatggtgctatgaaaaaaataaagtagaatgaggtgctataaaaaaataaagtagaatgagggaatggagagtgtgctagggcatgctattttgggtggagaaggtttctttgtggcagtgacattgaaataagtgcctgaatgaggcaaagcaacaagatgtaaggatatccaagaagagcattccatgctgaggaaatagcaggtataatcaccctgaaacaggaatgcacttggcttattggagaaacagtgggaggctgatggctagaagacagtgagcccgcagggcaggacagggggtaaagtgaggtcaaagagataaccaggagcatattgtgtatggccttgtaggtgaacaaatgggctttgaatttaatataatttaatttatattttaaaatcatcttggcggctgggtgccaattataccataaagaggcaaagtagaagactggagccaccgaggaggctgctgcaggaatctaggcaaaagatatattagtgtggtagtggcaagcgtgctacattattatgatgtcctcggccttcttaagtgtttgcttcataaatcagtagagttgtgagctgtgacttggacctgataatgaatcattacttattttaaaattgatacatacaataacattcttaattttttataagctcatataaaatattgaaggaggattggtcttattttgcatctgtttattaaacattagactggagataaggttgtgaggccctagagccaaataaatattcccagccttgcctggcagacaattattgggtgtggaggttacccagcctccatgttgcctcagtgactccctttcctgtccttcactaggtaggaggcaaaaagctcagcagtgacacacaggctctgctctcctaattgctgtaaagaactgtgctgtttcttcttcaaaatgttgattgcaggcagctacagggatgtgctcttatgttacagtataaagattttttattgtaaagaaaggagatttgttggcatggtgggatgtgtgtatttgtgtgtgtgtgtgcaagtagctgtgcttgcactgggagactattttactttgcttttttcctctcccattataggaagtaatttttggaggaaaatagtatgacagtcctgatactattttatttattttcttcttcagagtaggtacaacagaaaatcctgaatttatgcttgttgtattttttctccctattatatttctgcgtgttcacacccctctattaacagagaaagtttatgctatattctgtactccttttactctttttattaagagaaagtgagaaagctgtcctagaattatacaaaatatacatatatttttccacatctgaagggtaaaggaattgtaattcatgggaatagagtgttaagggcttatacaatgatatatactatatatatatcattgtttgtatgtatgtacatatattgcacatatatacatatcactttttggctctacttttattattttcaagtttcttttatataaccccagctgctcttctgcatttagttaagtgcagtcctaccatgtctagaacccccttctattctgcctacattcacgactttcatccctcaactctggtcccatttatctgtcacttagcattaactacgttataatgccatttatcccttttgtgcatgcattatttctactcaagtgggccatttgcttttttagggcaaatatcataatatgcacctacttatatgctccacatctgcatcaattcagacagtttggttgcaagcaacagatactataggcttagactacctcaagttggtcaggaatgtattaaaagtctttggggtagcttacagaatcaaagcaaagactaaaggaagaggtttccaaaaacaatcagagaatcttgggaggtctaagtaacagggactaattaatagctattttaggctgcagctgctagaatgcataaactccaattatttccccccattcttacaacagcctgctgaagcctccaaggtattgggtcatgtgcttacccctaagagaagcagaaaaaaaaatcaccttttgacaatcctacacctctgtgaacaatgggaaggagatgtaatttcccaaaagaaaaccgggcactgagtggcccaaaacaattgtcctctataatatcaagcatactttggtgtccacagttggagctctttacagatctggtgtcagtgatggtgacgacaaggagaaggaagagttgtaaatgactttgctcttttgagtaagtgatcatcaaatgtccttgcagtcagaatggcaaacaaatggcatggcctgtcagtatctgaagttaatttgggctggctgtcctttctttttggatatttaggtttcagtaatgatttcccgaaggccacaataataaacatgtgttatgttataaaaagcgggtgctgcatacattggaagcaaggccccctaattgaatcacctgtgctatgactctttcaactcctaaggcataattgaagcactatctcagttggcatctttgtggtttccatccacacattcttactttctggtagctggattatgaacaaccccaaggtcaggcttgtgtagaacccaacatcttacatattttactattgataaaatacaccctgagtataaatgttcacataacactttctctcatctctatagttatgtttctttcttatgaccttggccacatactttaaactccttgggaaaatatgctgccgttaaaaacgcttcacctatttcttgaaaaatgaccgacaagatgtttttcgtccaattctgtcgtatatttctattccctagatttaaatttcctggacttaactgttccctatagttagcagaaacattattttaagaacaatttaagttgaacttcatgtgaaactggctactgaatctgagtcgggaccttcttctggagggaggtaattaaatattccttattgatgctattttaaatgtgttgaatgaaaggagttaattatacagcagggaacatggcagagttctgactaataatgagctcaatgtttaatgtcttcatctttgttagaatcattaaagttgtttgaaccaatcagatgtttcaagtgaatgtagactcacagctaaccagctccaaatggcaatccctcacagatgcaggagctggtatatctaatgatgacttcaggaaaaggatggcgatatattgctttcttccatgcagtataatctgtttcagttggtcttccatcgtgatggtaaagagaaaagaataagtcttatttccaaaatttcatgtgttataatggaatgatgtttgtgcctggacatataaaagaggaaatgattttgttttttccttaaagttttacgtagccaatctctttggaatctggtgcaatattgacatttctggctgccaattcctcacatgataaatgcattaacactaaatcttaggatgcccaggaatcactagaggaccaagcactgtcctaaagaatggatctcctgtaatactgttgtagagaaatgtaggctcttgaggtcaggtttttcataccgtattactggtttgttatgtgtctttaaataaattttgcaaactccccgacactcaaactacttcctcttaaatttctcctcccttctgattgcttcaccaaacagcctgtggctttgtttttatttacaggactcctaagactctgtcctgtcctgtctatgctggggaatgtaaagtacagaagattacttccttggttctccatggaagtccttttacccagctgtgaggattgtaacaatgattggcggtgacatcactctattactgaacttcacatatgggagttgggagactttgaggaatcagtagggtgaatttaccaagttctcccatgagcccaggcagccggggtgtgtgtgtgtgtgtatgtgagtgtgtgtgtgtgtgtgtgtgtgtgtgtgtgtgaaggaagagtaagtgttaggacagaacagcagccatcatgggaaagggaaatcctagttccacctaggatggttacttcgtggagagggttactttgggtagttacggcagccttcagggttttcaagaataatataacatatatgatttatatttttgaacttcgattttaccactgcgttccctccagtgtacttagtagagataggatcatgtgtatcgagagctcaggctttagaatcccacaggtctggaatgaaatctcagctctgacttttactacccatgtgactttggacaatttatgtatccactgtcagcccattagataacctttaaaatgggaataaagtagtgcttgctttgcagaattgctgtatggattaaatgagataattcaggtaaagcacatagttgagtgcaaaattaatttatcacatattattagaaatgtggttgaagattgttttgttatttagatgaatcatatttaaatctttcattttcaagtatctaagacttccaaggactaaaacttccctctgaattttaccactcatcccagctggagatctaagataactatttttgtgtttgtttgttaattatttgacatgtttcttctcaaattaagggaaaattcttatttcggagtcactgttcagaatgaaaatgtgagactaagtatttgttttgcaaagcgcaacagaatagagaagaaaagttgggcattctgtagggcgacccatttggaaaaataaatcctaccccttttgaaggggagaaattaatgagatgagtgtcagtccctccctccccacccactgacctctctctgggatcacacaccaacagcctatgatgaagtgttgctgcagtgcaatggagcaaggttaccttcacagtaacagcttttctctggccagattactttatagccaaagatgtggttattttcacctaaacgtttcatttaaatacattgtaaagtgtgacctaggaaaacgagacaaaatcattctaagctgtatagagttggattgtttgtagaaatgctggacattaaccaatgactctcaacttgaatgtacatcagaatccccaggagggcttgttaagaaacagattcctaaaaccttactccaaagtaggtgtcaggtggagcctgagaattttcatttctaacaaccttccaggtgttgctgatgctgctagccaaggaaccacacttagagaaacaccttcaaagtgcatattttcgtgtcttactattcaaagtatgctccctggaccacctgcattagcatcacctgagaccttgttggaaatgcaaattatcaggtcccacttcagatgtaatgaattagaattgtattttcatcaactccctgaagtgacttgtttgcatattaaagtttgaggaacactgatctagtgattatagccaaggtctttggagagttgagaatctgagacagtcagccctggattcaagtctcacctactgccattttctagccctgtgattttgggggtgttgtcatttttcttctttttaattcccaatttcatctgagaaattgggatgatcatacttgaaaagttgtgaagattaaatgtgataatgtaggtaaaatgcatacaattagtagtgttgttaaattatgtcttcatttctttttatgtgaaacctgtcctgtgaaaccattagaaacagctgtttgaagaaggtatttgaaattctctctgaagtgttttcctatgtcctgttttgagagaagctattttcacagtatggcattagattgtcctcactatattattttgtgtatgagtgacagctgtagagatatataatggtttgagtttgccaagtcacagccccctcgtttgacctctgaatttaagggtgtgtgtgtgtgtgtgtgtgtgtgtgtgtatgtgtgtgagagagagagagaaagagatacagatagacatttcgttggaggaggagtgtgagggaaaacctagggttttctttcttctctaataataaaatatgacataggctttcaaagataaaattcgatttgtaatatttgacaacactggttagtcagccctaacctcactgatatattatgaagatgaaggttatgccagttaataaagtgttttgagaacattgaaaggtgctaataaaattggatatttgactttttatttacgtatgtatgtatgtatgttttgagacagagttttcctcttattgcccaggctggagtgcaatggtgcgatatcagctcaccacaacctccaccttccaggttcaagggattctcctgcctcagcctcctgagtagctgggattacaggcatgcaccaccacgcccggctaattttgtatttttagcagagacaggtttctccatgtttgtcaggctggtctcgaattctcgacctcaggtgatccgcccacctcggcctcccaaagtgctgggattacaggcgtaagccaccgcgcctggcctgacattgtttaattttttaaagtacagcccttagtgataatttttccttttctgtagccagagaggattctagtattttggcagttggacgatatcttatctctctcaatgccctcatcagttgagaaataagcctctttcttttagtattttatattctcaaagctcagaacatttcagagtcatgttatgtaaaaatgaggtataatggctgcagagaaaataaattaaaatgagaattgcgctaatgcaaattaaaagggttaatgggagcattttcttctgggtctcaatgtaggtctctgtacagatgattgaggggtttttggatcctgagtgttattcagcttggaggggctcttttctgaaattgctggctcccatacaaataggcctcttaggaccagtcattatgatgcacaccttgcactataactacatttttaacatttacaggtagggcggtggagctcttcactgcttagttactacccagggtaatctccttcaactgtaacagcaagtcaccaagttcttaatgagtatctcctgttggtccatggtaatgagggtaggtgtgtgggagaggcaaactgtaagacctttcgctgcaaatcctataagcacttgccactcaaagtgcgatccacaaaaccagcagcagtagcagcacctaccagcttgttagaaatgcagagtctcaggccccacttcagacccactgaaagagaatcagcagtttaacaagatctccggaggctgtgggggagactcacaggcagcttaaagtttcaggagctctgctttaagaaacattcctttcagagagggaacttaaactgagccaagatctaaaaccatgtgaactccaaattcagagaatcaggtcagtggtcaccagaacagagggtataataattggttataaaccattctaatagttgtaggtttaaaggaacatgtaagtgtgaggtcagttattcactgtattatgaaagatatgctttatagtttgcctcaaaaaaaaggaagtctgattaaatgtcctcaatctatgtggcagatccaagtaagaccccaaaggttaaaaacaaaacaaagcaaaaagggcaatgccgtgatcaattgcaagtcagagttaagatcaaaattaaaatatgaggtttgtaaatacaatggtaatagaaatttgacgttagcatacgaggctccccattgtttggaaccctggtttaaaagctagaatcaaaagaattttgtctagacctaatgcatactctcacttaagctaagtggaaatctttgcctctgttccagtaaccaaatctgtggcagagctgggagtggaggtattggtgagggttgtgggtggggagcagtgtcatcccccaacacactttgtgacagtttttaaggaattagttgatgagactcttgtttattctatggtgcagagagattagaggaagcagtttgagagcaaaggtcagactgttgatgctgggttgaaatagtctctaagatgcagacaggtatagatgtcctgccaacaaccagcaacacagggttgtccccagacttgctctcctgatattagagtctggctattcttctgaaccaaatacattattttactttatgacaagtgctattacatttaaggactttagagacactgtgattctctctgacatcatagcaaaatttttatgtgtgtgcccaagtactactactttttttttttttcctttggcttcccaagaagaggacctacttattgtttgtatcagatttttcaaggcaccttgggatataaaattttaagtctgctgaattggagaatttctatttattttcccaggggaaccctttggagttctgtcctactcagctgcgttatcccctagatttctgtaactgtattagttaggatgctttggagtgctagaaacagcaaatctggctcaaattgctccaaccaataaaaccaagtcactgacatgtaactgtaaccgcccaatgggttcaccttgtctgctgcctagatagaaccgatttatcaagacaggggaattgcaatggggaaagggaaattcatgcagagccggctatgcaggagaccggagttttactattactcaaatcagtttccctgagcatttggggatcagagtttttcaagataatttggcgggtaggggcttgggaagtggggattggtcaggttggcaatggaatcatagggggtcgaggtgaggttttcttaatgtctgctgttcctgggtgtggtggcagaactggttggaccagattaccagtttgggtggtgtcagccgatccatcctgtgcaaggtctgcaaaatatctcaagtactgatcttaggagcagtttagggagcatcacagtcttgtagcctccagctgcatgactcctaaaccataattgctcatcttgtggctaatgtttgtcctacagaggcgatctagtctccaggcaagaaggaggtctgctttgggaaagggcttttatcgtctttgttttaaactgtaagctataaagtataaactaagtttctcccaaagttagttcagtctacccccaggaatgaacaaggacagcttggaggttagaagcaagatggagtcagttaagttaatctctttcactgtctcagtcataattttggaaaggcggttttataactgaaaagaacagcctggctcgctcttcatgagacttgatacagggtacaaaggtgtcacctagagcatttttttctttctctttatttcctgtgcctttcctgcatctgccagaagatgacctaccaaggctagatccttgtgtacctctcaaatgttggccaacaactctggggccaactgctttccctttcaatttgagttggagagaaataatttttgtcccatcaatctcaggaaaatactttcaatctcaggaaaatatttcaaatatttccttcaaattcactgaagttgggttgatatagtttacctgcacagtctggaggaaagaatcctttttcccttttttgaggagatgttgtcttgctctcttacccaggctgatctcgaactcctaggctcaagcaatcctcctgcctcggcctcccaaagtgctgggattacaggtgtgagccaccatgccctgcctgaaaaaatcacttttgccagagggatagctgatttagttagtgcatgtgctctatccctggagccagggcagtttctaaatggaagtcagtggaataaaattctgggaagagaggtaaaaaaatgtttaccagttttctcagaatgccagctctgtttgacacttctctctcaggactttgaagactccaagaggaatgtattattatctatattctactgaggcaagccctgaagtcaaaagttttaagtgaaataggtggggttgtgctactggtctgccaactccagatccttccagggctcatctgaccatgtaggagtctagtttatggtatccacccagctggtgctaggaggtgagtgagaggaagaagaggcagactctttctctctccaattagcctctgcctctctgtttggttaataagatccatatatttaatatgctcaatgtgctttaatgtgttaccaaaccatttgagtctgttgtcacataggaaatgtagaacttttcaaacactattaaattcccttaatcgattaaagatactgccaaaatggtttacatgaaagaactaacataatagattaaaatatctttttcttttacatttattcattacattaaattttatgccatggttatagatctgaaactaattaaaacaattatacattgacttttttattcctaaatgtatcatgtttttagatgtgtaaaaataagaaacagattcagatttaaaaaataagctatgactcaaaaaaaattaatgtgaaatgcatctggaaaatttctcttttgaaactgaaatattcctcttactaaaaagttgacaatataactctttgtaacacaaagtatatcaggagaatctttggcaaaatggtgaaagaaactcttacagaatatgtaagtcacctaagttccagaattcaatctgtgctaagatttttatggctcagagggaaatatcatggactctttatgttataaaaggagtgaactatgtgattatatcttattctgaatatcaactgtaagaagcagattctcacgggcttcatccaatatgctcttgtaattctttctaacatatgtcctctattcacgaagaacaagaaaacatctccagtttaactgcattttttgtttgttttattaaattctttttttgggtatttgcacgttccaactacccagaaaattactcaaaatatttgccttgtggtctctgtggcactgagcatttaaagcaaactagtgtagttttggcttggtagagattgaacaccctttcgtgtttcaaatatttttagagaagaaattcagatacaaaagccatataagatttatcatcactttgacattaagggagcagccatgggttaaattacttgctttaggtgggtaagggaaattgatattacaccgattctgtcctcagcaccagactgtgtaatgtggggtcaccagaaacctctgacacagctcctgtcctcggggtgtttatgatgaggttttgagaaaagccagactaataagaattagattcacaatgccatgtcttagcaggatgatatagtttgggtacttgtcctctccaaatctcatgttgaaatagaatccccagtgttggcgatgcagcctggcaggaggtgattgggtcatgggagcaagtctctcatgaatggtttagcaccctccctttggtaataagtgaattctccctctgagtccacatgagacttggttgtttaaaagtgtgtggcacctccctcctttgctttctttgttcctgctgtcaccttatgatacccccctttaccttctgccatgattgaaagttttctaaggcctcaccagaagctgagcaaatgttggcacatgcttcctgtacgtcctgcagatccatgaatcagttaaacctattttctttataaattatccaacctcaagtatttctttatggcaccacaaaaatggccgaacacacaagatatgtctgcttggcctccaaaataaatctcaggtctctgattctgcctctatcaacctacattaggccaccatcgtttctcacctaaaccacaactatattcccctaaatgatcttcttgcttcagtttttttccttgtactggtttatcctacctatggcaaccagagttattatttagaatgtaaaacacagcggctgggcacagtggctcacgcctataatcccagcactttgagaggcagaggagggtggattacctgaggtcaggagtcccaggtcagcctgaccaacatagtgaaaccccatctctgctaaaaatacaaaaaaattagctggatgtggtggtggcacctgtaatcccagctactcaggaggctgaggcaggagaatcacctgaacgcgggaggtggaggttgcagtgagcagagatcatgctgttgcactccagcctgggtaacaagagtgaaactctgtctcaaaaaataagataaggcaaggtaagataagataaggtgagataagacaagatatgagcacatcataaaatgatcttgccaaaaaaaagaccattcattgatgtcccagtgcacttaaaaatcctaactctttcttactgcctggaaatctttacatgatcactgctaaaatctcagatcttgtgtgctacccctctgcccctaaggtcactaccctctgatcacattaactttcctgttctttgaagatgtcttggaacttgccattgtttctgtgtgaaatgtgtttttcctgtatgcttaggtgtatcactcctcgttatccagggttcacttacatctcgcctcagtgaagagatttagcttgattgccccatccaaaaagatcttatttgttaacttatttacatggatactatgtcttccccaacttcaagttcatgaggtctgtgtttctgtcttgtttatcaccccaggctcaatgtcttaaaatagcacctcgtaggctctcaataacagaagatggcaccaaattaatacactgaaaatgccacaagattttagataaatgtaaaaacattcaggctttgattatttggtgaacattttgaggcattacgtgagttggagcaaaactcttgaggttaaataatatttgaatgggctctgagaggcaaggggagcgtggccatgcttgtccccccacccttatctgtattctgataagaaaatacagaataaatttctttgaaattaaaaaataactcaaactctctgtaattatttttctttaattttctgagagaaggtttttttttaatttggagaaatttttaaaaattaaataaaaactagaaataatacttaatgtcttgacaaagtattaacttgatctagtttcagaaagatctcattaaactgcctgataaagtgattattcagtgccactttcatagagttttcagtaattatctgaaatgatttttagaatgaggcaacgttttcctttttttttttttgaaacagagtctcgctctgtcacccaggctggagtgcagtggcgtgatctcggctcactactacctccgcctcctgggttcaagcgattctcctgcttcagcctcctgagtagctgggactataggcacgtgccaccacccctggctaattttttgtatttttagtagagatggggtttcatcatgttatccaggatggtctggatctcctgaccttgtgatccacatgccttggcctcccaaagtgctgggattacaggcgtgagccaccgcacctggccaacatttcccttttcagtagcaggtgaaaccgtcttggtattgacacagaaatgctgataggaaaaggtgatgaactcatacacactaaaaatatgacatctacctctaaaagttttagaaatatgtggaaagcattcttggcccttttctcctaagttaagactgttcgcaaatcacttttgagagcgaagtgacgatgacatttttctcactcaagtcctaactcatttctaggcatataatttgaattaaacccttatatataattttctaattagatttttcttctttcatggctttttaagctttacataacctttgtgcttcctttttccattaatccttcaaatgccagcatcctgccaagagggtatttaccgcagtatttccatcattgttaacagagccacaagtttttttccagtatattgaaattacccatccatgagaaaatgcagtcttggatttttaattatttagttgacgcttattcaactatatgatgtaagtaggccttttctccctaatgttttattaccagttaaagcacagacaggtattttactttaatttagatatagagtaggtaacagagagctgaaattttaaaaattagataaattttttggtagttagttttatagttaatcttctctctttttttttttttttgagacagagtctcgctctgtcgcccaggctggagtgcagtggcgcgatctctgcccactgcaagctccgcctcccgggttcacgccattttcctgcctcagcctcctgagtagctgggactacaggcgcccgccaccactcctggctaatttttttgtattttttagtagagacagggtttcactgtgttagccaggatggtctggatctcctgacctcgtgatccgcccacctcggcctcccaaagtgctgggattacaggcgtaagccaccgcgcccggcctaatcttcttaatttgtcacttagagtagggcagtcgccacaatatggaaatgagctgggattagtgttatcactgggaagtgattgtaacttttgggtttgtaccaagaagtatatagaattgcttaaacttctgcatgatcaattactgcagatttttgcacctagctccactacgtagtccatcacatttcatagggcgatttctccactcctttatcatagaaccttaggagagaatgttcttttataactcccttgatggagttgcttaatgctgcctttaatttaattgaaaatggttgatcaataaagtcactttttatggatttatttctactgtttgatgtggcaaatcattaattatcattacctaaattagcatggattgccatgaaagtgaaaggagtaaattgctttatggatttcctagtgcatagtacacatagaacttttctaaatatacatcctcttcagcagttagtttgtgccagatttcaattcctacgctacaagttctccagcaaactagaggtgtccatgtccaagtggacatgctaaaaaattcaaattttacagaaattttacagagaccttacttttgtaaggtctccggaatctttaaaaaaaatctatttaattattgatagaattttagtgaccaccatagaggggagtacctgtgtaagcagaaagcaggaggaaatgaacccatttccagaaaacgaactagacattaaggagaaaaaaagaagagaaagaaaagtaaaaagaaaggagagcaaatacctctaggttttttattctgaaagcccatgttatgggttgaattgtgtatctcacctccgtcctccccgggaaaaaaaaatacacacacacacacacacacacacacacacacacacacacacagacaatattatacataatatgttgatgtcctaacctctagtacctaaaaaccttaaaacctctagtacctcaaaaattgtatatagtatgttgaagtcctaacctctgttacctgtttggaaacagtcttaacagaggtaatcaagttaacatcaagtcatcagtgtgggccctaatctgataggactagtgtccttataagaggaaattttgatacagacatacatagaaagaagattatgcaaagagacacagggagaagatgccataggcaaaccaaggagagaggcctagagcagctcttagaaggaaccaattttgccaacaccttgattttggacttctggcctctagaactgggtggcaataagtttctgttgtttaaaccatagcatttgtggtagtttgttacagcatcactagcaaactaatacagcccataatttatgactagcatttcatattaaaattaaacatattatatgaaagcttccccaaacactggaatactataatctataagagttgcattaactattttcatggaacgtcagaatgtggaatccaaagaaattcagagcctaagctgggtactatcaaagcattttataatcaaacattcaagtatgctctgattgagagaattgatttccatatgtatctttaataaaggaacccaactttcatactttcattgtattaacaagaacaaggcacagactttgttaagcctgattctgaatgttaagtaagccaagggtgaggaactaaaatttgtagagaattgagtcatgtagtgtctactctactgtgggactctggtgttggaattatcaaatgacaatgtgaatgcatcatagagatttatcctggactagcttacacttggaccaaaggtgatttatcaggcttatcattttatattgaagtccataaactctctcttctgcatccctctgttcgggagtgtgtgtggcatagaacaaatcagcctttggcacacattggaggaaagggtgtgtgttttgttttcataggttttttttagtgatgacaatcaaaagcccattttcttgattcctatggatatgaagccgattaagtattgataaggagtaaggtattagagtttaaaatcggggccatctctgagctacatggttaggtcagtggcacctttctctgaatccataatcctccaagccatttcaggccttttatgcagtcctactgcaacccagaactccttctaggccttcctctccaggagcagttatgagattgagtgttaactgcttataagacaccatatgctacacaaaactttttataaatgttgtgcttatatcaactttgacattaatgctattataatcctcaatttacagaagaagaaactgaggcttgaagcggttaaatgacttccccagagacacatagcagtatatgctagaggcaggactccaacccagaactggcagaaaagctgatactttcaaactttcaactaatggtctctgcagcctccaaagtatcagatttctccgtcaaatccttcttgcctggtctgtctgaccaactaatctctgataatgtaacgaaggttataataaatcccttccagagaggatatttgcatttaactggatgtttatgaaataatgtgctggcagaaagaaatgatactcatggtgggaatttctcattctttttctggtggaatgtataatcttggacaaatcatgaccgcaggagtcttcattttatcatctataaatgccaggattgggttaactactgtctaaagatctcttccagattcaaaattctatgattctttcacattaaatgcaactccttttcaacatatgtgtatacttggccctttattgaacctttttataagctgccaattggaaatacacagtcacggtagatatgacaatgagcaagtcacttaataactatcagcctcagtttcctaatctacaaaaggaggctattaagagcacctacctcacagtgttaatattatatacacaagtagcaaaatgtctggaacagagcaagggctcactagctatagctttaataacgtgataactgatggtgtgatcagttctattatcatctccctgcagaaatcacagtttatctaaggttatagtaaaagcacccatcatgacttcttttaatcataaagcatttcatgcagagtgcatattttaactttgtattctaaaggcattggtgtctcactaaaagctgggcagtatttatatcaaacagtatatcatctatgtgttcatttatgcatgcagactttcacccccctccaagctatgagaacaataggcgctttaaaagtctgaagcaagaaggatattagctccatgaatctttattttaaattacatttctgagttagaagtgtcaaaatggtagaacaagttaagcaagattgcattccccagtagggctattgatgttggttgcaaataaattgctggagcaggtgatgatagcaaagtccatgccatcttttatttagcaaagtatttctcttgttaacagctccttctgcatgctttcctttcttctgtttcacatcaatcatatttgacacattgcccaatgtcagggtaaaaaaaaaatgcagcgtctggctaatcatccagatgtttggcctcacactgactgaaacatctggttgtgtagctaaatgttatgttctttcatccagttattttgtgttctgttagacagaactgaagaataaaccctaggatcttcttctattaggataaagcttatagaatctcgaacttgagattccagaaccaaggccttactggttctcatagttgcacagctgtcagcagaatccggatcaattgagataatgtgtgtggaagcattatatagtatgtggaggcattatatggatttgagaagctcatgttaaaagaattctactccctttacttggttatacaatggccaaagaatgtttgtcttctggaaagaagttttaaaacagaataaaaattaattggtgttagaagccaagatttcagagctagaccaataataataacagctaagatatgtctgatgctaactctgatccatgaactcttctaagtgctctgcatagatgtaaaaacaatcctttgaagtggaccctactctttttttccattttacaaatgaagtaactaaggatgagagtgcagttaacaatttaccccagttcagaagctcaaaatttggattcagacaatttgatttcagagtctacgtatttaacttgtaaacttcctctgaaatcaaaatgtttattcagcttccaacaccatcacttattaaacttggttttgtcaccttaaagtggggatagcatgacataccttaaaaggattgttgtaaaggttaattgaaaggatgcatgtaaaacatttaacaatgttgttttttggtaagtagtaagtaaaagtagctattttttctctatgttatgcaatatttggaatcaaatatttcaatactaatttaaataatatattctaataatctcactttctgaaaattcattcaatataatttttttttcttggaagaacattcctagcaggttaagcacttttgatcaactcttgatataggctgttcttaaaataattggaagtccacaaattatatgtttctggaaactattctgaatatggaaaattatattcctttttctttttaatgaacatataatgagtatgtattaaggggaagatatatgctgagcttcctcttgccttccttttctcccccttcatttctgtcaccctgcctttcctatcttcacaatggtcctgtacagtaaactttgtttgcttttgcatttgaactttaggaatcaaggtttttaaagaagctgcatcatgtatcataaataaaaacgaaaaaaatgaagtgtaatattttaaactgttttagaacatgaggctcagtgttctatccaacaggctatgaaatattgctgttactaataagtatgatgatgaaagccactgattcttggacaactactatatgcctgacatattgctgggtgctttgcatacattttctcatttaacgcttagaagttcttgtgattgacacttgggtatcatgagcaactttgctcaccattttttcctatggtccggcgtctttagtcacttgtattactgttgttcagagtgacctttatttgattcatttacctttcagaatcttctattactcatgtatgaggaccacacatttataattagggagtaaatttggtcatcaactcggataaggcaatgggcaaatctgacatgttttcaaagacttttcagtatgctaactttcagtagggctggtttctataacagctacgacatcttttgtcaacactcaggctgattaaattgcaagattataatgttttccgaccctaagtgaaagtgacacattcttgttcttttagtggcttcataaaagtcaaatgtttaatctcaggaggaaatttaaaagatggaagtaaaaccttaatgagatgcaacataaataatagaagtccctttgcgtgaaatgacttgtgatgaggtttcttcaaaggaacaaactataaaatggagtgtttcagaaacctaaaatacactagtaaacactgcgttttaaaaatatggtatcaatgatactcagcattcagtaaataaaaagagttagacaactggtgtctgtaaaaatgttaattttccaaaacactataaatgtatcaccaaaaaataaacattttttaaaaaaattaggtgactattttcatgaatttttagtccatgaaacctgaggagttacttgaccacagcaaagattctttctaatcctttatccagccttttgtgcaatagtacctcctgttccactcacatttcacatgcctgtatgcatgtacattcagatgtgcctgtctttgtctcccagtgcttgttacacagaaggtattcaagaaatggtagccattctcacaatatcattcctattaccatttaaaaatgtatgtggaaaagggtaaagtgcaaacctgggttgttaaaataccggaaggatatctataatttaacaccagttcatttttgttttcaaatcactccaaaatgccctcacttattggtttagaaataatgtaacaaaacaaattgtgttgtgtctccaaagaacattttgctaagtgccagagctgtatataacactaaagtagatgctgacatatgaggattgtgagagatgaatggtgatatttggcttttgcttcccaagtataggtcgtgtccgaggtatagataattgttgttggtttatgataattcgacttgcggagttaggtcagtcagcatagatgcatattttttggatggttttttaacaatgttgcttaaaattttaaatcagattatttgccaaaggggggtgacaagatttggttattagcaaaaaggaaaatattaatctagatttgtttggtcttagtactgattatgaataagtcatcaatagttaatgataaggaatcagtctgctgtgccatattggtagatgaaatgctgctactcctcctattcctgggcttttctgtcccccacccccttccttccctccttcctctgtccctccaactcttcttcacatctcccaactcccccaattcacttcttttccactgcatgccatgttaccctatgcctagttatgatcctaattgtaaccctagttagagtagacacaaagtaaactcaggagcagggattataaagctcaaaattgttcctcggctccgcattttgtgtttattaacctattttacccttgcagcaactccaagcaagtctgtaaattttagcattgagagttctccattttgtgagacccctctgtctggtcaaagtgggatgacagttggtcactatagcattcaataattatccactatggttatttttattcttacagcttttattgaaagtttctttttaaccatagtgccaaagacaaaataaacaataaatattaatgattttcttggcttctatttatgatattgttattttacttttaaattctttggtatcttctgccctttcatcttttctgttctgttcagtcaagacttagctgatcctatctcaacctcaaacatatcttttctatttcatctcttgactagttagaaactttcacggcagctaaaatctcccacacaaatctgagtaaagaaaccctagaggtcaaagattgtagtgtaaataaaagtattttcctttatatatgatataatttatatgtgttatataatatgaagtctcaattagaatagggaaaatgaaattcaataattattagagtattatttgcgaagtgttctgctaatatttttcctcctattaatcaaaattagttttgtattttttttccatagcaaagtagtctaacaatagagaagaatgtcttttaaaagactaaattaggtgaaatctattctttttgttaaattatcctaatgtaaaaccaggtggcctgattaaaactagccttctttgctgcctcctactgtttcaagaaaaaggtcgccttaacacttagtttctcttgctgtcttttgtttggagtatgtgtgggggtgtgttatttatgcaggcatagctcctcattatgggaactccaagagcctgattgtgactgttttttaatgccgcctgctgtgttgtccttaaactcttgcttttcctggaatgcacaactttctcccagctcctggtttagccattggtgtcatgtcttcatgctgcatccttgtgcctctgaaatcgtgttcaaaagagtgtttatgtttcaaattcatccacagtctcaccacatttaaagataattgcagaaggtaaaacactattaataggaacaaatttactagcatctcttttactatgtgtcttatgcataaagcagtttctggttgttgggttatacagtgcctattgtgatagtctattctaccttcacctcccgccccactgcctccccatttaactaaagctcctgctgatatgttcaatttacttttttttcttttttttgaaatggagtctggctctgttgcccaggctgaagtgcagtgatgcgatcttggatcactgcaacctaagcctcctggggttcaagtgattctgctgcctcagcttctggagtagctgagactacaggtgggtgccaccaggcctagctaatttttgtatttttagtagaggcagagtttcactttgtggcgaggctggtctcgaactcctcacctcaagtgatctgcccacctcgtcctcccaaagtgctgggattagagacgtgagccactgagcccagcctgatatgttcaatttgataaatgaatgtgttgaaagatataaaatgtgttaatccctaattgcatgtggctgtgatatttaatatggctgattctaatggagtttgtaacttatggggaacactatgaatgggatattataaatatttgtatgaagtaatacaagagacatttcaacagaaaaccatgtgatctatgccctccatcattattttctttctgtgtaacaaatgaccaagtaaaagtagtgaattaaaatatgagtaagtctattttcacagtattcataatttattataaacttcttttttaaaaaaataaaaaaaattaacttctattcctttaacaaagcaaagcaaaccaacattattatcagctaatgccatttgatttcggtttggtttggtcagtctcagggtggccaatcatttaagttttctgggactgttccaatttaagcactgaaagtttcacttcctgggaaaacacacactcctttgagtatttaccgttgacttccaggtgacccacttaagggcttcttccagaagggcaggcaataagactatcaagactcttcaaagcactcttccccaaagccattagatgaggtccaattttctcagcttgatatttctgagaactgctcttcctttatttccaggatttaagaaaaataaaataaactgatatatatatacatacctttagaaggattcagaaaagaagaaatggccgtttcaccccaatatgtcactatagatatgaatgccactcatagaattgacacgtcatgtttttaacttctgtgctttaggattttcctgtttgaattgtttatgtgcatgtgattttggtggaatttcttcccctttcctctgttccttgctccttcttttgctcagtcagcataggaacatagctcccacactaggaagggctggaggttagtaacatcaagcagtgggctttcaagttagtttgcaccttggtttggaagtgtttgctcaggtctcagatacacaggagactgtgtaatcactcttgtggcatctactacacacagcacgtgagttattcctaaactgagcacaggctcctgggtggtgaatcctagtctttttatctcctgcaggctaagccttggtatttccttcagattacaccaaaaccaaaataatgggcaatgttgtccctgaatgttcaaattaggttgagtacacagagccaaagactatcaaaagaaagtgtcctggccgggcatggtggctcacgcctgtaatcccagcacttcgggactttgggaggcagaggcgagccgatcacgcggtcaggagatcaagactatcctggctaacatggtgaaaccccgtctctactaaaaatacagaaacaaaatcagccaggcatggtggcgggcgcctgtagtcccagctgctccggaggctgaggcgggagaatggtgtgaacctgggaggcggagcttacagtgagcagagatcgcactactgcactccagcctgactctgtctcaaaaaaaaaaaaaaagaaagaaagagagaaagaaagaaagaaagaaagagaaagaaagaaagaaagaaagaaagaaagaaagaaagaaagaaagaaagaaagaaagaaagtgtcctaaaagaagtggtggtacctgtggggcgtgtttggtgtcagagtgtttctgctaaggttattttaattagcctcctcccaaagccctccccctattctccttgaggaactgtttgaccgtcacatccttagaaaggccaaaccactactaactctcctgaccctctgccttatcctcatacccttaaagatgtgacttaaaagagaaaaaattatgttgttaatttcatcaactagggcaaaggggaaaaatgttcatttcgatgcaggaagttaatgggagatgggaggaagctacggttacaattcccataatacattaatgtatatttaatataccaccttgatttgtggcctcaagttaaataactacatatgtttgcagcataattcttttcataattgtgtagcctcaatgggataacatttgtattagtttccataatcgaaaatgtcaaatgcctgtttccaccttccaagtattttggttttaggtagcaaagacaattctttcaatgcgtatctgttctcattaagttctgattgctttataaagaaataaagtcttttcccattgttctgctctgtggaagtcaccttcagagtaagggtgggggtgactgtccttgccaatttttaagtaactgccttgcaagggtgattccctacagagttattttctgcatagtttccctctgggtacagaatgtgggaaagtagatgcaacgcattttagagtagtcatttgctctaataattagcattatagtacagtgtatgggctggcttcctgttgaggtctagatttctacatataatgtaggtttttctattctgtcctatattaatttcattggagttactctttatcagagcaaacatccgtaacatttagtctttttttttttttttttggagacagagtcttgctctgtcgcccaggctggagtacagtggcgtgatcttggctcactgcaacctcttcctccaaggttcaagtgattctcctgcctcagcctcccaagtagctgggattaccggtgtgtgccaccacacctggctaatttttgtatttttagtagacatggggtttcaccatgttgagcagagcaataactctgtagggaatcacccttgcaagccagttacttaaaaattggcaaggacagtcacccccactattactctgaaggtgacttccacagagcagaacaatgggaaaagactttatttctttataaagcaatcagaacttaatgagaacagatacgcattgaaagaattgtctttgctacctaaaacgaaaatacttggaaggtggaaacaggcatttgacattttcgattatggaaactaatacaaatgttatcccattgaggctacacaattatgaaaagaattatgctgcaaacatatgtagttatttaacttgaggccacaaatcaaggtggtatattaaatatacattaatgtattacgggaattgtaaccgtagcttcctcccaactcccattaacttcctgcatcaaaatgaacatttttcccctttgccctagttgatgaaattaacaacataattttttctcttttaagtcacatctttaaggatatgaggataaggcagagggtcaggagagttagtagtggtcttgaactcctgacctcaggtggtccgcctaccttggcctcccaaagtgctaggattacaggcgtgagccactgtgcccagccatttgtaatatttacagagcattgctctttttcttatcatggaaagttattccaatatctattcattctatacacatttattaagcatctactatgtgccaatgttaaagaggtgaaagtgtaaccttggccctcagactgactttttgcaggttatgctgaaagatgaatgctcagtaatagctcgtgccttaagacgtggccgagcaagctttggaggtaaaatagctcatggagtttttatttatttatttattctttaaaaatggtcacaaagatttcagataaacaatctgagtatggctaaattatttttcttaggtaaacataggaggcaagaaattaaaagggtgggagaaacattaattaggctatgctcttatcaagtagtgtgaccttagcgaatttacctaatctttttgaacctcagtgtcctcatttataaaatggaggcataactttttatgaagattaagataatgtgtgaacaatctgtgcagtagtagttgctcaataaatggtagtgattttcacatgtatttggactattgtagaatatagaaaagaatatcatgcaaactctagtcctttaaatatgagtgaggaagaggaatcacctgtgtgtatgtgattaaagctgttagctatgatgaaggcagggtgatttttctctgaagggtaattcgagtacagagatattactttgaagaagtaatatgttaaatgaaatcattggggctgaaagtggtaacaacattctgggaaaggagccgtttactctcttcacctctaagataaaccataatgcatgcatgtatttaataaactgtgatagctagagctgtttcactggggcatcagtaagctatcctcaacccccttttcttttcttccagcttttcacttccaaccccctaagttttatcagaattagttaatactgagtccagctgaatacattgcttgttataaatagaatgctttctcccttcctctgcccctgaccaaacaattgattacaaagtttatctgctgagtgcggtggctcatgcctgtaattccagcactttgggaggccgaggtgggtggatcacttgaggtcaggagtttgagactagcctggccaacatggtgacaccccgtctctataaaaaatataaaaattagcccagtgtgttggtgcatgcctgtaatcacagctacttgagaggttgaggcaggagaatcacttgaacccaggaggcagaggttgcagtgagctgaaatcacgccacggcactccagtctgggtgacgggctaaatagaatgaaaaaggaatgacccatacctgaaatgtttaacataataaaatgactgatatcgattgatgacgttgagagcaatgaccagatataagggaacaatgtgtttttacttggattgtagatatcaagaatacaggagaatggaatgggagggctaacaactctagacaacatggctgcaatctatgactttgcattcttgctataatttactttcagtgcttttacaaatgtaagactctcgaggccagcagtgtatcttttacgctattcattctacttttataattattattattattattattattattattattattatttgcaacctctgcctccaggtttccaacaattcttctgcctcagcctcccgagtagctgggattacaggcgcgggccaccatgcccagctaattttttattttattttattttatttatttattttttattatactttaagttctagggtacatgtgcacaacgtgcaggattgttacatatgtatacctgtgccatgttggtgtgctgcacccattaactcgtcatttacattaggtatatctcctaatgctatccctcccctctccccccaccccaccacaggccccagtgtaagaaatacaataaacaaagtatcttttattttggctacgtagttatgttgagggtcattcatcgtcctccagtttagcctatttggaacggtactggttaatctcaataaacaaataacattgtcagtttaattgttcaattattggagggaaataaatatatattaacctaaatgttaaattctgcaggaaaaaaactgattagacatagacaatatcaacatgggtttgttaaataacttgccttccaacaggacccaaccagaaattggaacctatgtttcatagaaacatgattcttagaaatgatctttacacaattgtaaaacaaagggaagattatgtgacgcagatgccaagaaatcagacctaggcaccatgtacaagtatacaagcaatgccgagttcatcagtcccatggctgctgctaaattgggctttatccccagcaaattaacacagttccagcaggcacgataagtttactctgaccagattactgggttgaatggcatatgccgttattttagaaagatgcagaataacatttccatttagagtcctggcagaacaaagcttggatttgggcaatagataaaaacacatagagagtatttgcagatgcatgtgatagatagaaatggtgagtgaccatttagaaatttagaattggaatttttttttttttttttgagtctcgttctgtcacccaggctggagtagtgcaatggtgtgatcttggctcactgcaacctccacctcctgggttcaagcaattctcctcccccagcctcctgagtagctggaattataggcgcccacaaccgcacctggctaattttgtatttttagtagagacagggtttcgccatgttggccaggctggtctcaaactcctgacctcaggtgatccacctgcctcggcctcccaaagtgctgggattataggcgtgagccactgcacccgacaaaaattgtctcttttttgatatttcctagagcagtgtggctcatttagattgaaatatctgtcagaagctatataccagttccattgatttcaacattaaaatgtctccacatattcttccgcatccttcttccagctcatagctgtaattagtgttatgctccatggagtggcagaagaccagctgaacaaacagccatgtacgtaggaacagttccaggcagctaaaagagcttcttcctcacttgccactatcttaaatggtatctggtgtctacagttgctccttctactttcttaagaaaaaaaaaaaaaaaatccaaatggaaaagaggactctgaagacaaattagtcctttacaattataattttatttgatttcaaagcagtacttggtatagcaccagtccaaacagattggaagaatgatattttcattccagctcctgcatagaatatctttgtgcttttcaattgctttagggagcttgcaacaatagaatcctgttaaatctaacaccattttgaactcttccttgccgatattgtgataagaaatttatacctggcccaggtttatctctgttgataatgggcttcatggctatagggacatgttgatatggtgagctagcacctatcattttgacacctactctttagtagacatagagaataatgggtgcttggggtaaagtgctggagaagagtgtcagcagtcagtgtgtatgaacctagtgatggatgtctctgtgtttgtgctgtggccatatctgtatggctatcattctttcttcctcttctcatttcttttaattttccttcaacagtctttcatttgttgcttcaattcactccatttctccccagttcttcttttttctgtcttctataattctagataaaattatgacatgacttaaaatatcctccttttttgtccgtgattgctttcaatggttctaatgaccccattggaagtctggtgattaggccctgaggggccacagtaatggaaaccttgtgttcagccttcataagggtgatccaaaaatgttattacattacttacacctctttctgtaagtattttttcttcattcacttcgaagtatgggatgcttcccatgtgcaggagaattagctcattcataactcaaaggcaagtaatttcatgttttgctatttataagagaggagtctatcatgcaaggatgcaaaggagtatgaaatcagtcacaaatgtaggaaataaaaggcaataagcttccattaaaccaaacaaaagaaaaattaataattaggcagtctctttgcaagtacataataataatactctatttttcaatgaatcaattaggtaaaaatgaaacaaaataaatgcaaagagagccctcaaaaatatatcacttttacatatgtaatataagttgaacatctcattagaataatgtgacttttttaaaatttatttttgcttcctagagttcataaatcttcaggtggtaagtaggggttctttagctattcataatgcaacttgcttaggttaattagtagagaccctttcccttcacagctgaatatgagtgcccctacttactattcaaaaatccccaaaaccagcactcttctatatattggtgcttggaagagattgtatttttcattgacctgcaatattaggtattttattataaataaagtctcaaacaggctttattttatttgtcagattctcttttggtttcgtctcataaaatattagctgaatagttattatataaaaaggaaatgatcagaatatcacatttcgggtggtggtgtttagtttgtgggttccttcatgtgacaggttgaactgggtggtagagaattctgagttctgtacaacagagtgattgatttctcggtttgcatttcttggcatctggcagtgacaccactgcagaccgagagcagaaaatggacagtagggaaaaatgcaacatttctacttggtccagctgcctttgaaggatgctgatgtttcattttttatttcttaccccaaacatatttatttgctgagtcattaaatagggcaagtgttatttctttctttgtatttgccatctcaccacagaagagttttattggccgggcgcggtggctcacgcctgtaatcccagcactttgggaggccgaggcgggtggatcatgaggtcaggagatcgagaccatcctggctaacaaggtgaaaccccgtctctactaaaaatataaaaaattagccgggcgcggtggcgggcgcctgtagtcccagctactcgggaggctgaggcaggagaatggcatgaacccgggaagcggagcttgcagtgagccgagattgcgccactgcagtccgcagtccggcctgggcgacagagcgagactctgtctcaaaaaaaaaaaaaaaaaaagaaaaaaaagaagagttttattaaaccatctcgaatcgatattgttttggcacaaattgcactaataacttgaatatatagttttgtttttttaaaggtgccttcaaaatctgatacgtataatgtatgttaaaattgatatttctgtgaaagaggttaagatcagaccgctttctgattgcagagataaaattgatagttaacaagtatttattaaacatctattatgtgactagtactatgctagggcatgatgaaaatgattcaagatgaaccatgcaagcacccctctcttcagcacctctgtgtgtaaaacataaacagaatgctatgattaacactgaaagggttcagtccgggatacttgggataaaaatcggagcactgataagttacttgtcatgtacttacttttttaaaaatttaaaattttttaattatgggtacataataagtatatatgtatggtatacatgtgatattgtgatacaggcatataatgtgaaatatcacatcaagataattggagtattcattacctcaagcatttactgtttctttgtgttaggaacattccaattccacttttttaatttttaaaaatatgcaatacataattgttgactatagtcaccctgttgtgctatcaaatgctagattttattcattctatcaatgtttttgcacccgctaactgtctctacctttcccttctctccccaatacccttcccagcttctggtaactgtcattctactctctatcttcatgagttcaattgttttaattcttagctcccatataaaagtgagaacattccatgcacttctaatttagactcttctcctctttctctgtcttctttttttccatagctcactaattttgggcatctcttctcatttacagtagcttgctgctcttcattcattaattattacaatatataattctaccaagaagcccaaagaactatagtgtttttatgtcattattctcagttcagaaagaaagcatgtgtgtggcacagggaaggcatttgaatgaatgtatgcattttctggatagcattctcgaacagagatttgatgagagtcacatggataattttaacttttctagtagcaatattaaaaacacagaaatagcttctcaataactgaatcagtaatccatttttaaaatctttttcaattcattaaaattaaatagaattaaaaactcagtcccttagtcttttttttttttttttttttggagatggagtcttgctctgtcacccaggctggagtgcagtggcgcattcttggctcactgcaagctctgcctcctgggttcatgcctttctcctgcctcagcctcccaagtagctgggactacaggcgtccaccaccacgcctagcttattttttgtatttttagtagagacagggttttactgtgttagccaggatggtctcgatctcctgacctcgtgatccaccagcctcagcctccaaaagtgctgggattacaggcgtgagccaccacgccctgcccccttagtctgactgaccaaatttcatgtgtttacggattgacaaccatgtgggtagtgcaggttttggatgcatggcaggctgaagcttatgtagcacatatttgaccttcacattttattaagtctaattttttaaagttttgtctgttcatttacatgtggaaggatgatagaaatataggaagagacatgacagaaagcttgcctaggactcagatcaaggattcagatttcccaattccggcttcagggccctgttctgtaacatcacatcagggaaaggaaaatgagagaaaagaagaaagaataagaactaatgttaattcatgtcagacacagtgccaaagatctttatttgcattattgttattattttttaaaaaataaatagactagcacgtagcctagcttacacacttctcattgtatagatgaggaaactgggaatcagttaaactttataaccacaccaagatcattgagctagtaagtggcaggcttgggatttaagaaagcttgtaatgatgttacatttgatggtttaaactgtgctgtgggaagggaatccaagaagataatcccatgtttctgcttcttgtgatgtttgcaaatctgtgttctggagtaagtctttgagttgactcttggagcttctgaaacgtctattggatatactataaccaaagataaataaataaataaaaagatcagggttcctgaacgttttcatctttacattgattgcaatgattacaagtgatcatttcatcacttggagcattattacctctatggggctttacatgatactgactttgtcaataaaaggacatattaggagcaggatttctgtttgggccagaacaaggggacataccctatttttaaaattccccagtttaggaattgaagtgactgcatactaaagttggccaaatttcatgtggctatggaatgagaatatatgaaaagttggttgtaaaaacaattaagaggattggggcagactattttatggatcccttcctccttagcttctgaaatgaactaacattgattctacaaccacttattaaatacctactttttgccatggctgatgctaagtgttgaggctagaaatgcatatgaattatattttaataagcacagaataaagaaaacttgtcttcctaatttttactttaaaagacttttatctcattgtttaagtgccataattgtacaaagcatgctgttctgagttcagtgtttcttggctcattctcagtcaatactctgcatagcatctttgaattccttactcatcaaagggtaatgagttaatttgtgtactctacctctgccaccttttgagctgtgttgttgaccattccctatacatttgcatctctgtctgccagaagatgtaccaggaaaataaaagcagcagaaaatcttataacttcccacctagacatcagtcaccatcagagtttggtctggaaacagaaaagtttatttaaaacaaaattggtactctgtgaatatttcaaccatttgttccatttaatccccattagtgaatttgcttagattaatttttttgtggattccatttccaagaatgaaagcaaaataattacatcaaaaggccactgaaatcagccaaattctctggcaggaaacttattctattcagtcacattcaaactatcaggtatgaaaaatacctttcaccactggataatacaacaatggagttggaaaatcaatcgtgtggtaaataagcaaaaactacgtgcaaacagaggaaagaagagttgttctgaaaatggtatttcaataaaagttatagtgatgacgagcagtgtgatgatgtaggaagttccaaaactaggtagagggtataatcaaaggtgggtacaatggaacaagcctggaggcaaggacgggccagtcaggaacaggtgggcttatagtgaaagaaagtggaggctttagaagtagagtatttgatgaattcttccgtccattctattttggcttctatgtcaaggaggatgacagatattcattgtgtagttttataggaaaggcgattggtagtgacttcaatgttataaagaacttggccaagtccataaaatgtccatggtgtataacaaatcttttatggtgagtgatccatggaattaggtacttagaaaagtcgattgaaacatattcacagaaaggcaaaggtttgatgacctggtgcatggaatgagacagagacactgagaaattttgattgtacaagtttttcctaatatcccacttacatcctgtagcggtgtgggcccatttattcttttttatgtttggtttccctgtctcatggtaaaatcatggacagatgttacccctcaattttctctttttcaattatttctgatccttctcactttaatcagtttacttgatagtctctgcgctagtgtaatttctccagccttttgaaaaatgtagacgcttgagccagacaaaagcacttcagcaggaacatgactaatcttgaagacatagagcagggctgataatgtacgccaggaactgtcagttaagaaatagtgatactgcattgctgactcacagtcagctcatgggtcactatgctgcccccattctgttgagatttcagtacactttccgtatatggagtttctgtgttggtacacatccagaaggtttcttgggcgcattgaccttcacatattgtttggttaatttacctaacttggtattaatcagacagaaaagacaaacatgaagtaaggaaagtcggcctttgctgttctcccttgaacttggcttcacttctatccccaccatttagtaaggaagaacagccccaatttattgagttgctatgagccagacactgtgtaagcactttctacacattattgcatttaattctccaaagaatgagataactattataatctctgttttatagaacaaccagctaaagtttatcgggttttttttgtttctgtttttttgggtttttttttgttttttttttttgagatggagttttgctcttattgcccaggctggagtgaaatggcgccatcttggctcactgcaacctctgcctccggggttcaaacgattctcctgcctcagcctcccgagtagctgggattacaggcatgcgctaccatgcctggctaattttgtttttttagtagagacagggtttctccatgtcggtcaggctggtctcgaactcctgacctcaggtgatctgcctgcctcagcctcccaaagtgctgggattacaggcatgagccaccgtgcctggccaagtttatgttaaataactcgtccagaaggtgtagtgggatgtttgactccaaaatacatgcttttaccgcctcaactgactgagcttgggactacctctaactttcattagaaacacaaatctttttctaataaactttcttcttcttttcaataaaaacatttcccacaaggtgacttaaattcattcacaattaggtataaatactgataagagcagttaacttgttttaagagtctaatatgtgctaagccttatgccagatgctttacaagcattatcttaaaccttgtaacaattttgcaaaaatgttactctattttatagaaccaaaacccaagactatgaaaacctaaatatcatcctcagagtcatacagcgaagcagaaattgtatcagctaatgagacttagtgccatttctctcatattgtgtgagaaaaatggcaatgctcaataaatgttgttctaactgttccaggtatcaagcagtagaaaaagaatatggcagatcaggtggattttgctgtcagccctggaaacactcagctggtggctacataatccatcatctcctgaagctttcattgtccacattttttttctaccctttagtcatgtgtttgtaaggaataaattactaaaatacaccataccttttaaaatatagaataaaagctcacagagagttagggtgacagaacatatgattcaaccttctgccttctggcagacagtaggctatttcttttaggtgggtatctaggaatagatacttgcatataatattttttttttgaatcccagactggtcctactaacattcttgattaccacttatttaagtgaccatcaaaccagttttatatctgatatgtttaatccaaataaatgtctttttttaaaaaactgtttaaaaaatggtatttaaatccttcccagattttagctgtgtatagtctggaaggaaacccattcacatggttttatcaggtttgatatttaatagatcaaattagtaaaacagggccctcacttcacaggcacggtgaattctttgttgataagatctatcaatgatcagtatggatcattggatggcagtgaacgtatacgtttgtggggaaaattcttatgcaccttcatagtaatggtactgcccattttatttgaggataattaaaacacaaaatacccaacgatgctgtttttattgtaggtatatgttaattcctctagagatagacaagactctaaattcatggaactttaagtgggatgttccacaaaggaaactctttaaaataatatagaaaaataaataagtaaatgtcaaccaaaatggcagaacatttaaaatcagtctgccaaatatcttttctcactttacttcatttgttgaacaatttatatgctgatatagatggccattttaacagtgtatacaaagcatttatatccacacatgtacatttaatcaaacctacatgtctacatacacatacttaagacacacatagagagtgtgtgagagagaatcaactcatcataattgtaaaggtgaagaaaattgattccttaagactaaaacacaccatattaaacttggagtttatattttgaaaataagattcaggaagtcttctaaagcattcgaagattgattagaaagataaatttcggcacacagggtctctgttcttgtaactttccctgtggtagcttatccctctgtataatacattttgtcatcattctttctttcctccctgatacaataaaaataatttccaaggttagattctatcttgcaagagcttttccccaaggaggtgcatgcatcttcttaatttattatattatataataattcctcataggaaaactaaaggcaaattaaaaccacatggagataatgcctgactgtgctttagactgttgtctaccactggctctttagaaaaagatcagagatacccctctcttgattgtccattttcttgatcatgcaatgtggtattttaagttctatgctggctttgatgcttttgttagtcaaggtgcatgtgtgaatgtgtgaattggatatgtgaatgattttaatattagcttaaataaaacattactgggaagacaaattttctgaaattcccattttcctcttccacttcccctacccccaaagaaacttgacatattcgtttcaaagcatacactgcttttttactatttttatttttatcgtgcatatcacaaccccttcattagtagacatcattgagcattaactgtgacttaattctagaaaaaaatatttttgagatacccattaagatatcacccctgacaaatataaaaagagaccttgagtttacttcattttaaataaatagactgtcttcatttcctaactctgtgaatctgacgcttcttatcaacaccccaaattactgtcaacaaattcaaaaccatctactgatgaatgagatgtttaggtccaattctgatatgccatgctcattctcatacagagaaatacctacactcttttaaatatagttgttattgctgtgacttgcacctactaaacaaatgtaaaaattcttacagttcaagaaataccagtgaagtgtatattattgccctcattacacaaaatgctcatggaaaacactctatcaattccaattatgttctggggggaaaaaaaaggaaactgaataaaaagcaatcccagaatatttgactgggctggttggttatagctgctgaacaatatgtaattgtaagaagtgtggcaaaatgataaaaataaactcagtatttgttaaagaaatgaaaacgtggcaataaaagattccggaaagcgatttagttttttgcattacttcttcattacttgattattttactgtttcatttctatttacctaccaagttgattcttttgcatctggattttgcacaattctttcaataatatacggttcagtggctataattacaggattgttaaagttcacattttactattcatcttgttatctctggtaatggaaggttggaataaatgcacataattacatggttggtcttaaattatttttatattgctcttgccaggatatactcgaaaagcagtatttattctctaatatttatttttggtggtagtggttttagcaaaataaaagtaataaatacataaatggactggtcccacgagcttactatctatggtttttttcaaattaattctaacccattcatctctctgagcctgctaggggcaggaggtgcttagagtctatggaagaaaaacgtcatgtttcagagctctggtaacaggaaaatgtccctcatgaggtactcatcatttgatctattattttatctatttgtagcagagtaactcagtaacctacagatctgtggaccaacttactaaataaggtgtcaaataagtttgatttcattctaaagcaatgccatgtcatgaaagtaaagtgaatttttttgtttgtattatactggaaatagtctcattgtactatatggcactcaaaacattttataaaaatcttagcactatcaactaaaaattaactcataagctcccgtaattaactgaacagatgactccctgttggccaaagggaccccagaaaagactgaagaactgagttcgtggccattgatggaagcgaggtcagaaacgcctcattacatgccctttatgttagagtttaggcacaactgaccagcattaacattaaaatagagatcataagattaactaaagggactcattgtgacactaaaataccacattctaaataagacctaaggccatgcaaagcaagggttaaggcatgctctgcaaaccgtaaaatctttttttaaaaaattaatcctgcataatgtggcttactttccaatctgactctggtataccctcacatggcagatagcagaccccttatcttgacttaagcatccctttgtattgacctcaagtctttagacaaagcttaactctttcaatcaattgccaactaaagtatctctaaaactcacccatgacttgtaagcccatgcttcaagatgtcccaccttttcaggccaaaccaatgtatacttttcatgtactgatttataattttacctacaattcctatctccccaaaatgtataaaaccaagctgtaacctgattactttggtaccaattatgcaagacttcttgggtttgcgttttcttgggctgcaccattcatattggctcagaataaacctctttaaaacattttacagaggctgatttttccatgaacagcagcatccaaaaaatccacaggatacatgtatcaagtatttattaagtacctacgatatgccaggcattgggctatatatgaaaaacagtgttatcagacatccacctagtgctcctgattaaaaaatggatgtgagctcattttacctttacggaggtccagagatttaaattacttgactagtccctcagcgagtcaggagaagaggggttaaaacctgattcctccagttatatagtcatttaatgttcttggacttaccagtacttttgagtttttgtgttttttttttttttttccttaaacacaaaactacacccccgcctccagctcccaccccctcccacacatatacccttttttcatagaacaaaatttggaataaatggactttaaatgaatgcattgttttgactctgcagggaaatgacatagagaaaataaggaatggatcgtacatgctcatgcactgtctggggcactcctgctgaagtctcaggagtgtctttggtttgttgtctgagacctgagagttaaaaagcagagtgccttttggaggaacacgtgtctctttccgcagcgggacgtgcacttgatacacatcagtgggcatgccatcagtgcctcgcagctcatctttctctttagggtggctgtgttgttcttccgatgactggcttgccctggagaaaaatactgcttaaatattaagattagattagttttcacacagccccattttaaccactaaatttaaatccctcagcaatctacttcccaaccttccctaggcataatattcagtttaataaatggtttgtatgccattatttctcatcaatatataaaaactaaaaggaattttaaaaatccatacatcttggttgagatgaaatttgacttgatgagaagagattattcttagaaatgtttctaattcccaatcaaggcattctatttcaaaatgtaggagcatggttgaaagaataaatctttagaaaataatgtatgagcatggttgaaagaagaaatctttagaaagtaatgtatataataatatacatatatgtatatatacttatatataagtgtatatgtaagtaatatatatctctcacaaatattgttttagtcatcatcatcatcatatacacgtgaatatatgtacatatatgtattatatatggtatatggtatatatgtgtatatatgcaagatatatatgagtatatatacatgtgggtgtgtgtgtgtgtgtatgtatatatatatatatatatatatatatatatatatatatatatatatatatacacatacatatgactccaaaaacaattcctctacaaattgtgtgtcacttccttgacccattacctccccaatgtatatatcatgtgaatatcaaacaattgaatgttttgttggtacaattggattcattcacacggaaacgtggagtctatttcttccttcaaatcctcatcctccaattaattagctgaaaaactgactgcatctctgattctctaagaagcatggaagagaaagaaatgggaaaccagctagcagctcattacatgaattcaaacagttccctttgaagggaaactttttcctggcatagatgatgtcattgatgagattgcaagggtaggcattgtataaagatgagatcctttttaattctgttttcaaaactataaagctaaaatttttagaattgaaatttcagttaacatgacccatgtattagataaaatgtctctttaaagcctgggagctctccaaggtgtggtgtgtttcctatttgctaggtacatgattacgatgcatatggatagatgtttctgaagtgtttccttctaagtgcactattgccagtcagatttacacccaagtagcaaagatgttaatgccatgcaatcctattaatctaacatgttgcttttgtggattagaactactcagactctaccttttagttgtagttattttaaatctttaatactgagctatcaaattttcttttatgatacaaagctactaagtagaagatacttgaatattccattggctgactgatgtgtttattaggcacttactctgtgcccaacacaatgataaacattctcagcaatatcgtgaaagtttaacacaggattcctggcttccagaaatatgatgtttacttaagaagagataggaacatatgtgaaaaagttaagcttcatgtagtatcttaagatgctaagtttagtattctggtggtggagtttcttatcaacaatgtttcacagaagatattgagctcagcttttcattatcaaagcaattgcatgaagaagaaatttgagaaagtacaacccctggtaatgattggagcctctgaaacttttgtaatgtcaatatccatagcatgactattttttatttccggtactgatgtggcagaagttgtggagtagtgtttttgagttatccgctgtttaggatcctgtattaaaagaagtatgtcggctgtgcatagtggctcatgcctgtaatcctagcactttgggaggccgaggcaggcagatcacctgaggtcaggagttcaagaccagcctggccaacatagcgaaactctgtctctactaaaaatacaaaaaaattagtcaagcatggtgtcgtgcacctgtaatcccagctactcaggaggctgaggcaggagaatcacttgaacccaggaggcagaggttgcagtgagccaagatagtgccaccgcactccagcctgggcaacagagctagactctgtctcaaaaaaagaaatatgtctcagtagtgcagttatccttctgtaggtttgtattggtgttcagcaagtatctggtaaattaatgaattaacaagagaatagtttctatgaagcagaaatgcatagcaaagaagtggggtgttgaaaggaacagctgggatatcagttatacaggttgaaatgtggcattggtacaatgacatattagttatactcttacaagttgtccttgagtgggtgcttgatagaagttggcttgcaaaccaaaaaaggttaaacacttgtcatggcctcaggctaatgaccccttctaatatgcaattctgtttttctcattctgagagcaaaccagatgccccatgatgtgcccactgttcttttgctaatgtgttcatcctcagtgccttcattaccagtttctttcatttgacatgcaaagatcttttttcttggctcatcccagagaagtggccgggcaagtgttctcctgagaaaatgttgatgactctggcacacagaccacatacaatttgctgcttcctcacattcacactgaagttggctaaggtgcccagagagaaaccctgagccctgactgcatccaaaaccagtcattagggatgaccaccgtgggatccctcctactgggtgcctggttaaaactgagtgtcagagaagagactggtggctttgtcattgactttcttgttcagatgtaagagcatcatcactgggagaaggaaatgtgaattgtgaaaataaataatgcagatagaagagtcggaagtacagaggagtgttcctagagtgctttatatggagctctattatggtgcataccatggtgtgttgttaagttagtttacgtgtcagtttcccctttacactgtgaaatttagcaaagcagagactatgtctgattcatctttattccaagtacctcacaaaggtaatgctagcgttgaccttaataagcatttaatcatgtttattcatttattttttgaatgaatggataatgattaaaattgaggtttttatctcttgattatggagcttaactcattgtgagcccattgacatcctgaaatacttgctgaatgagagaataaatgaacagatttaaaaaaaaaaaaaaaccctgaagagctaagcttaagccactatttaggctttgaagttgatccatgtggtcttttgttttggattgattgtagggactaaagaagtacttcatacgttgtgttatctttctgctcaggtcactgtggacgatagatagcctttacttctccgctttctcaattttcagccactggtattcaactgcaggccttctttaaaaatgtacctctttctttcaaaattttctgaaaagctagaatttttttgttttttgttttttccaggaaaaaattttaacttactggagaccaatttcttttcttaaacctgtctctgagctgagtatactgtatagtccctataatgattttggtaaatccttaagcataaggtggtcattgtgtgtgacggtgttttctgtttagtgaagacaaatggtgggatgagtctcctgctaggatgtgcagaaatgtgagcattagtctcaaggtacattccgtaaagtgttggtgccaggtgagtattgaggttgatagcttctgtgaggcctggtttcctggggttgtgcccatgttcatatgacagctgcttccacaataacatagcaggtgcgtagctcaggatttgcccactttctgcaagtggacactctcgcttgtatctaaaaggcctctcccatggtgccagaatgcctctgacagcattttcagagctgtgacggcaggactgtagctttatggtgggagcttctatctttgtaaatgccactgatgtcagctctcaccattaaccattttcttttgtcaaatgggagagattcaggactcatggaagtgagagactggcatgatgaggcaaacagggggcagtttaactggctgtttggccactttcccccactctaattctccttctcctttccataaaacatgctttccaatttctgccaataaaagcctttttaaaaaagtactagtctttcatttttttttttgcataccttgttgttattccttctgaaccagtagtaacacaatatacgaagtacattctcttgggtataaggccagtgtataggtgggaatcccatagacctaaaaagaaaaacaatctaggatttctggatgtgctctgaagtggcaccttctaagctgcagtatttgttcaacagtgtttttccaacaaaaaataggatgagttcacctgtgaagcatcctgaagggaaacaccggtgcactgggcagggaacaggagacctagatatacttcttcttttttttttttttttttggtagatatatttatttatttatttatttttattttattattattatactttaagttttagggtacatgtgcacagtgtgcaggttagttacatatgtatacatgtgccatgctggtgtgctgcacccattaactcgtcatttagcattagttatatctcctaatgctatccctcccccttccccccaccccacaacagttcccagagtgtgatgttccccttcctgtgtccatgtgttctcattgttcagttcccacctatgagtgagaacatgcggtgttcggttttctgtccttgcgatagtttactgaggatgatgatttccaatttcatccatgtccctacaaaggacatgaactcatccttttttatggccgcatagtattccatggtgtatatgtgccacattttcttaatccagtctatcattgttggacatttgggttggttccaagtctttggtattgtgaatagtgccgcaataaacatacgtgtgcatgtgtctttatagcagtatgatttataatcctttgggtatatacccagtaatgggatggctgggtcaaatggtaacaacaggtgctggagaggatgtggagaaataggaacacttttacactgttggtgggactgtaaactagttcaaccattgtggaagtcagtgtggcgattcctcagggatctagaactagacctagatatacttctaacataatctgtgactgtgtgcaggtcatgctaagtatgtcagactgccattttctccttgaggctggaagtgtggggagaaggggataatgtagttgagaatccattactggccccaccttggacagagagacaggcaggtaaagggtacacatgtgcctggatggtgctgctactggactcttgtttacattaatgtgtcaacagtgtgctccaaggttctattaggtgttaacaggtgtctcaagaaaaaaatgtttcttaatgagatcagtttgtaagaattctgggtgaacacgttaattagtttattcttttaatgcgttgaatgttttttttttttttgaaaaataatagaatcccttcagaattcttaatatgatatggtgttctgtatattttcaagaggagaggtatatagtgtttctcaaatttatttgcacatgaaatgcctgtgggacataatatctctgaaggccgatgttccttgaaagactgtgtgaaatattgaactatatgatctctgaaagttcttgaattctccattatcatcagaatacctggcccttccaagcccttgaccttcgtctgtggagtattgactctagctgccttccagacattgtcatctatgcttcttttcctctgaggacgatgaaccccggctgttctctcagtacccctgaaaaatgggaaattgtatttttttcttctttgtacccaggagtctatgtataatgcataattctcagtcaaaaggaacttgcttacttaagtgctcaaaggtttttgtcctgtggtttttgtaaggtaatcccacaacatccagataaacaaataatcacaagacataaccttccagagtgttccataacattgatcacaatcaaataatgaggcacgattccatgaaacattaggaaaattataaaggcatcaggcagaaaaccagcaactagcaaatggtttctccatgatgattttgggttcacatttcacttccatatataatacaacttatgtgcccatatttcatcctctggaagcctgccacattatcctctgaatgaatattaacactccttgtactctgaagtagcctctggtattctggtatttattcaacaggttttgaacaagattagtggattataattttggcttcaccacattttaaactgtgtgccttctctgtgcctcagttttctcctctgcaaaatggaacaatagaatccttttcattgagttattctgaggattaaatgagtgaatataggtaaagcacgtaggacatccctggcatatagcagtcaatcccttgtaaaatgttagctgcagtgggtgcaactgactgcggccagttgtcaccacctgtgacatttaccaagacaattttgggtaaaaaaggcagatttattggagaaagtacaaagataccttgcaagaaagcaatgcgcaggacaatgggctgtctaccaagaggcaggagctagagggaagttttatagggtcatactggaggggctatgtccagataagttgtgcagataaggtcctgctgctagggctatgtccagaaactaggtatttgggaacatgatgttctgtcagtcggttgtctgtgataagccatctcctctctcagaacaattgttctccccaatctggggccccttcttcattcttgcttatcttattaggactccacattaactattgttgttattatcatacacagactatctctgaaaggatatataagatatagataccagccataacctctgcaaaaagatacaaagagactagggagccggaaagcaaagatagaggagtaggcttacttttccctacatatgaatttactctattgaatattttaaaatcacctgtgttttaccatcaaaaaaataaaataaaacaagcatcaatatttacaaatgaagaactgaggttccaactttacgattgactttcctaattcaattggctatttgacttccctaatagttaagttagatttgagccagggatttgaactacaaaaaccgtgttttttctagtctaccaccttatatagagagatatgacagaggggagagatgagaggtgtgtgggtgggtgggtgagggtggaggaggtggtactggatattactgaaaaacttttgatgatattgaattctttccctgagttctgtagattttggcactggtctcttgtttcttctatttctactgtgagtaaacaaccattcccaatcctccagttctaacttgaatttcagtggactaggctgagtggatgtacaagggcaaacctgcatggggtgtagggaaatataaatagattggcactgtggaagtcagcatatgtttgcttggcacccaaccctcctatgcctttcatttgctgaatattaagcatctcatttttatctgtcctctttttgatggaatggacatgcaaatttttcaaacctacacaccctcttctttctcttggacaaagggagtaattttactatgaatccatcatgtgtcccaaggaggcaaactcaaaatttgtctgcaaaaagcctttcattcatttcttttcatgtaagaaacaaaattggcaactattttttcatagcttgtaaattccaagaaacttagtatcttttcttttcacttgctctgcagccaaaagcatattgttcagcattgcgaattcacaatactcactgctcctcagtcctggctacaacataattttgaaaagtttatgcagggaccatccgagtaataaatcacagaggaggactgctttaactgttcaccccttagctactgcctgaatgagctccatgctttatcatctcagaaggaagctgtctcaaatgcatgcttcattttattatccaattgtaacccatctagataaatttaacttcctatagatttgctgcctcttagtattcatatcttctccagacttttcattaatattatgatacttggataggagtattcccctccctttcctttataatgtaacagctttaaattgacatttggtgaatgtatcatcattgctattcaaattaggtcagtgtttttatttcattatgctggaagtcctcttagctgcgaaatcaagtttgaatgtctgttacctgaagcaatgcttctggcaaatgtttcttagaggtttttgcaagccagaaattgtcaggcacctcccccactcccacttcttatttctatgtggtttggttcatataaccatttaacatatttttataaagcggtagttgaatagagtataaaataggaaaaaattaatcatctgccctttaagaggtttctgtccactgtgtgggtgttggagagggaggtgggggaagagaggggaagggaggcagatatgcaaacaaaaatcatactatgccatggttttggtacagtcagttaatgtctaggatataatggaaacgtgggaaaaggagcctcttgacgtttactaagacttgagaatgagtttttttcttaataatctataaattgaaatccactctttctaaatgtgcctttggcactgttcttttgaattaggaaatacagaaaaacagttaaatttggttgaacgatacaggaagtactcagaaaaggcaaccatcttaccccaggagagatcaaaagacattcacagattatgttaacccaaagttttggcctcatttctcaaggaaggggctacatcttttagaccacaggcatttttccccagttttgaaactgtgaaggtgtttaggacctgagagattattaataacaggtttcaatgcctgacactcttggacttaaatgttcacctacactcaatctgatcatggacaaactacttaatctcactgagcccatgtcctcatccataaaatgagggtaataatagttccacgttttagtattgttaggatgattaaataaaataatgcatgtaagtaaaataacccagctattggaacaatcgctgctgtataataaaccatcaataattcttagcttttgctatcattcttgctactgttaattagttagtggttctcacttttttctagaaattgctctacctctgtttctcaactgagatattatagtttaagactttgattatgataactagatgataatttagatggtgtctttttttttattatactttaagttttagggtacatgtgcacattgtgcaggttagttacatatgtatacatgtgccatgctggtgtgctgcacccactaactcgtcatctagcattaggtatatctcccaatgctatccttccccccgcccccaccccaccacagtccccagagtgtgatattccccttcctgtgtccatgtgatctcattgttcaattcccacctatgagtgagaatatgtggtgtttggttttttgttcttgcgatagtttactgagaatgatgatttccaatttcatccatgtccctacaaaggacatgaactcatcattttttatggctgcatagtattccatggtgtatatgtgccacattttcttaatccagtctatcattgtagatggtgtcttgatcagcaatctatgctttgagtgttttttgttaagtggctaatgcagtttgcatatttgtcccactaaatctcaagttaaatgtaatcctcagtgttggaggtggggcctggtgggaggtgttagagtcatgggctgagcactcagacttgggcaccatccttgtgacagtgagtgagttctcacaaggtttggctgtttaaaagtgtgtggccatttacctatataacaaacctgcacatagtgtacatgtacccctgaacttaaaataaaagttggatatttttcaagtgggcttcatccctgggatgcaaggctggttaaacatacgcgaatcaataaatgtaacccagcatataaacagaaccaaagacaaaaaccacatgattatctcaatagatgcagaaaaggcgtttgacaaaattcaacagcccttcatgctaaaaactcaataaattaggtattgatgggacgtacctcaaaatcataagagctatctatggcaaacccacagccaatatcatactgaatgggcaaaaactggaagcattccctttgaaaactggcacaagacaaggatgtcctctctcaccactcctattcaacatggtgttggaaattctggccagggcaatcaggcaggagaaggaaataaagggtattcaattaggaaaagaggaagtcaaattgtccctgtttgcagatgacatgactgtatatctagaaagccccatcatctcagcccaaaatctccttacgctgagaggcaacttcagcaaagtctcaggatacaaaatcaatgtgcaaaaatcacaagcattcttatataccaataacagacaaacagagagccaaatcatgactgaaccactcacaattgcttcaaagagaataaaatacctaggaatccaacttacaagggatgtgaaggacctcttcaaggagaactacaaaccactgctcaatgaaataaaagaggatacaaacaaatggaagaacattccatgctcatgggtaggaagaatcaatatcgtgaaaatggccatactgcccaaggtaatttatagattcaatctcatccccatcaagctaccaatgactttcttcacagagttggaaaaaactactttaaagttcatatggaaccaaaaaggagcccacattgccaagtccatcctaagccaaaagaacaaagctggaggcatcacactacctgacttcaaactatactacaaggctacagtaaccaaaacagcatggtactggtaccaaaacagagatatagatcaatggaacagaacagagccctcagaaataatgccgcttatctacaaccatctgatctttgacaaacctgagaaaaacaagcaatggggaaaggattccctatttaataaatggtgctgggaaaactggctagccatatgtagaaagctgacactggaccacttccttacaccttatacaaaaattaattcaagatggattaaagacttaaatgttagacctaaaaccataaaaactctagaagaaaacctaggcaataccattcaggacataggcatgggcaaggacttcatgtctaaaacaccaaaagcaatggcaacaaaagacaaaattgacaaatgggatctaattaaactaaagagcttctgcacagcaaaagaaactaccatcagagtgaacaggcaacctatagaatgggagaaaatttttgcaatctactcatctgacaaagggctaatatccagaatctacaatgaactcaaacaaatttacaagaaaaaaacaaacaaccccatcaaaaagtgggcaaaggatatgaacagacacttctcaaaagaagacatttatgcagccaaaagaaacatgaaaaaatgctcatcatcactggccatcagagaaatgcaaatcaaaaccacaatgagataccatctcacaccagttagaatggcgatcattaaaaagttaggaaacaacagatgctagagaggatgtggagaaataggaacacttttacactgttggtgggactgtaaactagttcaaccattgtagaagtcagtgtggcgattcctcagggatctagaactagaaataccatttgacccaaccatcccattactgggtatatacctaaaggattataaatcatgttgctataaagacacatgcacatgtatattttattgcagcactattcacaagagcaaagacttggaaccaagccaaatgtccaacaatgatagactggattaagaaaatgtggcacatatacaccatggaatactatgcagccataaaaaaggatgagttcatgtcctttgtagcgacatggatgaagctggaaaccatcattctcagcaaactctcacaaagacaaaaaccaaacaccgcatgttctcactcataggtgggaattgaacaatgagaacacttggacacaggaaggggaacatcacacactggggcctgttgtggggtggggggaggggggagggatagcattaggagatatagctaatgtaaatgacgagttaatgggtgcagcacaccaacatggcacatgtatacatatgtaacaaacctgcacgttgtgcacatgtaccctaaaacttaaagtataataaaaaaaaaagtaggatattttttaaaaagtgtgtggcgtcttcccccttattctctcttgctcctcctcttgtcatgaaatgcaccagctcccccttcaccttctgccatgagtaaaagatccctgaggcctctccaaaacctgagcagatgccagcatcatgtttattcagcctgcagaaccaactacacatctttaaaaaaaataaattacccagtctcaggtattcctttatagcaatgcaagaatggcctaacacagtggctttttttttcttttaagtatattttatatttagatgctactattagcagatgatttgtgcgtatgtcttgccctgttcagctttgaggagtccaggcccttatgggactccttctgagagtggggttcctattttccttaggaacccaagacagttctttcagaggatttcattgatctgttgccccatggtgctttgtggcacataatgacaaagcatgacaggcaggctcacagccctcgactcatgctagatctcggttcattctgtatccagggactccagttcatcatatcccttacccaggcctctctcctagctatgtctgtgtggctcacagatactctagagggagaggcaattaatttctttttggcggtgagatggtttgcctgggtccccactccaatcttatcttgaattgtagctcccataatgcccgaatgttgtaggagggacccagtgggaggtaattgaatcatggagatgggaattcatgttctgttgtcatgatagtaagtctcacgagatctggcggttttataaatgagagttcccttgcacatgctctcttgcctgcaaccacgtaggttatgcctttcttctccttagccttctgccatgattgtgaggcctctccagctatgtggaactgtgagtcaattaaacctctttttctttataaattacctagtctcaggtatgtctttattagcagcatgagaactgactaatgcagggggttatttcatgtcagacattgtcgtaagttgtgtcttccttggtgtcttagttttttctgtgctgctataacagaatacctgagactgggtaatttgtaaagaacagagatttatttcttatagttctagaggctgagaagtccagatcagttgggtggcatctggcaaaggctttcttgctgttttgttctatgatgaaaggtggaaaacaagagagagaacaaaaggtgtctaaatttggttttatagcagatccattccttgataaccaacaaactcccaggatgataatattaatccattcatgacggcagagcccttgtgacctagtcaccacttaatgctcccacctctcaccactgttgcattggggattaggtttccaatacatacctttatggaacacattcaaaccatagcatttggcaaataacccaaacccttctttcctcatctgataattgggaaaataatagcaactaccttgtggatactttgtgagaatcccatgcttcatgcaataaggacttaataattgtaagttgttaaattgtcatacatgctccttttagttatgaaaacctgtggcttttgtctaagagttgaatatgagaaggttcaaggactagggcttttatccttggatctctgtagcatgctgaattaatgaaaggtctgtctctctctctctgattaatcaaaaactctgactagtactagtgaaagtcaggtttgaacaattctgtgaagaatggatttggaaggaaaatatgaggcaagaattttaaaaagttgtttctgagttgaatttgatttacatttgctaactggaaaaagatcagggtataatcagtccataatattgaaagcagtttggaaataccattgcagatacaggtaatttaaaaaatctacatgaattaggtccaggagcggtggctcacgcctgtaatcccagcgctttgggaggccgaggctggtggatcacgaggtcaggagatccagaccatcctggctaacacagtgaaaccccgtctctactaagaatacaaaaaattaggcgggcgcggtggcgggcacctgtagtcccagctactcgggaggctgaggcaggagaatggcatgaacccaggaggtggaacttgcagtgagtagagatcgcgccactgcactccagcctgggcagcagagcgagactctgtctcaaaaaaaaaaaaaaaaacctacatgaattattcttcctgtgacatatttgtcattcttcatctctcctttaacattcctatcttcatccttcaggccatcctctgcctacctctttctgctgctacagtgtaagttgaatcatactttccaaaatatgtaaatgaaagtcagaagtaaggcaactcatagtgtttcagtgactttgatttcaatctcactcaagactgggagattctcctaaattctagcaaacttgtgcctctttcccagccttataagaaactgtccttctatctaaatactggaatgccactatgtgaagcttcaaatcagggtggttattctgagacaatggcagcttcttgggatgtggtgtaacatgtactaaatcattatgtgcacatacatttatttttaatcaacctgcgtttacctgagtgctgtggtttgaatgtgtcccctaaagttcatatattggagacttaatcctcaaggcaacagtgttggtgtatggggcctgataagaggtgattaggtcatgagggctctgccttcatgattgaattaatgtcattatcacaggagtgggttagttagcacgagagtggcttgttctaaaaggaagttcagccccctcttcctctcttgccctttgcctttggtcatgggatgaggcagcaaggagtcccttgccagttgtaggcccttcgaccttggacttcccaggctccagaatttcgaagaagtaaggctctgttctttgtaaattatccaggctcagatattctgttatagcagcactaatggacttagtcaccaactaaatgtaatggacaagaatggcctacattaaaaaaaaaatgtgattagaggatcttaatatcttattctgtagtgaactttagaatattttagacactggagattttctatcagatgtatcctgtggattcaataggattcattttgagaggcagctttctgaagtggaaataattctgtactccaggcacagtaattgggttcaagccccagctctgccatttactgggatggggagaaactcttggacagcctgttaggcctttttggcttccacttttcttgtctttaaaataaagttaataattttcattctgcttcactcatggcatagatgtgaggctcaaataaaaaaatattttggaaactaccctgaaaactgtagaacattctacaaatattatctaacaaaatatatgaatgcataattagtgtcttcaagggatgtcataaatatcgtaaaactaaagggtgagctgtatcaaaacttggaagggattgggatgaaaatcaaactgtctaaaatagaatggccaaatacattgggacttggctccagaaagaattaatgagaattacacagattcatatcttctccattattccattggtcacgtctaataacttgccatgaaattgcattgatttctacaaagtgattgcatatgctgttgcctcttttcaactgcacatgtcataattcatccatccagatcagtattttacttttaggaaaagagagatgctaactttttctcagaggagagtgtttagaagtctatgttctatagtccctcctagagaggggggatttcttcagtactcagcagctaatcttttttttcttctctctctttttccttttttattatactttaagttctgagatacatgtgcagaatgtgcaggtttgttatgtaggtatacatgtgccatggtggtttgctgcacccatcaacccatcatctacatgaggaatttctcctaatgctctccctcccctaacccccacactccccaacaggtcctggtgtgtgatgttcccctccctgtgtccatgttttctcattgttcaactcccacttatgagtgagaacatgtggtatttggttttctgttcttgtgttagtttgctgagaatgatgatttccagcttcatccatgtccctgcgaagtacacgaactcatccttttttatggctgcaaaatattccatggtgtatataccacattttctttatccagtctgtcatcagtaggcatttgggtttgttccaagtctttgctattgtgaacagtgctgcaataaacatacatgtgcttgtgtctttatagtaggatgatttataatcctttgggtatatacccagtaatgggactgctgggtcaaatgttatttctggttctagatccttgaagaatcgccacactgccaacaaacatatgaaaaaagctcatcatcattggtcgttagagaaatgcaaatcaaaaccacaatgagataccatctcatgccagttaggatggggatcattaaaaagtcaggaaatggccaggtgtggtggctcatgcctgtaatcccagcattttgggaggccgaggcaggcagatcatgaggtcaggagatcgagaccagcctggctaacatgatgaaaccctgtctttactaaaaatacaaaaattagctgggtgtggtggcatgcacctgtagtcccagctacttgggagtctgaggcaggagaattgcttgaacccaagaggcagaggttgcagtgagccaagatcctgccactgcactctaggctgggtgacagagtgaggctccatctcaaaaaaaaaaaaaaaaaaaaaaattcaggaaacaacaggtgctggagaggatgtggagaaataggaacgcttttatactgttggtgggagtgtaaattagtgaaaccattgtggaagtcagcaggtaatctttttacggtctgagtaatgaggaacctggctaatagttgccattctagatagcattaagggtgaagtctttgctcacagaagttggtgtatccagacagacattgtaattacagcagagcaaattaccatactctgaaagagaagaacacagaaagcaacaaacacatttaaagaagactgtcccagaaataaggagaagggcaagaaatctaagcagaatattccacttgccatttacagcatagacaaggacagcaaaatggaaagtcacttatataactgcaggataaagagatgggtgagatgaaatatactttctccgaatgaagttcactgtatgtgtagtggattaaatgagattgactatttttaaaaagcctgttacaaagaagaacaaatttaatagactattaagaggtaaagaggaacttttaaaagcacatattgattaaaacaaaagttatacactttgggaggccgaggcgggcggatcatgaggtcagaagatcgagaccatcctggctaacacggtgaaaccctggctctactaaaaatacaaaaaaattaaccgggcgtggtggcgggcgcctatagtcccagctactcgggaggctgaggcaggagaatggcgtgaacccaggaggcagagcttgcagtgagcccagattgctgccactgcactccagcctgggtgacagggcgagactgtctcaaaaaaacaaaaacaaaaacaaaagttatagttcagaatatttattgcatacaactcagcaaacaaagttgacctagatacaagagtattattggaatttgttagtgaatacattgacaaaattctgttatttttgtttaattatcactaggtccagtagggtggaagtcagaaattttgacttaaaatatcagctaattgaattagttatttcaaatcaatgtctagtttggataagaatattttataaaaaaacaaatcatagtattaggcatagtttatgcttggtggcatgtagagaaatataaaaataaaagatagtgaaatctttttaaaaattgtgttgaaaggtataatcatttgtgttaatgtattattcaaccaggatgtaggaagaacacacatgtcactgagctttgttctggggctggaaggaagtgcaaataacaatgatgataataataacagcagtagctaatatttatcagatatagagcttgttaccaccacagtaagcaatttgcatggagtatctcagttctcgtgattagtcaggtacacttcttacattggtttttcggattgagatattaaagtccttagaattgaaagaacttgctccaaatcatacagctaggaatggtagactagcgtttttactcaggcagtctcaagataacatttgttgagggtctattaacaaccaggcattgagatggtgtttacacatattagttatctcagtggttcttaacctgggatgcatgttaaacttaccaaggaagcattttaaaaccctgatgcttaggacctacaccaggtgaattaaatcagaaccttttgagacaggggcaggacttggcatcagtatttcttaaatataaacattgtatatgtaaatattatatcaataccagtatttttaaaagtatcccaggggagtcagccttttgaattactgtccatttaatattcaaagcaaagtctatacatttgtattattcctattttatttatgaggactctgagattcagtgacgataactgacttgctcgatcaaggtcacttacctggtaaattgctgagctgggatgtaaatgcagttctgtctagctaaagagcccgcattcttcttgatgcctcagtgtctagccattttacccagagcaataaattcacttgttcctgttatttagtgtttatcatagaatttagctttagcctcaatttcattttattgtcttcactattgagtactcacaaagggagccagttaacaacatctttggaacaaccatcctgtgtggagcattgtgctaattgctgtgggaaagaacaggggaagatatgaaatattccctttacaaagatatctactgttctgccagggttcataactttgggcctgtgacttgacatctgggtggcaaaagaagtctcatgaattgtttgggaagtattcatagttttcatcagattgtaacagagccatgagccaaaatatttatgaacttctgccttgcttggtatgtaaggcatttgattccagaagcagtggcatattatcttgaattttcttcataaaggcaaaacagtgccttttcaagagattttgagtttgatatactgtcaaaaactgtttacagctaagcctagtaaaagatgttgcatatgtggagtgtgtgtgtgtataaaaaaaatgcaggctgtgaggccgggcgtggtggctcacgcctgtaatcccagcactttgggaggccgagatgggcagatcatgaggtcaggagatcaaggccatcctggctaacatggtgaaaccccatctctactaaaaatacaaaaaaattagccaggcgtggtggtgggcgcctgtagtcccagctactccggaggctgagtcaggagaatggcgtgaacccgggaggcagagcttgcagtgagtggagatcatgccactgcactccccgctgggtgacagagctagactccatctcaaaaaaaaaaaaaaatgcaggctgtgaatataaaacaatgaaataaatttcattagtggctcagaaactagatctgagaacaaggatttggttgtttctggcaataaaacattattaagaaatgtgatatcatgaggtaaatatcttaaagaattgtattcatttacacacatatatgtacaaataaatttgcacacatatatacatgctatgcacatatatactatatatacacatgtatgtattatatgcatgcaccaatacatgctggcatgttttatgcaaattgatttttattccatagctatttttcctatataatccattatttttaaatgtattaataattttaatatcaccataaactgaaatgagtaaagaggcctgtaatgtgaatattcatatatggaacataatacgggggttgcgtaattataggtccatatatgtattgtatttcctgatatatttatatatgaaattgctagtatgtgtgaaagatatctacatatattttactaataagagatatattcatatatatatatacaaatatatgctttatagagcctaagtttggggtggaacaaatgttctcacccttgtttgattatgagaaccacttgcagagctttttaaaaacctgagtcccttttacccttgattcaaattcagtacatccagagcgggtcctggtgctgtttttaaaacattccttgaatggttgtgttgctttgcttgagaagcagccctgtagtttgtgtacaggtaggaatgaggaaggaagggtaccagacaacagacaggtaagacagtcaaggggaagaggccaggaaaatttctaccaggagggtggcagtttattgatttgcttatgttaaaatagttgagtccgcgctgtatctttttacttgattaatttaatttacacaaaccaaaggtcaatatcaatgattaatgtcagagggaagggtattattattatttttaaccctacttctttttcaactactacatatctgaccttgcagaggaaatcttggagagaaaatagccactttcatacgactatcccttggtcaatgcgctacttattaaactttattttcccactgaagaaagaaaatcctaccttcagggaataaaatagagattcattttctgacctcctagtataatgctaaaggaaaagcatacaatctctttggggagggagctgttaggaaggccagaggcagctgtcttggaaacatacagaaaggtgctattgggacagagcataatttaaagtaggtgagattggaaaatagggatttttccttctcttttacatttttttttcctttcttgaacatatacagttcttcagttaagtgttagcctgagattaaatataacatttatgaagctcctttcaaaactcatccctgcatgtgaatggaccatttcctcctttataccactgcactgacttctaattacatgcatctttcatgaaaatgtttgtcagactgtctgatgttaaattgcaagataattgataacaagacccatgtcttaatcatctttgttggtgctaaatacgtgtttattgaatgaatgaacaaacacttggatgaataaatagactgtaattgttagtaactccatgagacctgcacatttctttgttattggcactttgcctccctgtttctcttgagcttcatggttctatatctacatcacaggtagtctagtgtaaggttgaataacaacactcaaattaaaaagtaaaaatcttaagatgcttttggtacctaagcataatcataaaacaatggtcttgtttaatttgaggaggagataagtgatcaaacccaagaatccataaatttggcctaagtattggtatttatttccagagatgggcaaggaaagagtgttggaagaaaatacaaggtaagttttacaacctgtgagtactcagaacctggactttcatgtcttttagaaagacacattgacaataggcagaaaatccttagctacaactcactggctgaaagcttggtcagttaaattgtgaatttacatggaatccaaatgaagtgttcagacatttcaaacatctcttgcttaatgaggttctgtgcctggctagcaggtcagcagtctgatttcagtttacagatgcagtcttaaaaaaggaccctgagatcatctataacacttccctgtcttcctttgctccagctgcattcatcagcttccatcagggttcacagcaatgaaattaattgacaagaagctcaatcttaagagcactctgaactgtatactcttgccatccacccgctaactccaatcctacatgaatgaatgcaagtgtagttttttgagaaggggccatggctcaagcagtgccatatatgtgccttctatacaactggcttggtatctggtaaaatttccattgcccagttacaaactagccagtcccttgcagacctaggatcctcttagaatgccctatcaggaagttctttgcaagatgttttaactgagcaatgaatttatagaggaggacttgaataaattgtttcaaaaatgaaaccatttgaacacaaatcatgtctttcactaagacccagacaaactaactcatatgtactccacacatctcagtgtagtaagcagatggaaaatattcattgttttttttttttaccaatgagacactagtaacaaagagaaagtgtagaaattcttcaagatccctagaggctgggcaatcatatttctagcaaaactcttgactttcttcctgttctcaacctctgccattaaaataaggaaatagtgctatcaaagtaaaagagaagcatctgttggaggggttcaagggggttgagtctttaggcatcaaagctaggagttggctgggcgtggttgttcatgcctgtaatcccagcactttggaaggccaagtcaggcagatcacctgaggtcaggagttcaagaccagcctggccaaaatggtgaaaccctgtctctactaaaaatacaaaaattagtcaggcatggtggtacatgcctgtagtcccagctactcggtacactgaggcaggagaatcacttgaacctgggaagtggagttgcagtgagccaagattgtgccactgcactccagcctgggctactgagtgagactccatctcaaaaaaaaaaaaaaaaaaagaagaagaaaaaaaaaaagctgggagtttcattattcctcaaagaaggcacctcagaccaggttccatagggcacgcccctaaagagcccaaccttctcagggttctaaaatgtatcttaagcccaagcaaaatccttgactttccatttagatgccaatatgccatcctcataatattcattctcatggaattttgagttcccacactcttacatagctcccaaagccaacttattttactgctgaaaaatacttcagtacacttttattgctgacactggtttctctatacttcccccagagatattcatgttataagtaaatctttttccaaggtgtgcttcatctcctggctggaagcaagaaaaaaaatgttcaaagtattgtagcactttttacagagtgtgtatcatgaaatcaataatcatttattgagtactgactattcactgtggggccagatattgagaatattggagagcaattagatgtggtctctgactccaggggtctacaaacggcatggtggggaacaagctcattagatgaggagaaaaaataataatataagtgagtataaactcaagaactataattatgcattgattaatgaaacaaatactgaagatttactttttaaaaagcgttgtgctcaaggctatggcagatgtaagtttataatatgaccacttacattaatttgctaggtttgccctgacaaattgtgaaaaactgtggctgaaaacattggaaaatcagtttctcccagttcgggagaatagaaggccaaaatcaaggtgctgacagtgctatgctacctctgaaggctctaggggagaattcttccttgccttttcctagcttctggtggcggccatcaattctgggctttccttggcttttagcagcgtcactccagtccctgtttctgtggttgcaaggccttcttccctgtgcatatgtgtgtgtgagtgcatgtgtgcatgtgcacctgtgtgtgctcctgtctttacgtgacctgatacgaacactagtcttttatttggaacccaccctaatccaatatgacctcatttaaactaattgtatctacaacgattctatttgcaagtaatatcacattctgaggttccagggggacattgttcaacccagcacaacccttaaatatcctattgtcttgttggaggttattttatgggattcatttttggtgttccatggcttttcagaggaggctcagtgtccactgatagtctctgggaagactacgtaggcataggtccgaccattgctatattttcttatatctatgaaatcctaagttaacattttaaactacagtctactgtgtgtcaagtgttgtcctaggctcttatttacttaattcaatcttatcctcacaacagcctttgcagtatgattttttccattgtatagatgggaaactagttcagaaagtttacttacttacatgagacttataagctaggcgctgggatgctaaacaaattagttccaaagtctactattcaggctgaacttatgcatttctggtggtgaaagcacagcctacataaccattagtttgtgatttagaccttagcccaaacattcgtcattatcatatttgaagccaggatggacccattgttccagatctatatactgtatatcagttagccatatcaattaataatcttttgatacttgtcaaagagcagagaaccgcagaaattaagagtttattctcttcattaaaccattaaagattggaggtggctattgtgaattgggcatgaattatagcataagcctatatatgttgcatatagccccccgtaacaagcctccttgttgtcttttgtgttcctaacttatgagcagggcagagattatcactgaacacattgcagggtaaatgtaggactctgagtcacccattggatttttacaggctgaaacatttacagtgtcctgcttacaattctcaagcatcagttaggtgcaggaacacacaggcagagtcagtagctgcccagggaactagtgtccagtctaatctcttcacaaactttgtgcgtgattcaggaaggattattacaggccaaattttacccatggacctgttttgtttagtaaaatattttcaaaaataaattttggatttgaatgactttagggaaggcaggaatgatctaggctctcacaagccttagtcattacccctggcctgaattacatatttatgtgagccctctagtccctggaagcagttctgtttgtcaccctgtacttagaaaagtggaaattaatgtatggttcctggacaggcagcaccagcatcaccagggaactttttagaagtgcaaatcctctagtcccacaccagacttactgactcagaaactctgacgtggggcctgtaatctgtgttttaacaagccttctggttgattctgatgtgcattgtcctaggagaaccactgacttagagataagttaagaaactcttcctttcttgaagaatagcgtcttctgctttctaataatgaacttttctgtaatgcctcaagatctacaaagatgtcttattttgcttccagagtcacgtgagaaaacagtaacaatttgagggaggtgttgctctttcagctttatccagagatgtgcggtggcttgttccaggtgttatatgacaggacaatggacctcaaactcaagattctttttcctctacacttcactactttaactctcctgattattttgtggactgatgaataagtacgtgtaaactgattttagttttcctggtaatgaaaaaaaaaaaaaacaatgagtattgttactcttgtaataatcacatcattttttgtctttctttctttttctcattttatttttagacagggtcttgctctgtcacccaggctggagtgcagtggcatgatcacagctcactgaagcttcgaattcccgggtttaagcagtcctcccacctcagcttaccaaggagctaggactacaggcatgtgctgcaacacctggctattttaattttttattttatttttttttatttttgtagagacagggtctccctgtgttgctcaggctggcctagaactccctgggctcaagtgatcctcccaccttggcctcccaaagtgctgggattacaggcgtgagccacttcacccagcctttttttctgtgtctaaaattcagttactctctcattcacttaacagtttagaaaatactaactatacaacatgtactacgctagatgattttttaacttaaaaatgtgcaatgcacatgcatattcataataaaaatccatctttctaactcctgagaggtaagcaaaaacttattttactgctgtaaaaatcacataattggggacaaaaacttgcatgtaatatattttctatgagactgtattgactttgagagtggttagagttaatggtttgaattagcataagtaaaattaatgatattgtaggtcttaaatgtaaatgcaattttacaccaggcccagaagaaattcccctcacctaccttaattggtcagatgaaaatatttggaagaaatacctcattcaattttttaaaagcatattggctacttgccaccattgaagaattagatctcaaactaaagggattgtcgggatgggcttaaacagccttttgatttgttcattaattcatcaattcaacctctcacaaaacaattgtatgttgaatgactgctaggtgctgtgtgctatgctaggtgctgctgatacagttatgagcaagacagactcagaatcttataaatctttttgtacaaaagacaaacaattatttcagtgagttgattaaatttaatattaatatttaataaagcagaagtaattatacctgcaaaggaaaaataaagtgtgtttttagcacctataatttgaggactgtgggatggtagggttatctgaaaagagataaataatttgttgtatatttgtttcttttggggggtgaatgccatgtgccatgatgtgggaattaattggaaaaccataggctatgggagtcagaagagacattagaggctctaatatctgtcccacttttctctaatttagaaatctggaggctgggacccagaaaaggtaaaatgaattaccccaaagccacacttagtgaatgaaagatgtgtgaacggacatatgcatgggcctccttaatcctatgctagggatgaggacatgcctttcccaaaaataggtgaaattaccatatgataaagaacatttttagatattgggagtagggtagggtacaaggctttggaacagcaaagttaatcagctcagtagggggaaggaaaaaggaagagagaaagagcaggacctccagtggaacaagagtctgtggactctgtcaccctgttactccctcttaatcactcagatgatttgctttttctgcttctatttcaaaataagctgctaaaactgagatgcagtgcagtgaaagcacatcatgatctatgttctcatttttgcatggagggagtgagtaaagacctcctacttaggtagtcatcttgctgtccctgcatgtagactaaggctgtgagagagaacttggtgctttataaggcattccctgtgctggtataaatttgacccttgcatgtgagtgatggtgagggacatctctgagaattgttcctggtacaacatgtgtggatttcaacatgggtactgcatgctggagagatcttgatatgacccaaaagcaagaccagaggcaagcttgacacgatggagcaaagggtggaaaggtagaaaatagaatgaaaaatttttctttgctgtcacctcctcgattttattcaaatcttaacccaaacaactagattgcattactgggctcttaaaagttttgttggaaaagtgctgctaaagaataggaagacaatctaggcaatgccattcaggccataggcacggacaaagagttcatgaggcagacaccaaaagcgattacaacagcagcaaacactgacaaatgagatctaattaaactaaagagcttttgcacagcaaaagaaactatcaacagagtaaagagacaacctacacaacgggagagaatgtttgcacactgagcatccaacaaacgtctaacacccagcctctataaggaacttcaacaaatttacaagagtaggatctcataggtttatttacaataataattcaaatgtttcagatttgtaattgtcctttgaaaccattgctttcctttaattccagctataccaaagactctttggaatgggtaaattatttctacttgatagactaggaaagtgagtcacaaaaaggctcgcccagagctactggttattagttgtgtgtttttctctcctattccacactcgagaaaaccccgaagaatagggggtggttaatggtaaaaagaaatctagaagaagagttctggaaatgaaagacagctaggttttgagtttctctaagaaaaggtagggggcaatggatttaaactaggggcatacactgcgattaaatatcgaaagaaacacactgagatttaaaaatgtataaagggcttatgggaacgaagaactaaaaagaaaatatgaggcaagaacatagggtggcgacagaacaaggctgtgagacgtgtgcttggtttgtttaggctttaaaacttgtcaaagtttaccgttttctctttcaagagggatgaaagaaaggatggtgcttcccttagtttgtttgctttcttctttcatgtatctgccctggcagatatgcatacatgtgcaggcccgtgtgttcgtgcacacatatgcacacagataaagtgggaacagagagaagccagtgggtggtggtgagagatgggggcagaattgatgcatcagggggcctaaatccatgcaatgatcaagttcatagcaatttccccaggagactgtatcatattccagtgaaggggagtacggcaggaggttgccatggcaacaaaaggcctgaaatattaactctgactagcaacaggccagtgaaacagcctagctaggatttatggcacattatagtgtgaaaagcaggagaaaattactgtaaaggcaggaattatagcacaacagaacatataaactcccaaatccgtcttcctaattaaaacagcatgctcggaggtagagcacatagtaaggccattagcttaaatggggatgtgctatcatcgctttgttatcaagtttaatgtccttaagactaactgtgtgcactgggagagtgagagcaagggtaagatagtctggagacagatggaagcaagactcttgggcacttgaattcttctcaaactcattcttggtgacataaggtttcttcagatactagtctctgatcccacaggagattctagaagatgccttgatccttctatttgtaaataaatcatcacttctcaggcatgaaggctgagagactgataccacagtcaatccctctggaacccaccaggaagagaggagcaactaatcaatgaggtttattgttgaggaaaaaggatcttggatctcccgactccctagaggggaaaataactcccttgttgtcacagacccaaactttcttttatgtcttagtcaacagcctgcccctaagtgtttgaatttgcaatgcctggaggaagtcttccatgtaattcatactttatgagggaacctttgtcttcttgtgattcttattagaaactcccaatttctcgaactctaatccaggaccttagtactcagtctggagatgggtcagggaaaatgagaaaaccattattttacaagggttcattgttcatcctttattctgccagccattcaacaagtatttaatgaataccttctacattctagtaaatgctgggaacatgtccatgaacattaaacaaacgcacaaataattacttaataaacagttaaatatacaaaagaaagtacagaatgttttgaaaattatgaaaattcttcccatagcactatctttatttccctatcaccatagttgccaaagtgcccccacctgacattcttttaggtttgccagatgaccaagccctacattcccacagctatgtcagcaacatactcaagatcatcctttagacattgcattcccctcccctcccctcccatcctctcccctcctctcccctcttctcccctcctctcctctcctctcctcctctctttcttgagacagggtcttgctctgtcacccaggctgcagtacagtgattcaatcctggctcactccaacttctgcctcctgggctcagatccttccacctcagcctcctgagtagctgggatcacagttgcatgccacagtgcctggctaatttttttttctcttttgtagagatggggtttcaccatgttgcccagctggtctagatctcctaggctcaagcaattcaccctcctcggcctcttaaagtgctgggattacaggcatcagccactacttctggcctgtgtttttcttttttaaagataagacctaaagaggattttgactattttgaaaatatattcatatctgtgtatttttggttattcacttccaggtcctaaagttgcaattaaggagaaaaaaatcattgattattcttagtagttttgatgaggtaatgcaaggtttttctgtagcaaagtcagcatgcgtcgtgaatatggttaagctatgtatgattaaaggattatttatgttttatttataagtatttgctatcaataacagctcccaaaagtaagattcaccagtattactacagcatatgggacttttgctgtagattaataatgccatgatattttctttaatgaaggtggaaatgattgctttattttaacaaagggacctctatggtccccctgagtttgagccttgaatgtagacgatcagggatgctatatcacagctgtctccctgctgataatgactctccttggggtttcataatttctgcctgaaatcctttggtttcctctcaggaggcatggagtgaatttatagggagattcttcaatccagacacaaaaaaaggttttaaaattttttgtgtgtctccatatttgactttctgtctcccattctcatttcctttactttcatgtgtgtgttttcttcttactgtgccaaacacataataaatgctcagtatttgagattaatagatataatcattattattttgtgttattctttctactcctcccttataaaaaaagggattcctcccttcatcatgcttcccatgccttcatatacttcttattggtttgcagaacaggcatagttatgatggagaaagtaaagaataatgattaaaaagaataataacaaaccacataactaactgtttgggtttaaatgacagaactctcaaatccatcttcctaattaaaacagcatgctcagggatagagcacatagtaaggcttttagcttaaatggggatgtgctatcagtgctttgatatcaagtttaatgtccttaagattagctgtatgtgccttgggagagtgagatcaagggtaagatagtctggagacagatggaagcaagattcttgggcagttgaatccttctcaaactcattcttggtgagtactgtcactttctaggtgtgccttaggcaagttatttaactgcttcgtgccccagagagtggtgggggaatcaagggtaggacacatgtgagtcactcagaacagtgcctagtctttagtgaatggaacttcgggtgttcattattgttgatattgcaggtgtaaagaatttgattcacacactcctatcatggattggagggaagttgaatattggttcatatcttgttttaggttctggtttacttgctgcctgaactaggaatataattcgggatttgcagctagtaagttgaaattaagaagaactcaggcctttagattaatcaagtacatatacagtattgaaattatgtctttttatcagtatctttccagaggcccagttaggggagctcctggcatgtgcccggcatgtaaggagtgtccacaagtgtttgcagacctgcactgaacactatttctcttttgatatgatgcagtttaacatactcaaaagagttgagccttatcccctttgctcctcaaaaccaaacacagccagttttggattaacttttattcagtcatgttttatgctgtagggtccaacctaaattttctaggacgcagcccaactaactgaattctttatgtcacttgaaggataacgtcactacagttaattttgataataacatggtttgaaggattcctaactgcttgcaatttatgtaatattctcagtgctctgtgaatttgtagtctgatgaaaacactgaaaagggaggtaatgtttactatttctgattattattctgtatccctcatgcagacctaacctcaagcatttgcagccacccaatgactttttttgaaggaatttttactagtgggttcatctggggcagatgaaaatgtttgcattttagacactccaaatacagatataaaaactttatgtctcctcctccagctctaccttcaactttcttttcactttctttcctactaagagcacatatttccaggctcattcttcatccctaaactctgtccctctccttactcctttgttccgtcttttgtcctctccctggaatttctggtcatttgcattaactacacttataagtcaaactttctttgttcctttgtgggtgtactcagaacatcattacattcaagtaaattcatgtgttttttttctttttttgcccttttatttaaaagcactcctactggccattagaatagttaccagaaatctcctttggtctatggataagaaattctgcagaacttttcaaccaagtaattagatcatattatgtctaaactggtgcctttttctcaactgaatccaagtaggagtatagactgttaacaccttcaactgagtaaactgcaatctttgcaaagtgaattaatatatgaatgcttgctaaggcaagataacacatttttcaattaacaaagtaacaggagctcagggtagcatgtgatatatatatatattctgctacatacatatgcaggtatatttttcaatcaacaaaacaggagctcagggtagcagactacagatatacatgtgtgtatatgtgtatatatatatgtagcatactacatatgtatacatgtgcacatgtacatatttatctgtgtatatgtatacattatgtatatacatatataggtatatgtatacatatatgcatatgtaggtatatgtatacatatacatatataggaatcctatatatgtagtctgctacacatatatattcacatatatatacatgtatatatgtagtctgttgtcctgagctcctgttgtttgtcaattgaaaaatgtgttaccctgtcttagcaagtgtgtgtgtgtgtgtgtgtctatatatatatatatatatatatatatcctcaaaattttacctagagtaaaaaaatgaaatgcctacattacataaagacccatatgacaatattaattctgtgagctgagacatattcatgccaattctccataccttctcccccattgcccattctccagccctttgttgttcactggtcctaactctgctttcttactacaatggcccacttactgcatccttagtttttgacattttgaaatcacaaggttctcatattaagcatggacattttctttacttttttattaattacaaccacagaacttctctcgtcccactccttcttgttttgtctttgggtaaaaggaataaattatatatttatcataaattttaactctacaaaatggccatatttatactttcttcagatttctctcagttctagttaaggtttttttttggcttccatttgccccttatttgattattatactccaagtggctgaagaaaaaatacattcaatataatctgtctgtaattttcatgtcttcctcattaccgtaaaatataatgcttatttgagacacacacacacgcacacacacacgtgcatactcttggcctagatcaaccacacagattcatttattttaccttctcattaattagaccctcaagcctcttaatgttgttttaacactaatttgttgagttctttctggcaccaaactaccccaaactccatgaagaactgaatcatcaatgtattatttataggggcttctttcgtgtgttcgtttaaaatgtagttatctaattaatttattaatttatattgtcaataactattcccagaaggttttttttttttcagatctactagagaacttaaagctttttcttttccaggaatggccaaaatatccagaaggacaatatcaagtaataattaaagttataagctcttggtttgaattcttgctccactagttatgtgaccttgagcaaattacttaacttctctgtgccttacttttgccatttgtgaagtggaaactaaatagcctttatgtcccagtaacaatgcaaagtttattcattgccgattagaaggggcacactgttcaagatgctcattaattcattcactcattttatgtaatgactcatttatcaatcctttgttgagtctcaaccactgtcctaggtaatgctgatacaatcttatgttttgaagctcgccacaaaatttgatcaccactagagccaagatttaacacattatttcatttaatagctattttgagtcttcagggtacaatttacagttttgggggggaagatgtagggaaatatgactcgtcagactcaattaagtgcatttactcagggctacccatctattaagtggcatggttctctaaccccatagttcattctctttttctgtgcaccactagtaggttttgcataaggtaattttgtccaagtggttactgtgtgggtcctgttcacaatcttgatcatgattgtattccaacttctatgtcagagtttgcaagcatgtggcttataaactcaagatggctggtacaatgttgttcaatatttaatggaggggtattaccaagatctagttttctaggttttcttgagaaattagaaaatctggcaacactaagtttgtaataataccagggacaactagccaaactgccctattttgttgaatcatgtgctgtctaagtcctcacagtccttgccacccccaaccctgcaatcatcctacatgtagtgtttctatttatcattgtatttttgcttttatatctcttacatcttgtcacattgtatagcctgtctagcatttgaatttttgactcctgttttaagctagagatatgcttgtcactgaacacgacttgaataaggaaatgagtaataattatgactctacatgccctttatagtacacaaagaactttttaaacaaccatgttatactgctactttgattttacagtagtttgctccaaatgagtcaaatggtatgtagtagagtcataattagaatccagaacaattggtgtaagtctagtgcttttctcatttatctgtcattcattcatttattgacatatttattcaacaagtaaacaattataagtaaatgtcaaatatattctagaccgtatagtggatgctagagatatagatgtgactaagatacagtcccaggctttaagaagctcatagtctatttaggaatgacagataaacggatttttctgagtgcattgtgatgtgaactgagaaatacacagggtatgtacaaggtgccatgttaacatcaaatggcatgtgattgattttatctgtgactcagacatacctctgccactgtagggagtagtataattgacatgggatcctggccagtctccttatggtgatggtggttaatctacatgtccctgagtatcatggtctttacagaagcaggagagtgaaatgtaaaaagtgctggaatggaaatcagggcaccaagtatatatggtcctggctctgacatttgcttgctccttgacgttagaaaaatcgttgaatttatgtgtgcctaaatatcttcaccaaaaaataaggaggcataagaggggagataccagatcttacaaaataagtaggttttatttacaaatacttatggattagtgggggccctttcactaggctacaaagaatttgaggctctatctatgcttagttttaaagaatgctatggtcaaagaagctatgtttgtcataggcactagaggaagggatagaaagattctgagatctaggggcaaaagggattttgagagtgcaagtgaattaaaaagctaggatcagctggctcagtggctcacgcctgtaatcccagcactttgggaggctgaggtgggtggatcatttgagttcaggagtttgagaccagcctggccaacatgatgaaaccccatctactaaaaaaaaaatacaaaaaagtagccaggggtggtgacctgtaatcccaatcccagctactagggaggctaaggcaatagaatcgcttgaacccaggtggcggaggttgtaatgagccgagatcacaccactgcactccagcctgggtgacagagcaagactctgtctcaaaaaaaaaaaaaaaaaaaaaaaaaggctgagatcaagtttctgctgcaaggacattttcattagttaaaataagaaggggctaataccaataaaatgcatagcaagttgactattcaaaccaaaaggcctccagttgaagttgtgttttaatttaagcactagtagggcccagcaaatcaaatattgaaagatgctaaaattagtctgattactttgtgagtcatcaaattgatttgactgtccttgcccttcatataatgtcccaatagacacttaacctgactctacttccttgaatttggcaaagtaagcacgatcattggagttactgcttttgggattatttatttatcacatcacctctgccatcattacttcccactcgtctttgtttggcttactttctactgtgcttctctctatcaaatctttgcacctccttaggaagatctggaagtcacctctctgtaaatctgagaagttattttcattgttgttggatgataatgcttaagccagtgttggaggctgcacaagtaaattacatggttttagaagcacctcctccttccatctgtgctgtttggttgtattctttattggatctgggatgatatgacttctttgcctggggctgttgctgccattacgcagttttggattcactgttgcttcataccaatgttggtgctgtaaatgtacatgataagagttccacagtgagatggactacaagacttctggacccagagccccctaaaactagatccaagaccagattatgcactgctactgaggttggcctgctatggtacagactgctcctccttccccaaggatacaggcacttttacatagagggtacaacagatcttgacctgcaggtgttcaaaaatcgactcataacttccctcctcttatatctatcttatcagtaaacaaatattaataagtcataggaatgaaacatgcgactctttttggttttgttggagtgatcatgccagaactgggactttctaatcttgaattcaaatcatgagagttaagcctgtcatgaactgtgagtgcaagctgacccaggaaccatgtggttctcaaaaaaaaaaaaaaaaaaaaaagcttatggctctttttgtgccacaatggcagaattgagtcattgctacaggcagtgcatggcctgcaaaacctgtgatattattctctgctctgatattaacatagctggaatgtgccccaaatgtatttcaatcaagagctttcatgtattttttgaaataacctggataagaaaatccagattttagactcaccattctgcgggggagtgggggcggcagggggtcattgatcctgtttgttttctctcttgcatgctgtccttggagatcagaggattgatgtttgagtaagaaatgcagaataggaccatatgttaggcagggttatagacagtaaagcaggtcagcatcctataacttgatgactcaatcatcctaacattatgccatctgggcgctgatactgttcagctctcccttttcttatgaaaagtttgactcaggtcaaatagggtgtctttttttgtttccttagaattttgttttctcttccttttagggattagttcttttagtcccacctttgagataaattttataatttcaaattttgaattctgatctaaaccctcaactgttctttctcccacagtaaagaagttaaagcaatcgtagcaaaaaatgtagagagtatttctttccccatccccaactttactgagatataattgacgaataatatcatatgtattcagggagtacaacataatgtttgatgtatatatacattgtaaaatgattaccacaatcaagctaattaacatatccatcacctcacatagctaccgtgtgtgtgtgtttgtgtgtgttaagaatatttcaggttcactcttagcacattttaagtatacaatacattatcattaactgtagtctccatactctatattaggtctccagaatgtattcatcttataacctaagtttgtactatttgacccacacctccccatttcccctatttcctgacccctggtaaccacacttctactctctgtttctatacattcaacttttttagattcaatatataagtgagatcatgcagtatttgtatttctgtttctagattattttactctgcataatgtcctctaggtttatccatgtttttgcaaatatcagaatacccttctttgtcacaggatgaataatatttctatatatatgtgtgtttatacatgcatacatatctctctcacacattttctttgtccattcatctgcacggacactcaggttgatataatgtcttggcttttgtgaataatgctgcaatgaatgtaagagtgcagatatctattcaaggtactgatttcacattttttggatacataattggtcctccatatccatggattttacatttatgaattcaaccaactgtggatcaaaaatatttgaaaaaaatgtgtctgtactaaacatgtacagtttttttcttgtcattattccctaaacgatacagtgtaacaactatttacttagcatttacattgtattaggaacttaagtatcttaaagatgatttaaagtatatggaaagatatgcttaggttttatgcaaatctgatgtcatttcatgggagggtcttgaacatctgaagatttttgtgtctgtgggaggtcctgaaaccaacccctgtggatactgaaggataactgttactcaaaagagggattgctggatcatataaagttattttcttaatgcattcatgtatgcactagtgtgtgtatgcctctatacacccatgcctgtcactctatgacctgttgtcatatctgtacattcatgtaacaatcgccatgtttaagaaatgtagcattgagcctatgtcttaactgatgtatcctgtttcaatctatcttgaagtggccaatcaccctatccccaaagatactgctactcaaagcatggtccctgaaccatctaggaacttattacaaatgcagaaccagagaactcatgcctgatatactgaattggaatctgcatttaacagatttcttggtgactcatatacatgttaaaggttgtgaacactgttctaagaaatgtcttcacttcttattcctttggcttgcagtgattaattgggtagaggaggcagcatatcagaatcattatgaagcttaaaataaagtgtgcctgggttttagacccaagattaaatctgaagcgaaaccaaatgtctgtattttttaatgattccaaaggcaatcctgatgtacccaacacagggcaagggtatatattgcaaggagtcacagaatctttttattcttttcttttaaacctcctggcaaccttctcttttgctgcctggtcaacaaagattatctaatgtggttgatcagcttttcactgtcccgttcattcttatgacaatttgccctaactatgcacaaactgagaactctttttaagggtaaataaatgttctcattcatcctcacaattgatttaaaatattgtaacattttctaaatatgtacaaacagaaagctatctcatagttcttgtatgaccagaaagttattgaaattttacaaatcaaatgcaaacaataccatgtaaatgaagaacattaacgtggcagatgacattttcctgagaataaagctctacttgcaacataaatacaacacaattgctatattttaggttctttagaatttggcacattttactgctgtatgccttgtgatttctcagttctgttattatttgtctctgtttgaacccatgcaaaaccttcatccacacagcttagactgtcattcagccctctctttctgcaaataaatctaatatatgtctatagtcagcccacttttcttctatgcagatttcattaatgaaagtagtaattcttgtcagtgtgattgcaagcacaaactcaaagataacattacatggcagtccttggttggcaattgaatggtcagtattcagttgaaaggtcatcaaccagaaatatggttagccattttttagaagaaaacaaattagaaaaaagtatggataacaactttggacaccaaagaatatttctataatatttcctgctcagtctgtagtggaaggcagtagagaatagaacttacaaacatagccttggagtgagaaagatctggaaactatttatgatagttctacttactagatgcatctcttggaacaagattcttcgcttctctgtaacttggtttcctcgtgtgtatgatggagatgattattatctatttcataggccaggaataggtatgatatgcaagaagcacctgtggccctatcttagcacatcataaggactaagttatcaggagctattttaactattataatgatgttatcattgttgcatctttattataaatgtgaacattaagtttttattaattaaacctgccacatatttcttccatttgcttcattgtactcttaagatgtttattcatttttctcacttcttgctttaagaacctggttattacagaggtgaaaaatcccatcaaaatgctagagaatttggcacaattattgcttatatttctcctattgctgcttttactgctgtagctgcctcctgaactgctgctgctgctaccatggcttctagatgcttctttgacaatttatttattttccagtggaacccatctgtgaagaagcccttcatagcagtaatatcctggggctgggcactactacaataatgatgctttcgttaatcaccccatgtaattttagtttttgctgataaatactacaataaatcgattgaaactgatgaaaatagctcaaaatttagagacatacagtatttcattttaccatcagcgtatttctatgtttatgcaatagggattgaaaaagttcaatccccatgctcaaaaacacatacttccagctctctgagatgatatgccagacagggcttttgattagaagccttatttttttgcctagttctagcttctgtatgagtggagactttattaacaaaggtaggtttggagcactcaacagaagcgtagagaatatatggaaaaaaaaaaagaagaagaaaaaagataaaagggaaccaaacaaaacaggtttacaactgttttactaataagagggaaaagtctgctcatgagttaaaccaagactaaagataaagaaagaaagaacatccaaaaccttcatgtgctttgtatttgtacatttctgacatatgcatgaagcatgagggaaatacagtaatacactgaggtatgctgccaacatcctgactattcctagtcattagatagcctagtgatgtttttcagttagaggggtgctgaccttactgttttcagtaattataagtctataattaccttttatattctttaagtgtatttttgtaatttcaggttaggtatacaagagtggaaaccgtgtttgatctgacgttttggctcttgtatgaggcagctttaaatagctgtcagatttggtttcattttagtgaagggttaagtaattttaaggcgttaaaaccatgggcaataaataaccatccacagtcatcgaaggaagttgcttcttagacaagagaatgaagctagagctgctagggacattagtctgataaaaagtcacatcagagaaggtttacctccaaatgattttggtggcaaagaagcctgtgcatcaacacctgcccttgagcacagcagtcaataaaaataaggtaacacaaagcagctctcttgaaaacaaaatcagagcctatactcttaagaagttcatagccgtcacaaaaggaccctcgtggcagtagaagctaaatggccaagaatgctggaaatggggctgcaagtcataaatggagaaagtctaaactaagagggtaaacagcaggtgacagtaaattggagcacttggccaggcaagccctgcatctgccacagtgagatcagttactggagagtcatcccaggcctatttcacactgccgtctgggaatgtgggactctaggttcttaagtgttaactatgggcaaaaaagaaacaagaagtataaagtcattgagaagattgtctgcagtagggcaggcatggatgaaaatcgaactctactttgtctgtgggtgaattatttaccttctatctgtcctgggtctgtaaaacagttataagaatagacagggttaatttgtgaaacttagatgaatatgaagtatgagtaaagtaccagacatttagaaatgctcatcaacatcttgaaagaagttctttcattgagataaaaagggtctttgtatctctttctgtaattcttctgaaaacagatggtcagggtagagagctggtgcaatagctcaaatggtaaatgacagacataagattcaaaagaagctcaataggaagaatgatcctaagacaaaatggatgaattgcaatagggttacataaaccatttccttaggtttagaaaagtcgttattccatttctaggtaggagagattccactgaaataatgtttctgtgctaaaaatgcaaaagccaatttataacttttaaaattataaattgaataagtgcaaagagtgtgatatggctgctagatattggtagaaaaccatccttctcatttgtgcccttattagatgtcatcaagagtcttgtgtgcctcctgctgccacatttaaagaggggagagagagagagaaagggaggggagagaaggatgaaagagagagagaaagacagaaagtgaggcatgtccagtatggtgaaatcagctgtaatcaattccagctcaaccactatgagtccttggacaagttacctcattgacaaaatgaggatggaagctccctccctggcttgacctaaggattggattacataatgcaagtaaacaactctgcacagtacctggctcataactgggagctctgattattcacaggaaagagtggtgagagacagctatgagataaggagctgcagaagctctcggtgatctgccaatataagagaagcttaaggcaggacatgacaactgtcatcaattatttagatacctgttatgtagagaagcaattctcattaatcagcctaactctaaaggaaagaaccaggaccagtagatagaagttatgggaagagatattttggctccataacagaagtaatgaaagcagtagtggtgtagtagtaggaactgagaatgcaaatagctcttggagtgttccagttcctgttctaaggactctgcattcttatttgatcctcagaacatctatgtgaggtaggtataattattattattttcattttacagatgaagaaactgaggtacacagtgaagtaaatttccaagaacatgtaaaatagaaatgaatgacagagctggaatttgagcccaggcattctgtctcttaacccatttatgctggaggttgtgattttttaaactgatgtatgacagaaaaatcagaccttggcaaatatcttgagcagtaggctataaataactcccacatgcttagtgttccaataatggaacactaggcataagtggctacacacattatctcaactgccccaaaaagtagctcaaatacacagggaaaggctgagtgactgtacaccatggttgctagtaaggggattcctgcactgagttaggaattggcctggataatctctacggtccctcccatgacatgtctgtcattttataaaaccaaaaagcaagcaaaaaacacatggtggcaaaagctaatacaaaacctagagtcaaacattcatgaggttttctcaatgcaaaagaagcctaaaatattcacctgtaatctatttatatcaaccttatactcagttataaaaggatggccatcttattgtcttgttcaaggcagagcagaagaaatacatttgaatctgggagtggtagtagaactaatagcagcaaggagagactcatgaatctttaggagaaaaaggaggtgttaacgcactgaacaaatattaactgagtgcctcttctgggctgagataagaaaatcattgtgaaaccaaataagaacaagcattgcaggccccagatatttagagactccagtgacgtttgggcttttcctgaactttagtgtgcaatgtcattttaaaaagtattttaggggaaatgataaattatagccagtttcataaaagaggtatacattatatttttaaaagactttatatgaactgaatcatttgactttaagtttgggtgtaaaaagggtatacttcaatttctctcaggccagcttgctccccagtaaatgacaaatatgggtctcgccgcactaagatattttaatatacttcagtgggaaaggctctgatccagaaatttgcagttgtgctattgataaaatttatgagaaactttcttctgtgggcctcagttttcacatctattaaatgtgctgatttaactaaactatctttatttcctttaggctcagacatttcctatttcttttatttctataactgtacttattttcattatgtagataccagatggcaaaatgtcctggtagtgtgtgcaggactcaaactgattctgggaaaatggggcacaagtgaattctaaggtataaggagctgaagtgagcagaagcctctagaatctatttctatttctgtcagctacagaatgtaggcccagtttaatattaggagacgttgtctagcttttaatattaggtttcagagttgcctaacaaaacccatagaggttgtttcttgcttagagtaatttaatgttataaggatcaggcaggtgcaacatggcataaaagtattacttgccccaatgccacctttaatttctctcaatctttcaaagcatcaaaagaaaaaaaagttctctctttgtctattgtttataaatataatttattctctgtgcttaggtgattttcatagataagaggacattcattgtattcagtaaaacttctagagcagtccttacactagtaacaagtttcctgggcaatactgctttgttatcagacttcaccatgtagatctcacatccttctcttttctgatcttgctcttatcatttcaaagttacatgtagagtgaggatgcaggtttcatagggtttttgtttttatctgagacagagtcttgctttgtcacccaggctggaatgcagtagtgtgagcatggctcactgtagcctcgacattctgggctcaagtgatctcctgcctcagcctcccaagtagctgggaccacagatacatgccaccacccccagcaattttttttttgtcttttttgtagagatggaggtctcaccatgttgcctaggctgggcttgaactcctgggctcaagcattcctccctcctcagcctcccaaagtgtaggattacaggcatgagccaccaggcccagcccatggtgttttctgacaaagctactccattcatttgctgtttgaagttgattagtgaaccacattttgatgttcactaccttcatttgcttttatattcaactgcattctttaagaatcttccctcagcagttagaaggccaaagataatttaaatgggattgagggatatttccctctcacattagtgctgtagagccacataagaaggtattctatggtagaaatagatttagaaaggtcaaatttgaaaaataaagtaagtccagacccgagtgataagatggatggctgtctagattgagcatgcaattctaatacttcagttccacattcttttttttttttttttttttgagacggaatcttgctctgtcacccaggctggaatgcagtggcacaatctcggctcactgcaacctccgcctcccaggttcaagcaattctcctgcctcagcctcccgagtagctgggactacaggcgccctccaccatgcccggctaatttttgtatttttagtagagacggggtttcaccatattggccaggctggtctcgaactcctgatcttgtgatccacccgccttggcctctcaaagtgctgggattacaggcatgggtcaccgcgcccggcctagtcacacattcttaaagatgtttcagcttttgatttttaaacagaatggtatggagaagggcttttgctggaggtgcttcagtcagttagcttcaactctgaatgaacaccgaagatgtcttggctttcctaaagactcaggctacagattcttgctcatggccaggggtaaaatgcccttcatccaatttaatgctctcccatgtgtagcaaacatatcaactactctgggttggcatatgggggttttagtaaaactgtgtaaagaatttgccatagaaataggaatagtctttcactttccattttgtactctgggtcttctctgattatatatctcttttggttttcctttccaagctccatctttatcccaacctattgggtatacatctgatcactgctttgctaacacgataatacttgagactaattaacaataccttagtgatactgcattctcaaataggaaaatttcaaatgactagaagaagactagttgatgcctaggaccagtactagaatggttaagttactggttggaaacttcagtgtgcttgtttctgcaggaggagaactgctttaatgtgaattgcattagaaagctcccctccacttttccttccccagtgtttgtctactgaatagcagggtgaaagcgtcggttgctctcatcgcctcacaatcaggccaattgggcataactgctttctggtagaattcatctcataataaattgcattcatggaagatgcctagtatgtggtaaacatggcatggacaggccaatactagagaaagatagaacactggctcagaggagacacaaacaaattgcctttctgctggctctgaaatattctttttcagtgtagttaaatataaagttgaaatgatgctaactacaccttgatccaaacaacctcttcattgcttggcttctgatgggaatgctgtaggtagccatttgttttaatgattgatttcactaatactgagtcacaattgcactcctcttgaagttgacataagatctccatgcacagaaaatgaattcattagaatcaaagtgattgtataagaaactcaaattatccaggtgttgaaatgcatgtctactttcttttcagacaatggaatcatttataaaacatatagttatttaaaacacagacacacatacagagactatcatatgggattgtgagagattgctaattaacacatacaaattaagacaaatattcattaaaacaaatattaattcctcaaagtttaattcttaacaaatattaattctacaaagagctaaaaggctctatgtaggtagataacggcattcagatttacctcctaatctttacagtaattggttttaagggttggagaaagaagtaaaggaggtaaaagaatgtacatagacaataataattatgaataacatttactaagcatctactatgtgttaggtactttgctaaccaagcttagcatttcacatatattatttaaaattcacattaactacctgaattacattcaattattttactcttcagggagatttgtataagttgtgtaaggtctaaaactgttaacaggaaagctgggagttgaactcaagtttctctagttcctgagccaagatcttagttgctaagttattaccacattctcagagcctctgaagcaataccactgaattcagggcttatgtttattctagcagcatctttctttacaaaggggtatgtaaaaatagtagtccttctaatttctcctccctccccccaatatttctgggattatgcaggcgatactttgcttttggaaagaatgaaatataggcaattgacagaggcagggtcctgactttcttttttaattttttttccttgatgatgagcataatcatgtgaataattaagcttcaagagctaaatgactgattggcagcaagctgactaactgttctttatttataaggatatagctttcatgggaaaatgtagggtggttggtaaaacatcagaagtctcccttgagatttcataaatgccatagcttaggggttaaactcacagacatttaagtcacatgttcttgagttcaagtccaagttgctggccctttgggacttttaactcccctatgatcgattgctataaattaaaactcagttaatagaatataatgtaagtagttatatatcggaaccaatgatagtacctacttcttagggttgtcaagagcatccagagagctaagttatacaaaggactagctcgatcactggcatgggataaatatttgataaatgtggtttgtaatattttataaaagtgacaaaaattcttatttatgtaccttttttactatgaggagaatcaggttggattcttagaaaaccttcagtgcctctgtcacagccttgcaaagactacttgggatatgtttatgttgataatttctccccttttatttttctatcagtcagatttataataagaatcagctgttctttctaaaagactattgtgcctttatattattttctttaattttcaataatcctatgaattagcaattattatcctcatttttacaaatgaggaaactagagatccgaaaagtaaacagcctcccagctaataaacagatgagctgcaataccaaccgaggtcttctgtctctcacaatccagttctaatattaaaacaaaaggctttgagaccatatgacccaaggtgcaatctgtttttcagatcagaagattgggactctaagatagaaacacggtctgtccagagtcacatagcaagttggagacagaatggacactagaccctaggcctctatttctggtctagagctctttcatcatttccaggctacttgtttgtttgcagcaatttgtatgttctgtagaggaagattgaaaagagaaatggatagaaagagagagcagagatgaggggatgagagtctggagagaaggggagagagagagagagagagagaaatagattcatatatgaaggttagatcaagggccagcatccaagggtggtctaggtagagtactgggaaccaatctcaacctggcaggagaggcataattaaccagtgtctacatctgtgatattatttgtccttgctccaaaatgacaatagtgattacagtagatgcagctgacagtagcagatgacacaacctcctttcacctcctggccagctgcagcgctaccatcaccagctatagcagctttctccctggagattcagctttttctccactgatggaaggctttccctccatcactccaatgtcagagcttggccgatttggttcctcaggagactgtagagaaattcactcccattgaagcattttcttgacattttgacattcaatcagagaaaggcaaaaggcaggctaagggcccaatcatcaggtccatgaagatcaagctatgttttctgagtacctattgatagaatgtgcaggagattattactgtttgccaaagctctattgatcttggctttgtgaagctcaaagtctgtttacagccacctataaaaaccaacagccacttcttttactgaaggttaacgtgctgtgtttatttaattgaatggaaatggccttgtgttttccaaatgtcattgttaataaattttcaagggaatctgtgactagtgtgtaggtgttgaggatgggagaagggactgtcatggggagggacggctgttggaatttgaagttgctggaagcaagagataaaagacaaacacatagatacgacattggaataatttccctgtatagaagtgctataaaatatccttactctatattagtgttgttttttaaacttgtcagtaagaattctcccctgggtgttttattctttagcctgcgtctgtttttgtttgttcttttgggtttccaaaaaatatatattttaaagtgacattgagcattttagtataattgtgagttttggggttgaatatttttcactattatttgatcagttttttccttctgtaagagatttaacagaaatggctaaaattaggagccatattagatagaggaagatattggcaatcctattgacctgctttttaagaggcgtgtttcaactaacaggaggagagatgcaaagagctttcaccaaagcaatcagaagacctgtaaacagcctcagggaactgtaaaagtctgtgagggtctctagtgtaccagatgaaaagcagaaactttaggtagccgtctgaatgtgtcaaatgggaatatcagaataactcactaaatttcctttttcaactttcctcgcaaggtttgtctttttatgtggtaaatgttggtgagttccatttttaagttttactcttcccattctacttcagtctccttagcaaacacacacacaaacacacacacacacaaacacacacaacacacacaaaattgttcttcttgaaagatacatgtaaatgaatggtgagtaaaaaattaaagtctggacgcagtggctcacgcctgtaatcccagcactttgggaggccaaggtgggtgactcacttcaggtcgggtcactcacttgagaccaggagttcgagaccagcctggccaacatggtgaaaccccatctctactaaaaatacaaaaattggtcgggagtggtggcatgtgcctgtaatcccggctactcaggaggctgaggcaggagaattgcttgaaccctggagttggaggttgaagagagctgagatcgcaccactgcactccagcctggcgacagagcgagactccatctcaaaaaaaaaaaaaaaaattaaaaacttattgtctcaaagcagccattcatttattcaaggaattgctaaacttttctaagggaccaggcactggcctgagtgctacatcgagagagagtaataagatcgaggatcccattcccacgttctgcacgtgtgtgtgtgcgtgtgtgtgtgtgtttcgatctgtgtgtgttggtgggtgaatggctatgcaaatacataacaatttaataagtcttatgatactgggagtacctgactctgattagggggcactgctttaatatctggcaatggaggatatatccatcttcattcgctccttcatgcccccatctaaccttgattaaagtctgatttcaaatagcccatttgttgaacattttatcaaggtttttcaggagcctgacagaaaatgtaaagtcgtcgtatgttttgttttgggaaatactacttctaaaacttatttgagtgtctcagctttttctttcttttattttattttttaattaaaaaaataatattatcttttatttgtctttaagagacagaaccatgtctgcctagtaccttcacttggtcaaatacctcttttggtggaaacaacacaaattatgtaggttgtatatacaggatgaactcggtttaaagataagacatgaaattcagtggaaatattctttaaattctaaacagagaaatcaaaacaaaggtatattcatactgcatgtgggtataagttttttcttacatatattatatatacatatataagtgtaacacttttaagaattttattgaccatctaaatatatagcaaaatcagctgggggtacaagagtgtaactacttccttttttcctaagttgtggaaaatgtgagaaatgagaagtaagcaagacggaggattagaatcacaaggtaggtttccctagtatgaattcagtacctgaaaatcttcttagttctgagtttgaagcagattctataaaatcctgtattaaaataaatacagtaggaattagcaaggatgggggaataggagtgggcagatatgttcttgaagagaataaatgcagaacattattctttgtcaattaatttttactttttatagattgttagactatttaacaaattcttatgagaaaagtgtgtttttaagtgatctctgggaagatgttcctgataataaattaaattaggactgtgcattgcggagcccccaccagttgtactccctctggtgaatttaataccagacgcaacctagttagaggtgacatgaaatcacagaatttgataatcttttttttcaaagttaagcaaatatagatgagctcttcttgtatatgtaagatgccagatggtgtttttgagaaatcgattcgtgtatagtaccagtccagacaaatgggtccaatccttctatagataaggcgacccacttttcctattcaaccatagggctccgttgtctggcacacattatttaacaaagtgacattgtggagtcatcagtaagaatgtggcttctggagtgaatttctttttgagtttgaatcctttgctgggtgatcctggccaaatttcttaacctgtttgaacattagtttcctcgtctctaaaatgtgagtaacaagagtttctcgtaggaactatgtaaaggtaaaaagaaactgtctagcatagtgcctggcacataatataatttcataaagtgtaactcttgttattaaactggatagctcaatagatattgctccagaaacactagtgcatgaggctgccattacgatcgccaaatgatagcagctgtgaactgccactccaagccctttgcagatgcatgtacttcttcgcaagggcttctagtcattgacttacccagatctatcgtcacctcttgaagaaacaaccagaaaacactttccctacttacagtgaaataagtgagtatccttctacagaaggacagttagttcttgaaccaagggacttcaatgccatatgagaaaaattgtcttgtatacaatatctttggagagtgaaagagttttaagcatcttgatattagaaattaaggctacaatgcattcaggttgcctataagttattcatttctgtatcttgttgtcaggaaaaaaaaaaagaatacttcaaaattaagttttttccatctaggatctcagatctcattgtataattttcatcattcaactggatttaataggtctatcagtatgtacagtaaattattttcaaaattcttcacctaatagctaaaaagtaagccctaatctggttttctgtgaaattgtcctcgacagaataaatagttcaggtgtctgaaaagaaaaattccatattcctatatctgggttgacacttaagactgcgtttgtgaagcctccttatatcttgaagacaggatgtatctatcttgctggtgagaattttgctgttctggagtctatatcaggtacctcaaacgtgatgagtgatagaggtcatgttttgttgtatcacagtttgttgaatctccctccttagagattcatttgactgaaaaattaacaggtttatttgtgcaaatggtagttgcacacccaattattgcttctgggtttcccatgtgactagccaagactcaaggtgaaagtttggcctgcagctttggcaaacaaaggagaagctaatgaatcataaaggtcacatcttcttgaattttcttctctttcttcactgttctgattacttttaaaaaatctctattccttatatattctgagtacaaaaactcattagcaagatttggttctgttgtctggagaattttctgctcactgcaataggaaggtgatccaggtaccacataactgtctccatgaagatgtttgcaatatgttatgagttttttaaagttattgtttgagaaaaggccatataaggagataatttttgcttattactaattagcttacccctcttctgctgttcttacatttatgactatttacttgtaaataaaagttattgatctttttagaagtccattggattctgctgcttttatttttgagaatcattttaacttacaaacacatattaccttttccaaaaagtgaccacatagctttgtgactcctccctcatatattttgagcacacagaaattaccatcctctcactgagtactatacatcggggcctctggctcttacctcctttctcagatccaggactgaatgcatagctgaaaagatgactttagtctttattcacaacctgtaaactaaagaaggtcattaaaaaaaattcttcgtatcttgcaaacaaaagaactgagatacctatctaagaatggcaagtctgagaagcaaatacctggctctagccctctgccataagtttgcaagcttgtgtagacctttgtctgagaattggttaggtatagaaatacacttcagcagagacttgacctatatgactttcaaatttgttatgattctacaattagtgtttgctaaaatcaaaactgtagaatatagtatagagagtatattaattgttggctctatgctgacccaaaatgaagtcttttaagagattagagtactacactgtctacatttaaccaggtgtcatataacaattaatgaaaattcaatgttttatacttagaatttttaagtaataacagatgatggatcaagattaaaactgtattgacagcctaagcaaagaaataaaatctaacaaaagaagctttaaaagaaatgaatgtaaaatcctatattttgattaaataaatcaagtttgcaagtaccaggtataggagttttggactgacagaactttacactaaacaagatgtaaaagttttagttgtacataaatttaaaatgaacctgccttactgtttcttttaaaaaaattaagaaaaaaaaactctacgcagtattaagttctattaatagacttctaatttattactaaattatgttgactcttcatctgaaatgtatctatctttttactccattaatttctcttcagtgatctagtcacagaccttattatcctttacatgacagtagcttaataatggtatccttgcttttctccctactacagtctgtcctctgcatgtagccaatgttatacttgatgacttaaatctgatcatatcattcccaagtaaataagccaacaatggtcctcaataattaccgaattaattattccctgagaaatggggcccctcagtgtaatatctcatctcaatcattttttttagttttgcagatagcacctgccatttctaaatatgtgtctttaattcatcttaaccacttcggattatgacatcctaaaattgccatatatttttatatttccatacttttgctcaggatcttctttggttaaaataatctttcctacttcacctttgaccaaccactgccagtgatccatgagattcaaatgtcttctcatttggaaggactgcctgataacctgctacctcagcttcaggagaaaccagttgctggcctctgtgctgttctcctacctctaaacagaatgtaaagtactattattttctcttcaattgacaaggcgcttctatgattgttcccatcttctgttggtattatttttaataaaaagatctcatatattgtgttaaagtactaaccttgagaagacccccagtctgaaagaagaatatttcacttctcccttccccattttcaatcacacatattattgaataattttggttaacatccttaatattctaaagtatcttgaaacagttattttttctattttcagaaataaggttttagtgataatactgaaaattctaaactgtgagcttttgtttcagggatagaaatttaaaaaatcatgaggtcttctgtcatgattttgaatgtttaatctactttgtccagtgggcttctgaatcttttgtgattggcacgtgttactgagatgcagacacatgcaattctggtgaccgagttctcaagctacagtttattatttcacactgcagtaaatgtatggactgagggtgaggggactgtcagaagatgtgtgtcttgggtgcctgaataatgcttcttttgctattcactttcatcttaatttagagtcatatatttcttgttaccttttggttttccccggcacctaacaatgtaatcttcacaaagcagtgctacattctaaatttatagtgcagtaaatgaaagaggttggatccattgtgcttcataattcagagggaagaatgtctgcagaaagaaacgtgggtattctttggaatgccatatgtgcaataattgaaacattttgaggaatttccaatttacctcttaggaggaattcaggtttttgttctttttgaaaagaagatgattgttacagacttgggaaatcctaaaagaaaaaagaaggactgttgggacatcctggttgttcttgacccccgcaagaacagctacagttctttcagatcacagcacttgaagtcagaagcctaagtgggtgtccagagaattcaatgccgaaaggttttgcccctcttaactctcctgaccactagcattctctctaccttagtgtgtgggtaggtctttgttatgtctccagactcacactagttttttaaaaaaaatacttaggtaaatagcagtgggaccccaattctctttttcttgtattccagatgaaaaagaaaaaaactcaccagtttaaagtgctcgtttcatatgttcacgatatctaatagatgttaaattttggtaccaggaagtgagagagtgatatgaaggaactagtgaaataagattttaatacctggcaacatttcatagatgataacactggtccacttgaacacttgccattttttattcattatatctggtctagatgggtctagctaaaactttattccgtgcaacacagctcttgcctatttagaagcctttaactgtgtgtttaattatcacctggagtggttcttttgcagagaaaacatagaacgtaggatccagtctttcacaatgcaaaagttgaacctctgtcacctggcatgcttgaggaaatttcagaagctttgtcctcaccttagacccactgaataaggtcactaaggaatggcacccaggaatctacattttacaacctctccatttaatacatatgcttgctagaggttaagcaacactgtgggctcacctgtagcacgtagcactaatcagacaagactcaatatctggccagacttttagatgataatcacaagaagcaataacatttttctgaaacaaaacaagtggcaaatgatactgtgaaatctctggcactggttacccaatatccacacataccccacttagctctagattagaaaataaagaatgagattcagcccagaggcagccatgcgcacaggtgcacaatttggaaaaaatgagaccaattcttaaaaaaaaaatcaagctgaagtcaaagaagcttaataaaaatgtaaatcctctttcaactggctccatgttttctgtctcttcatgaacacctgccacctggtgaataatgtcaaggcctctcagagtgggtcaggaaagcaaaaaggcccatggccggaaatgctattaggcattcaaaaatgaacaatccaggtaacaaaaactcatgtcagtggtgcaggtacgatggcgtattctcttcataagaaacactatgcaaatgaatcgcaaagcgtgagagagcagaacttttcactgctgccttctgtcaagttgggaacactgaggtgaagattgagtgcaggggatttggggtggggagggtcccctgtgaaacagtttctgaatgaaagtgagggaagcaggcatgggatagaaggataatttggtctgagatgcaagtgcggctaaagcctcagccagtcccacggtgagctctgaagttaggttgtcccttctgagatgacctaaattgcataaacggatctgagtctttgtacctcccgtgcccatccaaacatccagtcaccatatgaggccacacccattgactgaatccggttctggagagggactgaggtttggtgcaagttgtccgcagccaggacttccaacatctggaggatgagcaccctaatcttgaaggctgaattcagtagcacatccactgcaactgaatatctgattcaaggccaaaaattgtggagctcagagccacaacgggcttctgatcttccacaggctgctgaatgcccctggcagtccactgaagtgataatgttaaggaaggaaatgattagaagtaatttgctgagggatcagagttgcatttggagctatcagcaagtaatgaagcaagaatgtcaatcgacaggtgaatcaaagtcagggcaaaagaaagggaggaggaaatttgctcaaaaaaaaaaaaaagccattactttcattgaggcctgggatgaggtaagtagagaaagtttgcaactgccagagattgctaaataggaaaaaatcttttgtgcacgtgttgctggtgggattgggacatgaaagatgttgtgggacagaatctcactggaaaagtcaagaatcagagctggtttcaaaaaaactcaaccttcaaataaaggatcccctatctctatattgaacctggcaatgaatacctctttcttttccttattggttggcaaggatgtagaacactaagatacacacacacacacacacacacacacacacacacacatacattctttgtttgtttgttttgagacaggatctcgctctgtcacccaggctaagtgcagtggcatgatcatagctcactgcagtcccaatctcctgagctcaggctatcctcctgccacagcctcctgaggagctgggactataggcatggaccatcacacttggctgatttttaattttttgtagagatgaggtctccctgtgttgcccaggctggtctcaaactctcggactgaagggatcctcacacctcggcctcccaaagtgctaggattacaggcacgaaccaccacacttggcaaatatttaattaaatattaaatatatctaattgtttgataaaaagggagagaggctctccttgatggaagtaataggttctggaatgcagtgagttctgctcggaatgccctctgaccactgcctccatgtgtctaatataacctatgacattacccatagaggtgccgctttttcattgggggacactgctccaaaagtgcctggaaccaggttaaaccattgaggttataaggaataaagggcctttataataaagaccatttctgtgactgtgttctgaaactgataaaaagcacttctttctgtctttggtgtcttccttgatagttgtaataagaatagtagtagttattcttctttttcttttttcttgtttgatttgtaaaataaaaacacttttcctttcctctctggtgtttgaatgcacccagtctcatttcagcagtccacaatgacatactgaaagttgtaatagagctacagctttgctgtatagaggtccatggatatgttttctaattataatcattcttgagctgtttgtaactatttcagactgcttacccagctgtatgccactggcttgtttctatttcaggaatcatctcttcctcttctcctccttccccctccattcccaaatccccacattagtagcggccaagttattttcaagtacagtgtatatgtaagtgatcttgatctgctaagaaaagacatactgtttgtttttattgggcaggcagcatcctagggaaaaggagaattacaagtctaatttggttaggaagcatcctttttcgcaacagtgaggactgcaggtaccactaaaatcattgctgttcattactaattggattaagtcctctctgttccaccaaccctgcttttaaaatttcttctctgcttttcattcagaaactgcctcagcctgcactccgttatctacctccaggctttattgcaacacctcccactgcctctctcctggaccaccttgtccacgctgcacacagttgccaaattcaactttctgtgttgcaaaccttgttgtggctccccctgtgtaaaaaccttttagtgtttctcatctccatgaatcactaatccatggtgcttagtagcatgtcaaaggcccttccgaatctatctctagcctacctctgtggaccttatctcttggctctcccacctgcccccacccacacctctaccccttgctttttgcttttcttttccccaaattctgagctgcttatacgttctttcccttcatggtgttttatacctcagcgctttcatgcatatagttcccagtgtctggaatgatcttttggataaatagtgacacttcaagaaatatctttgtcccaacttcagaaacctaattttcattgtgatgaatagctcccacagttttttccccgggctattttgcaagtattgaggattcacatgttaatcctgaaatgtgcgttctaaaaaaaaaaaaaagctccatctgagaacccattaaacctctagtttaaatacccaggcattcttaaaaatcgaatttgcattgtctttgctgcagtgtcttctcaggtaaccaatgcagccatgtcagattgatacatcatgttgttaagacccccatctgtctctagggtagtagaaaagatgcagctacggaagagaacagaactgtgctcctgaacatggcatggctgccgaacctcacagataatcctgaagcaggcaatctctgcagacttctggggtgatttgagcatgtgtagcttttgctggcagctgagagaaatgggaagtcccctgagctgaaagttgggagcactacatcctcatcaacctaaatctgccacatacaatctctgtgatcctggggaagtcactggacctctttgagtcatgctgtcctcaaatgtaaaatgagttttacatttaaatgttctaaataagttcctttagaatgtttcaattaaaaatttatccatctgtatcagataatattggtgatctcattcaatttttttagttccctttttgattatttttgtacccccaggcctcagcgtggcttctcttgcaatagccagcatggcttgttcttaagaaagttgtcctcagtctactactctattgcctctggctggaaaaactcgggtaggtgcaaggtgtccaccagcattttctcctgggatcgggctgctgccagctctggcactttgcctgggactgtagccttgtctggactcccctttccctctgcgtgggagtgcttccttatcaatcatttgccctcgaatccatgtcttaggatctgcttatgggttggactcagcccaagatattctctatctaggtatcctggttgagtttgttaataaaagttcggtttggatttagacgagacaaaccaaacttggttagggtaaatagaggaggaaggtgccttgtttcctaaattgtgtttgataaagtgcttaataagggcggcttccaaagtggttccaggtaaagaagtactaaaaaggcctctttattaatgtatggattttctgtcactgatgtttgtctgcctatgaatagtttagactagatttttcaagtaagcactttataatatctgtaactctttctaggtgttttataaacaactaactgagtagagcagcaacaacaaagagctgtaagttttctgccagtaacttctagtttttacctcctcaaaagctattttaaacaaatatgtgtctaattaaatctcaagggaatgtgaaataaaaactggaatttgagttcagagtacctgaaagagcatttttggaaaagactttgtttatgccatttgtgcatatgtagatggaatcaaaatgtataagataataagagaaaggtgccattgagcctccaagtagaagcccgatgacttcacttatgcccggctgatcacccaagtgtacagttagtcatgatttgatatctgttgtagattaagcctgttgcacacagtttctaccctgatgtttggcatgggccatgcaccatacattgaaacaagattttgaagtaaatagaaccacattttccactttctttcatgcagttattttctctgcaagatgcattctggctccttttgtgaaacctcagatttgattctacaagctgctgagaaacacagcacctgcatgccacccaccaaagagagtgtttacatagtctgttgtacatagaaagcatgtgggtgtgagtatacgtatgtgtgatgaaatggttcaattgacattgtacttacaagataaactgcatgtatcaccaaattatttgacttctctactcagaaagcattaaattttgaggtttaagtagacattaaacatttataatttaatatacatttaataaaattaatatttatgaacacatttgccttgggaattaaaagtggaaaacagtgtcatttacttgctaatggccaccacggtgccatgcagttacagatttgatggcctgcatcccagtgacattgctccaagaccagagacaagaccattttttgtttgcatggagctaagtattattttcagaaaatcaaaaccaaaaggtatgttttgcttcctagctcagggtctctggagacctgacctgccaggtatcatttgctcattttatttaaagaaaataaaataaatattcaatggagaagttaaaagtctctttccaactcaactctatatctcaaagaattattttctcattctgtcaagccatgttaaaattttcaagtaaagtcgtaatcatttctacattttctttcctgtttgtcttgcatctcttaaaatggttttaatgttagaagctacttgacaatggatgtgaaaatagatttaactcagcaatcaatatattatcaataataatcattaatttatacataaacatcacatgggtagctttccaagtccatcctgttttttgtgggctcttatgctggttcagagatgatatatgccatttttataaggtgaagaagtggagcagtataaattgtaccaagcaagtattgagcactgcgaagttcactgttccttagagaaatgagctatgcatttactgctaaaaacaaacctttcataaaatatttttttgggcaccaacctagtgaaggagtaaggaaaagaagtggatggttttagcatttaccctatggaagcttatagcctggatggcaagatcaaattaacatgagaaggcagtttggtgtaatggttaagagcctttggattcagccaaggcagaaagtgatttgaattctaattgagcccctttttagctgtacaactttgtaaaagccctttaccttctatacctcagttttcttatctttaaaatagaaatgctaatatctacctaatagtgttgttactattgtttcttaaagattgacaacaaggcgtatgaacagcatgcctggaaaatactggatgctcctcataagtagttatttatttattaatatcactgacacaagtgaaataatccatctcttcctaccccagcacacttatcataacaaatttgtaatttgtatgtttacaatatcttttctgatgaattgatccccatagtatatttagagcagtggtgtctggatttgtataaatctctgtaactctagaacttcacccagtggccaatacataaaagattctaaataaatatttgttgttgtcattgtaataggggaagagtatgctccaaaacaaagatactgattttaaaaacgaccacactttcaaaaaaaaattttttttaattctagagaccagcatcgagagtaggagtactcagtacgattatttacggtaatatatttattgggtaaattaggcaccatctggtgtgctagcttagatggctctagttctttattaatagatatatgagactctggggtaataggttgctagatccatatgctattcaggagacaaatttagtatacggtaagcttgctacaggatcaagtcgcataagaaaatgaattgaagtcgaagaaatgcttaggttaacccaacaactctgataattgaccaatgtggcaagggccattctgttccaaaaataattaacaatatgatcagtactgaattaatgttgttacggattataggtttcaaattttcccttgttaggaaaatcaccttttaaataatctcatagggttttgaacaaagagcacagtgtttctttttttttaaatagaaacccatacttgagaaggtagcaaagagtagcaaagagacctggatctctgtagcaagttcttggcctggtcttcattttcaattctaaaaattttgagggaaataaacagctgtccaaacaaaatgctgaaagaatatccctggacaaacagaaaatctttttttttttttttttttttttttttttttgagacggagtctcgctctgttgtccaggctggagtgcagtggtgcgatcttggctcactgcaagctccgcctcccgggttcacgccattctcctgcctcagcctcccgagtagctggaactacaggcgcccgccaccgcacccggctaatttgtttgtatttttagtagagacggggtttcaccgtgttagccaggatggtctcgatctcctgacctcgtgatctgcccgccgcggcctcccaaagtgctgggattacaggcgtgagccaccacacccgaccgacaaacagaaaatcttagaggggcatcaaagcaaatcatatggatggagagtgtgaatatgaagaaaagcatattctttcttcacacacacacagtatgtgtgtgtgaagtaatcttcagccaaagcaaagactaaaatgacctgttcaataagatggaagcaaactttaaaaaacaaacaaacgacaaaaaaaaaaactgtcctccttctccgccaaattcaggatacatgttttatcagcccatgtgctattaatctatttgtgattattctatttcattttctctcccatgcttttctcatttcttctcctcattctaggtgagtataggaagcatcagggctggggccataaaaagcctgtggccaaggacattgcaataagacagagaattttagatacttcattaattatttttcctaccagttaaggattccttgtgtaatgacagaacaaggagaagacagcaaaataatactaatgctaataaaaatatgtaatacagagtacttatgatgatataagcattgttttgtttgcttagattattctgtctggtgttcttaacagcctgtatgctgggcaataaaaatagagtctcaggaaaacagaaccaagtttgctataatttggagagacaaaactaagctaagattctttaagtaatgttcatggggagtttgtgcatatgatttatcagaaagagctgcttctaccagggctcataataataatggttcccctgaactggatgctaaatttatcaactggttattttgggcttctcttgccagtaagcctatagaaaacaaaaacaaaaacttttgctataaccttgattattcagagaaaataaggtttctgctacacagcagggacaggacatggttggcaactgggaaagacactcagcaaatattacagataccagaaggaacctggagaaactctgattctttttcattttgttcttaaaaagcaggcgtctgaaatgtgcccaacttcagctaaagaaaaaaacactattgttgggtctagacacaaagcctgatttgctgattttatttttcttcatttagttattttattgttctgtaaatatggacttaccttttttgcttctttattttatcttttggtagaaccttgagcagggacaccctagacgttcaactgttccgtgtgatcagtgtctgccttaaaatgtctgaattcctgtactgcatttcccagtgaagtttagtgtttatggcaatcctcccgatggggagagaaatgagccggcgaggccaaaagcagcatctgtgacttgctaggatcagctggctctgtgtgcatgatttccacttcaaagggtacacagacaacttggtgatagtccatttattgcagcctggtcttgtcaattagtcaaagttatcttctatacagctacagtaagtaatgtaaaatcatttacaatataggtgttagaacagcagagacccttagagttcatgtatttgacttcctccttgcacagttgaggaaattatgaaatgcatgtctttagcttcttcattctacagtatttattgagatttttttatgaagaagaaggataaaaagatacaaacttgtatgaagttagggaactggagaagctaactcattttctcttttttttcctgtgtctttggcacctctattagatctggtccgtagtgggtctaaataagtatttattgaagaagtaatacatgctttataaatgatggccaaatagctgtttgaatggataaaaaagcttcataaagaaagtgatacttgtactacgtcttgcaggatgtgggagaattggaaaatgagagagaatagagaaattaaccaatattatagtccagccaacagcaaagattgaactaaaattctggtctggtctagaggtaaaccaataggctcactttccaaaagaaaatctgaagcatttaagattatttaataaggaagaatttcctctggtgtcctgaatgaggaatctttggggcaagaagggtcctgtcctatttattatccttaagaaattccttgctatttttagttctcaacatcagctacttctcattactaagtaaaagccagattacttaacttgcactcaccctaattcatcttatccactggcagcaaattccttccttagaatacttccccactggtttttgagaagtgaaaaggattaacatatatggcagtggagtgttttatgtaatagtctttttattaaccccattatccagctgttggggtgctgggtagagaaggaagggaggaggaggaaagtagttgttggcactgggggttcagagccgccccagctccttgagatgaagggatgaaaataaatcctctgtattactgaagcatgtgaatgccatgaagtagtgggacctgaatcaatacattgcatttacagcagagcaaaagaaagaatagggttttcagagtttatttatcctgcttctctgaaaaatacccgtgtgaactattgggctgagagtgttgagtccattgaatttgactctttcactgccatatctttggagagaatgccttcccaaagagtcatatccaaatgtaatgtccctcccttctcttatgagtgacttacttttggtattccactgggtggaaaaaagcttttcttacaggatatatgaactaataatagttatacgactgcttcggatttgtcgcgctccccttggataagtttaatatgattttgtacacattaattaattatcttaataacagacaaaatagaaggaagccactaccgtcctttccagtgcatcagatgaatcaaaatgaatcaaagggctgggcatggtggcccacacttgcaatcccattactttgggaggctgacaccagtaaatcacttgaggccaagagttcaaaaccagcctcagcaatatagtgagaacccatcactacaaattcctttttttaaattagctggacatggtgacccatgcctgtagtcccagctacttgggtggctgagtcaggagggttgcttgagcgcaggggttctagactgcagtgagttatgatcaccactgcagtccaacctgggtgacagagtcagaccttgtctctaaaaaaataaatttaaaaataacattaattaattaaaatggatcaaataaacacatacatattgtggagattgtgagaaataagccttgttctatgtgtctcaggtttacctgaactccaagtagccctgatgactatatggcagttatcacaataagcaacagcataaaggactttgagaaatcaacagatcttatttttaaaaatgaattttcttaaacatgtattcactcagctggcagtggtggctcatgcctgtaatcccagcaattttagaggctgaggcgggcagatcacgaggtcaagagatcaagaccatcctggccaacatggtgaaaccccgtctctactaaaaatacaaaaattacccgggtgtggtgacacacacctgtagtcccagctactcgggaggctgaggcaggagaatcacttgaacccgggagtcagaggttgcagtgagccgagatcacgccactgcactccagcctggtgacagagcaagaccccatctcaaaaaaaaaaagaaagaaagaaaaaaagaaaaaaaatgtattcactcaatatgattaagtacctactctgggctagatattaattagatcattgagagtgtaggtgtaagccaggcagccagacatcaattctcatggacttgcattctagaaggagattgaagagatgaggcaacagttgtagagaacaccttactgctcatgggatagaaaattaccactgggatgagggaaagttgctacttttgattgtggtcaagaaaagcttttcaggagatcacccttggcttgaggctcattgataagaagaggccagccatgcaaacatctgggggaagaggaaagagcaagtgcaaagatcccaaagccacagagatgtttatgtgctgggagaacagaagaaatcccagtgcttgtagtgcagtgagcaaaaggaagtatgaggccaggtaaagtaagaaaggttggcaagggtcagatcatggagggcctttggggctgttgtaaagagtttcatttcattctaaggcaattggaatccatttgagaattgtgagcgggagagtggtagggaccaatggccagtatgtgatgacaggtaatgtgatctatgctcctatttttaggggcaggcctccttaaagatccatttattgatttaacaatattaaatgaaagttcactatatgccatgctatagtgttctagggtttcagcagtgactatgacaggtctccagctttattgagcttacatcttattgaggagaggcagacaaaaacgaataagaaccgtgaagaaaatatagagtttatatgataaaaattaatgggatgaagtgctggaaatttcactggattggagaccactagggctacttcagtaattagttttgaggtctcctgttgttgtttctcagccctgatggtcaagaaattctttcctgttttgcttgtttccatttctgtctactgctttttattctgttgtcctcttaggtagtacacagccctttttctgaaagtcttatctctgatgaagaaaacactttttctcttcaaacagtaacttagtcttttgctttatttcctagagactctgatttcctaaagtttttcatatttgttctatgtattcattcttttcattatttttgttgctctccacataaaaatataaaaacttatcctgtaaagaagtattaatttagacatcatttagccagaatatagcagaagaattattttacagttcttataaggtacctactaatcctccctcctccctgccccctccctgtcttctcttttctcctttccttcctttctttttctcctatcccaaaatactagttaaatagtttctctcctttaaagtactttaaagataacttcttcataatgaactcttgtgtgcataagcatttcttttcctgttaagaagcagtggacaatttttttgttttaaagacattctagaagattttaaaaaattattgtggtaagaacacctaactgtgagatctatcttcttaatagatttctaagtgtacaatacagtattagtaactgtagacattatgttgtgcaggagatctccataacttattcatcttgcattactgaaattttatacctgttgattaaaactaaagatccttttcaaaaaatacttcttaagccatggcttcccctggttgtggactgtaacccttgatgttattgaccatcttgggattaagttccattaagaaagacagtgttagacattgtggagaaataatagcaaggaaatgtttgttctggtccaccaaaatattgagggaccaattttaacctccacatcgttccttctggggttttcaggataagaaaaaaggagctgtggcttgctgctatttcagtagtcaaataaatatttttaaattgcttgtttcattagtaggatgtttttctgaaaagacagagtatatacccctcaggatatttctgccaatgtgttaaagtatttgtaaaaaaaaataaaataaatggctttgtagaatgttcttgtttcccaaatggctactgattttcttaagaaaaaggtagcagcaatttgctgaaaaacaaaaatgaccttttattagtcaagagaaataagataactaatttagattgaatgtgtttatcctaccagggtccaaaatttctattttcatgtattctccttttcttataaaggctccctttggaactatctaggaaggacctgccaacatccttgaacagtgaccattcagtctctactatactagaacccatctgatgatgaaattttgactatatttttggagatttcattctgtcattggatagctctaggaagtgcttttacaccttttgagctctggtcttgagtccagtaatttttacgtatcagtccttgttctgccttccaaaaccgcataatcctccttcaacttgacgtcctttatgtgttttgagatggcccccatgggcttccaagtgtttctggctaaatatcctgagctcatacatgtgttcttcatacagcagcactttgaggcctctctccatgctggttaccttcctcccaagtctgagttttaatgtcctgtttaaaatgttatgaacacagctacttagaaagctgtgcagtcatctcagagtagaatcagacaaggacctccttcacacgaagtgcttcctgtgaggacctatgtaatctgctctgtcttctgctatcatttgtttcttcccttctctcctttgcatcatccactccagcgacactggtttccttgctgttcctcacacaagccaagcaccctttaacttccttttaaagccctttacccttatttcctctgccttgaactctcctccttcagaagacatggggcattctccctctctgcactcagattactattgctgtcccctcagaggggcctgcccttcccaacccattctaaacagccctcccccatcatgactaccccttgtcatgcttttattagcccttgaaattcccagacattatgttatcattccatttatttgtttattgtctgctatcattattagagtatgatctctattaagtcaaggactttgctagttcctgaatgtcttttcagtacccagaaaagggtctagcatatagaaggagcataataaatatttgtgaatgtattgactaatttactatccatgcagattatctttaggcagaggatagagaataagactttttagtacatatttaacagtgtgtgtagccatccatacagtaaagaattctgcaactcacagtcaccccaaacagcatttgagcttttagatactatagagcaacctgtgtctgtgtgtgcatagatatgtgtgtacatgtacacacttatgtatatacatacacacatacattcgtatacatgcgtgtacatttatgtatgtattatgtgtatatctctgattaaatgggtgaacatgtggtttggggacccgtgtccaagccctctagattgtagaagctggaaatgacaaaagtgaatgaagtgagggaaagtgagccagcaggactgctcactgcacatgaatttccaaggatacagttgttcttgaacaatcacagtcagtatatcaaaataagcgctttattgagtagggtaaaaggagttgctggaaagactgtaaattctctcgcagaacaaatgataactgagcccaggagcccttttgttcttgggggagggggcataaattccctgaaagtatctgtcgcagggaattgctctgcattcatcatgtccgcctcctgcatcattcatgaatgtcataagactctaaagaattggcacttcatagtgaagatgattaaatagccactatacttgtcttttctgctgcacagtgctttttaaaggaattccatttaggttgtagcatgccccttcgaatcccttcgcatttcttgcaacctgaggtctctgacatcagaggaaggcccttgcttgttgggactggacagagctggtgggctagcacttcagtttgcttattttcctttgatggagacaataggatctggaaaaaaaaatgccataaagctcaaagcaaatcattttttagggagtatagaaattgctgtttagattctgcagtgaatgagctgtaatttttttcagatattttcacttctcttatcacttccttgtggactaagaataatgaatcagaacaagacacttttatatatgatttgctattttatatattcaaatataaggcctcaagtcattttgtagccaataaagcctatgtatgcagtgtaaatactgatgtaacagagtataagatatagaatcggccaggcgcagtggctcacgcctgcaatcccagctctctgggaggccgaggcgggcggatcacctgaggtcaggagtttgagaccagcctggctaacatggtgaaaccccgtctctactaaaaactataaaaattagccgggtgtggtggcaggtgcctgtaattccagctgcttgggaggctgaggcaggagaatcacttgaacctgggaggtggaggttgcagtgagctgagattgcaccactgcactccagcctgggcaacagagggaaactccatctcaaaaaaaaaaaaaaaaaaaaaaaagatatagaatcttacttctgtcctctcccctgcatgcatttcttgtcatgtatacatattctctttctctctctccctctctccacacatactcactccctctctctctctaagtgccctagagtaattcttacttcccaaacagcatccttaagtgacagagtgcaaatgattgaattaacatttatctactcaggtatatgtagaatctaaaacagttgaactcctagaagtacatagtagaatagtggttaccagaggcctcaggttgggggttggaaggagcagatgttggtcaaagggtacaaaatttcagttaggagaaatacatttttgagatctattgcatagcatggtgactacagctaataataatggattgtaaattgcaaaattgccaagaataaatttcaaaagttctcaccacaaaaaataataagtatctgaggtgatggatgtgttaattagcttgatttacatcattccacatagtttacatatatcataacatcacattgtaccccataattatatataattatgatttgtcaattaaaaataaggccaggggcggtggctcacgtctgtaatcccagcactttggtaggccgaggtgggaggatctcttgaggtcaggagtttgagaccagcctggccaacatggcgaaaatataaaagttatctctactaaaattataaaagttagctgagcatgagggcacatgcctgtaatcccagctacttgggaggctgaggcacgagaatcacttgaacttgagagacagaggttgcagtgggccgggctcacgccactgcactccagcctgggcaacagagtgagactctgtctcaaaaaaaaaaaaattaaaattaaattaaaaatataaagttggtcaataaacaaattttcataagcacttatgttagaggcaacagaaagtatttagagagaacagcagactgtaattaggagagaggagctctgatttgtttccaccagtcatcactgtcacctcagacaaattctgtaacttcccagggcctcaggatttgcatctgcaaatgaggacacaaatggtggctccaggattctccttccactcttatgacacatggctttatgtgtcaggaggggctcagccatcaggagggaacagaaaaaaaaaaaaaaaagctcaggatatcaccactatttctgaggaactcataatttaatgatctctgcaatctctaagctctgctgggaaatgagctccagcataacacgggttctgggtctgtagtggcatcgctgactgaaagataggtcatttttaaaatagtggtatgacctttggctgtgatttcctcataataaacataatatgatttttgtgccaattttctgttaattatgggcttctcctaaaagtttatgagtttaggaagaatgttctttttaaagtagaactttggacacatgttaggagatccaattaaatagatggatcatggaaattgggtcatcactggttgttaccagtaagaggatcccttagagataatgtgttcacctgttaccatagaagtcttatgagctgtgcctgtaagttaccagtggcttcaaggcaggtagaccttttgagctttaatttgttcctagaaggaacctcttcacttctcattatccagactttccctagaagtgggagggctgatcaaaatgccagccttggccctttgcattctgctgctccagccatgtgggtctgatttgttcttactgctggtttaagagagattaaaaggagcaaagctgttctctaagtttcttgatctgcaccgtggcagccagagtcagaggaaatggagacaatgggaaagggactaaatcctagagagtgatgtgtctgggatctcgggaagcagacccagcgttcaaatgcaggcttcaaatactaggtcattgctttggagaatcttcttgcacccaaaacaacttgccacaacctatgtggcccaatgtgcagcaaaagctgagcctgagataaggacagacaggatatatggctgaataaagaactttcaatttccttttcttagtagacggacaagtatcccatcattaaaaaaaaatagccacataaaaaagcagtttccaatctaagtgcacatggggtatgccaaaatctttgcacatgattgacttaatcagaaggcccaatctaatggagagaagtactgtattaatttaaatatggcaggtgctttctaagtttattgcaagagttaaagaccaattatcttgtatttttccataaaattgcattttctaaaaagagactggtgtgtctgaatacatccatcataataaatcttcaagcttggatggaagtgactgctgtttatttgcagcatgtcatatctgtactattgaatcaatgctaaagttatcatattagaactaagatgagggcccggaaaatgagtttttatagactcacagcgtgattttgtgaataaaagcataagaccaggaccaggtgtagaaagtgccttattccagggcctgatgacctggaaggcaattttcaaatgtagggattatgcagtcacctctcacaaggtccagggtgaagaacaagtaagaaactttctattttctggggaataggcacactttcaaaggaggaagaggtattgagatgagacagagaaattgagatggaaagtgtatttgaaatatgtgtaattaggcaggagaaatgagaatcacaaaacactagcaaaagtcattgtcttgctaaaaataataaaggaagaaaaacaaagtataagctaaggctttgaaggtgataaaatattaagaaattttgcttctgtatttataggaaatcagtttttaaaagtataaactaattactaatatattacataataatgcagtgatgttgcttgtccatgataaaaggtaataaataaaaatttgtttaatgaataatgaaaaatagctttcacatttggagttgattttgattcattttgatctcttatgtggctcttggctgtagactatctttgttttaagaagagcaaacccatttgtcctaatattcctggagaattatttcattcaaaagaataaaaatatcagccaggcgtggtggctcacacctgtaatcccagaactttgggaggcagaggcaggtggaacacctgaggtcaggagtttgagaccagcctggccaacatgctgaaacagagatggtgccactgcactccagcctggacgacagaacgagactctgtctcaaaaaaataaataaataaaaataaaagtaaaaatgtcatgtatataatatagagagaggttcaaatacgctaagagaaaaagaagccaagatcatgtaagcattatgattacaaccacatgcagactatgtttttcttctggctgaaggccagagagaaaggcaagtagctgtatattcagtgggtgttatttggtcaaatcgatttacatagtcttgcaggtcttccaaatactaaatattaagtacttggaaaatagctgagcaaaatctgagtgcattctatgatgatacagtagcacagtcttgcttgggacttaaaatcatggttgtttatggtcatggagttctaaccaaacccttgaacacaaaattcagtgagctcaaaatgaaactaacactttcacattctaatctgtatttccttttctatctactattttatttgtccaaatttgaaaactctgaaccaaccccagatccttctttttttactccccaaatatcaaatagatcacaaaaggcttttattcttcatgtctttcatatctgcttcccctgatttctcatgctcactgatccaattccaattttcatctctcgtgtctggggtattgcagcagtcttcctctaaatccccatggtcacacattatcctccctccatcttctctactgcagacaaagttatttttctcaaactgtgcattttcccactgatcaatgtagtcattctccaactttttaaatactaaaatcactctttgaaaaattgatatggaactttgtttttttttttaagacagagtctcgctctgtcaccaggctggagtgcagtggcgtgatctcggctcactgcaacctctgcctcccaggttcaagcgattctgttgcctcaaccttccaagaagctgggactacaggtgcatgccaccaagcccagttaatttttgtatttttagtagagacggggtttcaccatgttggccacgatggtctcgatctcctgaccttgtgatccacctgcctaggcctcccaaagtgatgggattacaagcatgcaccaccaggcctggctacttttgtatttttagtagagacagggtttctccatgttggtcaggctggtctcgaactcccaacctcaggtgatctgcccaccttggcctcccaaagtgctgggaatacaggcatgagtcaccgtgcccagcccaatcatatattctttaacattgttgtattatttcccagcagtttgtagcttattttgttttaatgctttattttcctagtaacaaattctaaaacgatgttgaataatattgtgataatgaacatctctattttcctgattttaatggcaaaggctatataattttgccatttagtatgacaatactttgctgttgataatctctatcatatttagaacatcttaattctatcttaattaaattttagagggaatggctgctgaattttttccaatacttaaaaaaaatcctgagtaaaattatattcaaattctactttaattaggtaaagtaatgaattttgttaacagatatctttaagctgaaatacactacttttcatgtttctgaaatcatatttttcttctaatataccattgaaatgctattcaaaaaatgtttatcaatttttgtaagtgaaattaaagtgttttgtttttgtgtagcatatttattaggtattggtattaagattatgttggatttacaaatgaattggaaaatttcttagtctgtttgggccactataacaaaataccataaactgagcagttttgtaaacaacagaattttgtatttcatagttctggcggctgagaagttcaagatctaggtagattgtattggtctctggtgagaatctcttttctcttcataggcaacatcttcttctataacctcacatggtgaaaccttacatggtgatgtctgttttataagatcgtttgtccccaccatctcccaaagaccttaccctataataggaacacattgaaagttaggatttcaacataggaatttgcagggggatcataggcattgcagtccatttcatgaagatttctaaccttgcctgtagtatggtataaaatggagtaatttagaaattatctcttatcttaaaagttatgttgaaaggtagatgaaaattacctgtaaaatcacctagatctgtattttttaattattaaaacttgaatctcctttccaatggtgtctatggtcattagcctattgagtttttctactttttcttataaatctttgacaagttatactttttcctagaaatgatccattccttctgactttcaaatatattgctttaaagttgtacaaagtatgattttatatttgtaatcttttctattgtgatggttatataatttctaatgttctatttttctcctttagtttttatttctgtttttttagaggtttatatattttctttgacattttaaagagcaaactttgggatatttttaacttttatattatttcaaatattatcgggtaaatttcagcttttatttttaatcatcaaaaaccatcttatttatcttatttttgtaatagtgcattaaggtgaaagttcagtttatttatgtttattttccttattattatttgagacattttcttctgagtttctgagtaaagctttatctgaagtttatatgacttgatatataaagctgtctcttcattaatactctaattattaggttttggtcttttttactgtatattttaagattgtatgtataaagagtactgtttgttcaataacttaattatagaaatcattaaggatttctttgtcaacaagaatattatcagtttaacaaatgttccaatttgaaatatatacgaattactgaatatgcttctttggtaaaattcctgagttgcttatcacccaatcatcatggtcattctttgccaatttatttaagcacttactgtgcccctatgtgttccaggcactgtgataggtaccaggaattctttcatatccaaactcttctagttgtgaaagaacccaaatttgaactagcttagactacatgagttagctattaaaagttgtgtataagaaagacctggccaggcacagtggctcatgcttataatcccagcattttgggaggccaagacgggcggatcacttgaacccaggagtttgagaccagcctggacaacatagtgaaaccctgtctctactaaaaatacaaaaattatccgagcatagtggcgggtgcctgtaatcccagctactctggaggctgagacaggagaatctcttgaacctggaggcagaggttgctgtgagccctgatcaccccactacactccagcctgggtgacagagcgagactctgtcaaaagaaaagaaaggagaagagaggagaggagaggagaggagaggaagagaagcagaggagaggagaggataggagaggagagggacaaaggcacaacttcacaatatagattataaaaactaggtattttaaaaatgataagatttttctctctgtggccagatctaaattcaacagcttgtctttactctttcagtcaggattgattttctcatgactttctccccataagcagaaatgtggccacggcagctgtgtgtctcttatgtcacagttttatcatcagagaggcactgatggagtgtttctctggttccaggtttaaaaaaaaaaaaaaaaagttcattgaagttctctagcctagcttgggttaattgattacaccttagtccatctgctgtatataagagcagaatcttttacggacatgacaatttcagttcaaatcacatgataaatatggaggaaaataataatttctttgtgaagaggcttaatgtttcaagatagagacagaggatgtgctgcgccgatagaataatgaaagtctcctatagtcaaaaaacaaacaaataaacttgaggcagattcttcacttcaaggtgctcaccataaaatggcaatactaaactatttctagaactctatatagagtgcctgttagttattttgatcctgttacaactctttcagatgatgaggtagaagtgttgtcgccttcttaatcatggagaaactgaggctcagtgaagataaatgattgttttagaacagaagcatggactttaatagttgggatttgttcttttcatccaattctgacctgggttctatgattaagaggtatgtgtctcatagaatcaaatcatcacccttcaaaaatattagccagcttttccagaaaaatcgtgttgtatgaattaaagccacaaatacaccaaagtcatccgtttacagcccctggcctcttgtaagtatgaggatcatataaatcaggcatttaaatcaaagcactggaaataagcaactgctttttatgtgtattgtttttccagagaatattcaatacttagctaccccttcattgttcttattaaaaaaggtatttcaaggctgtgaaataaaaggaggaaaagaagacaaatgtgtatgttccaaacttctcctttcctctaatcatgtctcatgtcatcagaaggaatgcacttctgaaaaataaaatgctacagaaaaggctgctgagtaattataaaatgattacttttgtttttcctttattcatttatattttgcttatgaacaaatgtatatatggtctttgcttttagttaatgctctgtaaaatagaataacgtggctatccttaaagatgtcacgttgcttttctgttgtacatccctgttaggttaaatctgagatgcacttatctatttatttttacaaaaacaatttgcaatgtgatttagaaatggaggagtaacataaaacaatttgactaaaaatgggtgtgattttcttatctgagactgccaaaaattcaccaaagaaaaatcattcaaatgtctttgtggttaggtttcttttataaattgaaagttgtgttctatttcatcatgagagatgctgtgagctctaactgatgagcatttataaaatatttccacgttgagatgaaatgacaaaaaggcaagatgaattaatgaacattgtatattcttattcctttattcccattctactccatgcctgaatggcaacgtgaagatatgtaagcataggtaagccaggtttcattgattagttcaacagcatttatttcctgtgcattcacagtgttgagagataaataaattaaacagccctggcttccaggagctcgtagtagagaagcattctggatttccattttgtttgacaataaaacttaatatttattttcttaagcctgaatactgtgcaatttcctagaacttattttgttttgctatataagaaactagcatggttatgaaagttaagttggctgtgagttaatttctcacatagacctcattataaatttacccttcagaatttagagttgtctgagtgtggtataattaatcaggaatggactattatctgaccttactttattcactttataagaggacaacctcatgtaaaaccactgtcatttaagtaagataaaatgagtacctctatactgccagttgcattgtgaaaggattgggttttcatcttgtttgctgtttttgttttgtttttaattttggccacatattagaaagccattgtccttctttccatcatcatcaggtaaatggtgagaatattagagatacagtttgacataatgaaaagaatgtagattgttgagttagacctggattaaagtcctaattccattcgatatttggtaaaagatcttggcaagtagttttaccttattctatagcttccctcatctttaaaaccaagatagtaactgttatgagctgaattatgtcccctctacaaattcagatattaaagtcataaccctcagtatctcagaatgtgactgcatttgaagatagggttttctgaatgtggtgtaattcatcgggagtgggctatttctgaccttgctttatttttcagtttcagaggttattttggtgggccctcatccaataagactgatgctcttataagaaaaggaaattagggcatagattggtacaaagggaaaaccatgggaagatacagggagaagatgattgtctacaagccaatagagaagctgtagaaaaagccagcactgctaacactttgatcttgaaattctagcctccagaattgcaagacaatgaatttctgttgttaaagttacccagcctgtggtacattttacacagccctagcaaactaacacagcaaaaaatatttcaagtgaaaaatatagagttttgaaatattatactgtatactaagatatataataaataatatatacacatagctggtattagtattaatattgatattaacattagtctagagttagtattgccaaacagtaccaaagagtttgtgaaagaaataattgtcccaaaggaaaaacaatgagcttatgaaaattcctttaagcaagagggaatttgagtgtgtccgtggaagctttatttttaggtcaattttagcgtctacagcattgcgtattctaccactaatcatctttttccttagcggaagtatcctgaaatttgatgagtaaaaatgactttcttttatatttttgtgatataacagcttctaaagtaatgtgtttctgaaaatgtcattacccctaagacttacttacaaagggtcatgatgtgtttgtcaaaactcatcagtgtgtccagaaactatgtgcgtgtgtattttagtcaaactttctgggagttaaagtatatataaggtaacacagcaatggaacatcgcaatagttggcatcagatttgcaaatggcacaattatttgtttcctcttcactggtccttgaaaaatacataatgttcccatcaaaagttccagccaagcatatttgtaagaacagggtttgaacataacctattatatcatgaagaatggctctcttccatggtatttaccaccagaattaagtagtggtagacttttttttattcatggaaaacatttagtgaatgggtagaatgttatttgttttatatttttctctcatcagctcctttggagactttggcatcgggcagaaaaagggtctcactctgcacaccaatttgagttcccatgttatcaaacagatttaatgctaaactaaactggtgtttgttctgcttataagtctttgagttgaagccttgtttctggaatattgggacatgctctgaaatgttgcctctgtagatcctagaaagtaatgatgttttctgctttcatgcgatttagttttaattattcttccttcaacagagagaaatagattgccccacagggagggaaccctcaccttgcttgagcattgtctaagaaatggctttttctcatgatgtacttaactgttaggcaatgttgtcagtttctcagcttactgagcagcaaatctgctcatttctttgccaaggaaaaagaatgttcttaaaaatagatgaactttctctcttaatgttcagtgcattcaatgttgctttatttaaggctgctttatcatcagttctggtgtttatttcaaaaaattcaaagtagataaaacagatcattcactaaattccatctattcaataaataatttgcagagctgtttttaaaatgtgtatcatttaccctgtactccctagtggctccctctgtaatgcagaggccttgtttgcagtttttccatctgttattcacctttctcccctccttttggagctcttgatctctagggatgtttttagggagtctttatcccattagtcattgggacagctttggagaagagggcatagttaagaaagggaggatctgattctattctcaactccactacttagcaacagatcaagttgtttaatctccttgagcatcaattttcttttttattaaaatagtaaccaaaatatttgccattaatatttcagtgagtgttgagggaagaggcatcagatgagacactccaaaagaaagcaatttgaaaatcatttaattctatggcaatataaggcccagctgttataaaatagtgaacattattcactcctaaaacagccagagagatgagcggcagaggaaaaccatagaacaaactaagtaaaagaaattgagaaaatgtattctttggaaaatcagatattacgagatccttcagttaaatttatgtctctatttgctagaagagatatttatcagttccaaagcaacaagcctttcccttttggttttattagctacatggtaattgatatgaatttaaaagataggtttaatttgatagcaataactacatctactggcaggatatattttatgtcattgatagtccttttattttccaaaaggatttaccagtttatagtaaaaaaacacgaatgtggataagcttgtgaaagagtaataaaaaagaaataaagaataagaaacctgaaatgatagaggaagaccaacataccttaccattatgagattttatactaagtcctgaggcaatgatcaaagagaactagagcaggagactgacatcttgtttctcatcctagtttatctatcatgtactttgcacataattgttatacttattttattacttaatttattgttctacttgttataattgtccacaagtaaattatccagttctccttaaatttaactctcagaggccgggtgtggtggctcatgcctgtaatcccagcactttgggaggctgaggtgggtggatcacctgaggtcaggagttcgagaccagcctgaccaacatggtgaaaccccgtctctactaaaaatacaaaattagccaggtgtggtggtgcatgcctgtaatcccagctacttgggaggctgagagaggagaatcgcttgaacccaggaggcagagtttacagtgagccaagatcatgccattgcactccagcctgggtgacaagagcaaaactccatctcaaaaaaaataaataaataagtaaaataataaatttaactctcagatttcccctgggagatgcttccaaaacttgttccattttaacatcaatagaattatttgagggaaggctattttgatatatatatatacacacatatatgtatatatatatataaaaaaatacatgaatgagaaaaaattatattcctcattctcttaaagaaacgatagatcactcacttaattagctatatatatatatacacacacatacatatattcacatatatatatacacacacacacaaccaatattgtattattgtattttagtacttttattaagccattttacctgtaattatttgatggggtaaataataaatgaattctagtctattgtattttttaactgaaccttttttgtttttcacacacatgcatgcacacacacatagacaaatatatatatgcttatgtatatgtatatgtgcatacacaatgaatgtatatgtatatgtacatacacatatgtatgtatatgtatatgtacatacacatatgtatgtatatattatttgtatatctaaagtgaatcttaagacaagaattctatttctgttgatagtctcccagaaaaagtaatatgctatttggctataagactggaaatagaacccatgccataaaggcagggccagggggtttctaagtcaaaacaacaacaacaataaaataattacctaagtgatcctaaataaagaaaaagtaaattgccatcaacaattatattctaatacaataagcaataaaatgcacccaaaatttaagaaccttggagaaatatgtggatgagaaaaaattatattcctcattctcttgaagaaactataggtcacccacttaattagcttgttccgtaactttcacccaggactcctttatgatcgcatggaagactgtttgatccttttcttctgctggatcaccatcccaagcacacactcacagaacacataccaaaacactctgtcaatatcaccatcagctccatcacagtaagtagttagccaattatgaaaacaataagccaggcccattatttgcaggttgtgagttaaaaaaaaaagagtcatccttgttgactatttgaagatgagatgtatcctcttaatctttgttagtggtgactgtgtagagatttcattcctggaatactgtgttggttaaaactcagcaaagcaacctcagctgcttgcaaacttgcaaatcctgcagtgttaaatggccaaaatgctactatagcaattttttcttcagttgaattggtcagtttttgccaacaaggatgaaatttacatgattctgaatataaacataagtagtatgatcttgcatcagcatactgaacacggtgagaaaccagcaatcagaagtacgaggctcaggggagaaagcatgtaatgtggtatagcatgcctcagaaatgaaaatctttgatgaattaagaggaggttcttatagttcccaggattttcccaagaagttgatttgtaatccacattttaaagtaacacaattaacttttttatttgaatatgtaaaacaaaataattctatgtttcctgtaggactctaggcattttatattaaaattaacacgaagtatgtatttacctttaaaaaccatgcaagatggcaaagcatgaaatgtaaagagaaaaaacaataacaacatcagagtagaaagttataattgttaattaccttcctctaatgtcccacagtattggactatgggagcattcagggcctttattcactcttaccagcaaatactttaccaagaatagatattttcatatttttttcttcatagcaaagtaatcatatgccaggtactttgtatcttttatgctttcttcacctataaagttagaatcatctaacatagtgacatcataaattcagaataacaaaagcaatacaaataattttaaatcaaatttttagtctatcctatcaaatattgtcatagtgaagttttgttttttgtttatttaaagattaaagccactgtgactttctaaccatatataagaaattatatatttatgtattaaaatattcttctcctttgtattggagcactgagaattactggtaggattgtggatgaaaactacaagtaaaatgcttaaagttgttgatatggtgagatggccagacaagcttttgaaaacatgccaaatttgggggctgtgactttgttttcattctgctttagtctgataaaaagatgtgaaaagaactaagtacagacaactgtttgccccattggtgtagtttattgatacagtttattgtgtaattacattggtatgtggtgaaaaaaggctttcagaggtagaaggctcaggctggagacttgaaagtggtactatttaaatcagataattgagtctctgtttccaaatctgtaaaacagtgttaagatataaaatatcccatacaattgttgcaaagattcagcaaatgaatttgaaaatattttgcaaactgtaaagcagcatgtatatgctgctatcaattttttgacttgttatttttgtagtgacaaaattatttcctgatagagtatgaatttatctctgtagcagaatccactatatatttaggatagaaaagtaaaagatttttataaattgccatgaaatgtcacaggctgatttgcattttctggtgattctatacattaatcactgagtaaccttcagttttccaaataaagaataaagagagtggtgatgacatttgtaaccatctacagaggaattatttaaattcttcacagatggagcgatatcaagggtaaatcattatagccacatttctaattttaagaagctttgagggtgtttgtggatggtaggaagtaaacattgttttgcatatagaattaatcatagactttgcataccacaattccaaatcctccagatgagtgtagagggctttcgagacaccatcccctaaggatcgagaaattcataaaaggaaaataatgttatgctacatgtaatatacaaattgagcaaattggagcaactagaatagtgacctttcaaagaagacaaattagattctgtatgcctcagaatttaatgagtcttagtgctttaggaaggatgacatatgacacatattcttaattctagtctcacaagagttaactttattatttctcaacaagatgaataactcacttcttctttggtcaacataattctacctaatattctctgtaaactagctctggaaatacatgcggaccagtgcttgagatttttagtaaatgtaaaaggtatctgaatggttgtataatgctgctttaaaagagttttaagggttggaacatggtcactgagaaatacacaagaaaatctgttaccaaatgtgctctgaattttgagatgagtaacccgtggaagtattcgctatgggtaacaccacttgcctaaaaccacagaggcaacaaatggcatagcctttctggtcaccaaatctaaatgattttctccaactgaaattaaaaatgtgtttcttgaaatgtactttttataatttctgaattacaaatattttctttatttttattcccatttgctttgtaagtagttctaaattaatatattcttagtaactcctgagttcatatggataatagtaaaaacacaagtaaagagtaaacatactggtaaacccactaatcataattgacaactaccacttgtcatgttcaaatctcattatcctgtgatgttttttctgtttcttgtatcttcttcctaagatttagtttgaaaaaggaaaagaaaatgtatttaatgccagataaataccaccactagggaacaaaaaaaaggtccatttttaaaggactcctggaggccaggtacggtggctcacgcctgtaatctcagcactttgggtggccaaggcagtcagatcacaaggtcaggagattgagaccattctggctaacatggtgaaactccgtctctactaaaaatacaaaaaaattagccgggcgtggtggcacgtgcctgtagtcccagctactcgggaagctaaggcaggagaattgcttgaacccaggaggcaaagggtgcagtgagccgaggttgcgccactgcactccagcctgggcaacagagagagactccatctcagaaagaaaaaaaaactcctagaaatcatttttgttaccatgtttatagcaacacaatagtgaaataggcaaatgcatttagtcacataacttggttttcttgggccactgctttctttcctgtgggagtgggagaaggtacaagcaggagagacatgatgcctttggactgctctgttaccttcagttttgtaaggctcctggctccactgaccagattatgctgatagataagagataggggactagttttctaccttgtgcctgtcctggccaagatgcaaaattaagcctactgttgaggaagaccagaaagttgtttattgcaatgtacccaggctcccagacttaggatgttatttaccctccaccgttatgcagcgggaacttaagatgttaagaacgactcttaccaacatctgctttgttatgcattcattctgcctgcatctttaatttggggtgatagctgccttcagaagctttgggagccgttcctctcagtaaccaaatactgtcccatgggggacatttcctctctgcagctgttctgtgtagggtctcaacagtgtgctacagctggctgtatgcaatgtagtgccttgatgtctccctctctccttgcttttgcagctggcgctacgtacatctttgggaaaagtggtgggcttatcctctacacctggccagccaatgacaggcccagcacgcggtctgaccgccttgccgtgggcttcagcaccactgtgaaggatggcatcttggtccgcatcgacagtgctccaggacttggtgacttcctccagcttcacatagtgagtacagggccttggcctggattttcttatgttactggtggtctgagttagtgattcaggtagacgcagcagaacattctagatcaatatggcaaaggtgcacatgcttataaaaattgttttcagatgtgaaccatcatatttacagggttcctgggggaaaaaaacttaaaaactcttccttcttccccatgtatatagggaggaaaaagaaattcattctttgcaggctcccttcccaactgtgtggcttggcctgtggcagaatatttagcagacttctagggtatatttaagagatttacctggtgtggatcttacctggtgcaagcagcaaagccaagtggaatgttaacaatctcctaggctgggatttggcaaaccttctgtaaagagacgtatagtaaatattttggactttgcaggtcagatagtctctctcagagctactcagttctgcctttgtaatgtgaaggcagccacagacaatacatttttttgaaatgcatgagactgtattccaataaaaatgcatctataaaaacaagctgcaggccgtaatttagtgacccctgtcctaggcttcaagcatcactgtaagagatgtaataaatgtgtgataaaaactgagaccagagtgccagagtgggcggggcaaaagggaaacagaacagtgatcaagagttgagtaattcatgtgtattgcatactcaacattttgcttttggtcttgtacatatgcacttaatagcactgcacccttaatccctgtagatcataagaacacagcaaaggctaagaaattaaaaatgatttagaagaaaaaattcttttgttataaggatggaaaatatttttacagcaacaattaacccattttatcacctgtgcagtctgcagttaagaaagtaggctaaagagagatatgattctcatccataagtacccaaagtgcagtctccaagagcaaagagaggaattgttctcattagttagcaatgacaaggctagaaagaatggatttaatttggagcaataagaatttagtttaaatagcaggaggaaaaggcagttaagaaaaaagatcaactggggattactaccaacctccaaaaaggaggaaaaggaacattgattaggaatctctgaatcagagttttgctaatgtgcaggtgtatagagagaagcagaggatacaatttcattgctggtctctggagttggagatggctggccggaatcatgcatgacaagcccagctcccacagcagtgcgcatgtctgacacttgctcttccagcatgccttggaaatgagagcagcttaaagtcctaggcttgagctggaagtcggtctagccccagtataagccagatcagggcaagactctgcttaggagcttaaggaagaactggttagagatgatcaccttcaaaatgtggtggaggagtcttgaatagagttgtgaacttttcaattttttctcagatgcttcaggaaccatatggtgctatgagcctgagctaacacattttaaaaagctatgccaaggagcaaaaagaaaggcagccatacttactacactttatctttatttggcctctaagaaccaccataatttacaaaactctgtgagatttatgctacatataacttaatgactatttcatggcagctataactaggctgttattaccagctcacttgcatttccacagtgatttatcttctttttttgttcattgtgactgcctaagaaaaatatgatttggcacagacatgagcatctttttgagtcaaatagtgtactattgttttatccattcctgctcattcatgttttgtagaacatctccacttttaagagagaggttttcctattttctgatggtttacttgaaattagcagtgttttaataaaattgtcatgcagattgtggtaacttctaggaggaaccagaacattccagtatattttaatataccattataaagctctgtcatttctttggggtctttgaaaagtgaatactctaaacatactttgagattcaggtaacatccattgtgtgcatttattagtgtgtgtattctgtataagcatacccattagatttgacatagtataatattattttctttgtatgagcaaaattaccagacattttatatcaaaatgtaaagagccccctgggatactgtagacacttgggtgatacagccgattgcttaaacgttctgtgaaagcccagtagattttcctccaaatcttagattaggaaatgatgtcacctgaccctttcagaaaaaaggaaaaaaggatcctatgctgtggggaatctgtgtgattctagagtgaccctgacatgttcatggccctctcgagcaccaggccccttcatgggtctagtcatttgaagccatattttatttccttgcagattatctctttgtctactctgaagaaggcaggtttctcatcatacttgaaagtaaagaaatctaagtagaagactaaatggcttaattatgaaaccagctttttgttttggacatttaagtagatacatcagggaaacaaagccataaatacttattaagatacttttataacttttacaatctgtaaaaggtggttctgtttgttgaatggtttgttttcttgtactaaagaaaattactgaagagagaaagagctttggggccattaatgaaagtggaagggattgagcataaggcagaagatgctatttctccttacagtttgcctagaagagaaacctcctgggaaaaagaaaaagtgatagaagacacaagggggagatgaaggcaggtggttttctcagtttttttactgctataacagaatatttgagatttggtaatttataaggaacataaattaatttctcacagttctggaggctgggaagtctaagatcaaggtactggcaggtctggtgtcttgtgagggcccagtcttcacctctaaggcgagcactgcatcctcaggaggggaggaaccccatgttttcacatggcagaagggcagaaagagtgaacccactcttgcaagccctttttaggatagcattaggcagagccctcatgacctaagcgctttccaaaggtcatacctcccaacactgtggcatcggtgatcaagtttccagcacatggaattttgggagacatattcagagcatagcagcagaatatatttgcagcagaatatattccagggataagggaagaggacagggctctgcctaccgatgtgcttcaacaagggattacatgggggcaaagcttcattctttgaatatgagtgttctttataaaataacaacaacaataaaaacctaaagtactttggtgctacttgtgagtggtggtcaggctagtaaagttggtcaaaaacaaagtacaaactccaaaattagccagcggtgtatatgtgtgtgtgtgtgagagagagagagaaagagagagagagagtgtgtgtgtgtgtgtgtgagagagagagagagagagaaagagagagagagtgtgtgtgtgtgtgtgtgtgtgtgtgtgtgtgtgtgtgtgtgtgttggggagaaggagaagagacaaagaaagtttgtatttttttaactttcaaagaagacaattcctagaaattcctgaagtgttttgagcaacatcaacattgtcgttggaatatttcctttttacccccaagtggacttatttgaaggaagagaaaatgctcttccaagaacactagagagcctgaccctggggtaagcacccactctagaatagccccagggcaggagtggcaaataggcttcatcttgcctgaaaattctcagtgcctcactctctctcttcaagctttacaccaggaagatttatgagaacagcgggcaaatccacaggtaggagatctagcttccattagtcatgtctgccacatgtgccgatgtgaggttttgtgaacgtgcactacacattcatcacatctgctttaagctccacagtattcctccacacgtgctccaattttcccatttcttttcctttgttatcctgaaatccctatgtattaaaatttctttggaaaagcagtatcttaagctcatgttgcactgcaagtcctggaatgatttatcaattcatctgaagtagtcaatcttattgccatccttctcataccagcctaaagtcagctcctgtgacagaatttaagttttgataggagagttggacagaaaggaagaaaagtggccatggctagtttggggatgtgcaatgttgtgtgggatggtagaaatgagtgggaaaacttgggcaaaatgaaggcatttgtgtcctagattgagtaactggggcaaatgaagaaagggtcaccaagacagttgagtgctatgagcacttttcttcttttatgtatgtattttaagttcaggggtacaagtgcaggtttgtaggcttgttacataggtaaactcgtgtcatgggggtttgttgtacagattatttcatcgcccaggtattaagcttaatatccattagttatttttcttgatcctctccctcctcccaccctccaccctcccaaaggcccagtgtgtgttgttctcctctatgtgtccatgtgttctcatcatttagcttccacttataagggagaacatgcagtatttggttttctgttcctgtgttactttgctaaagatgatggcctccagctccatccatgtccctgcaaagaacatgatttcattcttttttatggctgaagagcacattttttctatttcatgatttgctcagattgtctttcattctggccaagggagcagaggctcttatttctcttgctactttcttttaaacctaaagtcttcccactcatctgggccttataaaagttaaataggttttgacaaaaagtgttgaacaacacaggcctttggtcattttaaaaaatcagagagggccaggagataaaaatgatttagaaattgcttgcttcaaattaactaacatttctttgtttttggttcacattccatgatgcaatattttctgaatgaattataaactgttatattaataaaattttgaattaagcatgtttgaaaaaggcaaagagatctttattgaagtatatgtgcatgaaatgagattctgtagagcgagggtgtcttagggtagaggaattttttaaaatctatttcaaatgttagtttccttccattgaaatcgattgttgaggaattaaagctcaattttggagaaaagctgctatcgcttgcgagtgacatctgcctattgaccccacatctaggctttaaggagcggtgtcatgttacactcaccttcatttatacaacagggaaaaaaaactgaataggactagagaagagattggcatgaagtgcttgttattactatcatgaaactcttgtcaacctctttcaccatctgcaaaatagaaggtcggggagaactgggcaataattagcttccctttatgtagttaatgctgagtgtaaaaaagacatcctattaatttctttctctctgtatgtaatttacagtaaatcctcttggattcattttttaattatgagcctttcaggaacagtgaaaatttatgtgttaagatatctgttttgtttgacaagaatctataaccttccccaactatttccttcctgacttaaaatgtagattgttacatacacgaggatgaggggcagacaaagaactgctgtccagactgacccccatttcacggtggcaaagtgttctccttccaaaaactggaactttgaaaacagattgataatattctatcagtgtcatatttggggaaactggatatttattaagtttcacttgtatattattgtttttacatagtttatagcacccaacgagagtcctgtagaataaatggaagtaaagctgaatgatgatgaatggtctgttcctcccatctattgcatttataaattgccagcctggatgcttcatttgggctgtctctatgtgggatatttacagtaaacgatcagcatctgctgggatagtccttagtaaggttaggtggctgttagcttagattcatctctgggtttggccagtgacagaattggatttgagtcaagaactgtatttggggaactttccagtggagtacagaagaatgttggtgtttttgagactggtaacgcaaataaaaaaggaacgaacaagaaaacaacagaggtatccaacagatgcaatttcgtttcccatggagtgctgtgcactgcaggttgactccgtatttccttccatcgctatttgttcttagtgaaaaagacctctttgggatttctgagcttaggagtttttccagatcattagccacttatacggagaggacctgctgggcattgtctctccagctttcagcttagccatgctatcccagcagagtcggagaagaaggtgggagaagggagtagaagtgatgattggatgaagtgactgcttatgtaacctggactagaggcagctctctgcaggggagctggtgtgtgttttctcagatctctattattcccatgatatttctatctaaatctgtttactttgattccacacatggttttgagaggcagcaagccatagtagaaagatgtgcttaatttgaaaccaaaaaaaagttggatttgagttccatttttcaatccatttctgtcagtgagctatgtgactttcagcaagtcattctactacttggagcttcagcttcctcttcttataaatgggcataaaatattatgttgcagggttttctcaaagatcaagtgaaataaaatatttagaagctgttcattatcagcaaaacactgcactaatggagaatggtggttttcctaataaaatgggtgctgtagaggtgatgactgcattagagaaacatatatagaaggaaagttttagtttaattgtttgtataagtctgcttggactttttaggcaaaattttttaatttctgtttcatctgatcaaatgtcaattttatgaattaaccagattcacaatgaagacttttggagcatctctttagcataaagtgaagaagcagttacctctgagggaatttaggtcatgaccttggttaggtcaataggataagtgaccctatagcctccttggtgtctcattatatagcgttgtgtctctatccctgttacaagatgataatgcattgcgcttctattctctttagtataagcttccaaagggctctagactcagcagtgaaattgtcgcctgccttgccctgaagtttattctttaattttatcgaccatgggaaatgggaatatgccactttgcatgaaaacagggaaagaagagaagaaggaagagagggaaagaggaggaggaaggaggaggagaataaggaaaataaaagagcaagaagaagatgacaatagccatgaccatcaccaccaccaatagaagtagtagcagtaggaaagcaaaacctttctagataggcctagtatcaaaatggttttagactctccttgggtaccagataaagtcacaaagagcttggtcgtatactcggggatagagcccccacaaaatgttgctagaaccaaagtcctaatggaggtacagccagactgtggggagctaagtaggtcttgccaccaagtacactggaaacctaaaaccagaaatataaacagaaatacttcatagatttggattccccaaaatatgaaggaaaagtgaattataaatttactatgcaaatgaaatgtacaataatgcaatcataaaaatcaagctgacaaagtgtgtggaaaataggttatggctgataggaaattatgagaaggaaaggccaaatggctatatctttctcatttatggttcatacaagagcccttagactgttagttaatgacagttatgtttcagaatcctcaatgcatacaaataagaattttgaaaaactaagatgaagagaatttagctcctgagcatcattcattttatatatatataaattgagtttttattatgtgtcaggaaaagtgctgtgtgttgagggtactgtgaccaaccttggcttgcatagcataaacaggcttgagaggccacgacaattacaaaaacaagaaattaggttttctactcattatgaggtgatgtatatacaactcttgcacaactcctggcatatagtgagctttcaatcatggatagattttgatattattggtactcaaagatttttcttcaactaactcattttaactcaaaaacttgttatattttattttcctaagcaatgaataaactttaatcaggcctctgaaatttgaaatgaagcaatataaaattctaaggagctgggatattactgatttaaagacagctgggtggcacatatactgggttattgcagttatcaagctagctgaataagttctgaatagcagaagctttttagatatatgaatctaaaatgcaacaagcaaggcaaactctaagtgccatcacgtgaatgctggggctcacaggacttaatggcaagcctcccttaacaccatcagttggatgaattatctcattgacccaccgcttacactgctccttgtcattactcctggggtattgttcagtgcaacagggcaagaaataactcattgactccctgaagctatagatgatggattttagatccctagctgtattcagaaggcataggagctcagtgtattgatgggggaattcattagccacccactccacagaatcagtttcttagatcctggtgctgtcactgctgctgttgcaacttgttagtgtttcagggacagacgtcagagggaactgtataactacattagcctcacagatagtaccgacagccagacctgtcatttcctggcctgcgatgacacctctggagcctagaatcacttaaagatatttagataggccctgttgatacgaccaagctaaccttcatcctgaaatcaattcatactcaggatgacaggaaatgagttgtcattaaggctcatattctatttttgagtccttagttaacctcttataattcagtttatttttcctcctccatttctgtaaaatggcaggtaatttaatgacatagattattacttcctacatttactcgggagcatgtgtttcagagaccatcttacattgataccattactatcactttccgctaatattgattgacaaaataccaggtaccagacactgtgcaagaactttgtttacactgtcttataatgagctcatgaccactcagtgaggtagtcactattaatatcctcattttataattggggcaactaaagtttgaagaagctaaagcattttcccaagatagcactactaataaacagctgaatgggctttcaaatgcaattctgacccttaattactattacacccctaatgaaagttttagagtagaaagcatagtggtaataattttaactcaattcatacttatgaaacagcaatttacttgggattgttggagatgtgaagaaagttaatatctagccggggggtagaggggaatgaaaatcatatgtacgaatctttttaaaaacagaatcagctatataccaaagaaggtaaaaatactgctggttgctgagatttttttttttaatgtacatagatgggatgggacagattttgactagtggaatctgaagaaagagcatacctgatgaagataccagcatgagtgtcatatcaaaggaaatacaggatgtgttctcaaattcatgaattcaattggaccgtaatgaatggcataagaaaagaggcaggtaatatggattagcacaaagaacatatgatttaggggcaattggtctctgattcaaggtctagttctgcctccaactagttctgtagcctcggatgaattatttgactactccgtaaaatgcagatggcaataatgccaatttgtagctctgtgaatatttataacctatggaaaaatgcccagtgaattatctggtacatagtggatgttccattaatgatagccatgttcttgtgttttcttcccaggtactttagggacatagtgtagaagatttgagttttataccaatgatcgattgtttctgaaagcaaaaggaagacatttaaagatttttttagaagaagatgaaatgcccagcacttaatttttagggagattattttggctctgttaaaagaatgttgttcagtgggttcaaggaaaacagcagggtcttgagtaagtgtttctagagaaacgtctttaaagacttattctatgatgatgcatataggaaggtaatgaggataaaaccaaagaacagttcagagattgaatcggcaggtgttgtcagcaggttggattaaaaaggagagaactgagaaatgtctagattgggaaggttgtgatttcattaccaaaaacaaaacaggggacagataagtaaaacagataagagtttgactttagtgatgcaaaacataaggcatccaagagccaggctattgaaatttccaattggaaatacatgatgaactcagaggagagataagggctagaggtgggggcctagagaattcacagcttggcagtgacagtggaaggtttaaggagtgctaatgtctcaagggagatgaataggaacttgggaaatatatacatatttttatatatttaaatatatattattttatatatttatacaaatatatataatgtatattaaatatatacatatacaagataaaggaggaaaggaagagaactaaaaaggaaaggctagagggtaggggataacctagatagtgaagttttacagaaatcaaaacaaatgagagacttccaaacacaagttgttccagagctgttttttctatacctgttaggcctctttcatctgaaatcagtttacagagatgtcttcttcatctttattggtatttattatggtgtaatctttgccacttcagtcctcttaccagtattctgcatttcttctctgtcacgggcatcattaactttgagccagaggacccagcatctactcctagagagctgccaccaattagcagttaccctatgtaaatggtagaggtgtagctactattctgccaccctcgtaatattgtgggaaaaatccaatgacagaatgcaagtgagcatgccgtgtcatcattgaaaagtcctacaaaataaataaagtcgtttttatatcaatattggtatacctaccactcagcacagctcttggtacctaaggagatggtgattggagacctggaaatgaagaccaaagagatgctgagatggttgtagtttccaataggaagattagcaaccaggcaagtggcagatcagagcccaaatgtgagtggctcaactgctggaccctgtaagctgttgtggttctcaaatgatgtccttatcttgttcatctctcagctcttggcacctcaccttttggagcttcagtttggaaagggcaattcggatttaaatcatactgcagtttcctaaatagaacaaatcccctgatcctagtgatcatgtgcaatgaggcatggaatctgattacccttatcattatcttagcttggatagctacaaacgttactaaatggttatgaaattatctagccctttattaagtgcaaaaggtagtacttaggttactaaacttttttgaaaataattccgctggctgacttttcatggctaaaaacccatattcttatctgtggagtgtatctttttgtaatcacatctgtgtttgctgtttttttaattgtccaggcagtatgttagccattttgtgtctatcagcccatttggtcctgacaacactgttaaactagtggcattacctctattttatgaagtaaaaaattaagcctaagaggattaagtaaccatttgttaaaggtgttaaggaaagaaaagaggacttagacttaatcattgatatgtttgttttcagtgtcatagatatagatatatactgcttttcataattttctattcaatataatataatatatatgtaatatatgttggatgtgttgaatttagcaggacctgtaatatttatttaaatccacagttaagaatgataaacaggactagagaatggaacacagaattttggctaaagcagcatacataacttaaaataagtcactttctttttggattcaaagaaactcattttacattacattttttgcttcccagtatttgtttttctcaatgacgttaaggcacctaattacccccaagccactttcttaaatactcctatgcaaaatgaaaagattggcctggagactaatctgaggttttgaatgcagtgcggtagaataagtgttttagaggtaactttagttcccaaatctcaataaaaacacttccaaatttagtgtatcaaagaaaagattattggataatgcattctcatctttcggtgtatgataaatgccatatcagaagtcctcaaatactcttgattaaaaacgctaaatgatctcaaataacacaaaaacccatttattcctactggagtcagtatttaattttctatatttgtaatttaaatccagatgtgggtgtcttcacagcgaccatggcctgtcatcccttggtctgttagcttctaatgtctagcagcagagtatagtaaatacttgaaaggtagaccttcacactgaaaatcacatttattgaagtgggagcagattccatttaaattgtcccttacctgatgcctaattcctaaggttaacaggttttcatgtttgctacttatatcagcagtactggagctggtttttttgcatggctaaacagcaaagcttaaattcaatactagagcgtgaaagaggaaaatgagttttggtgtgacgtgtgaatgacgtggttttcctaaataccatgaatgcacaatgaatgatccacaaagcacagccgcctcttaaaagaagacaaaaatctccctgaggtttagttgagaaaagatacaggagcatatagcaaaaactacaacatgatacacttacgtaagatgcaggtgggaagaatagaatttccaaattaaaattagccaggccagcagaaatgagtaacctaatgttatggcttggatccgtgtccccatccaaatgtcctgttcaattgtaatccccagtattggaggtgggccttggagggaggtggttggatcatgggagtggtttttaatggtttagcaccgtccccctagtgctgtccttgtgatagagttctcataagatctggttgtgtaaaagtgtgtagcaccttcccctctctcttcctcttgctccagacatgtaagatgtgctagcttcccctttgcctcctgccatgattgtaagtttcctgaggcctccccagccatgcttcctatataccctatggaaccatgagccaattaaaccccttttcttataaattacccactctcaggtatttctttatatcaatgccagaaaggactaatacacttactttcgtgaaaacaacttttctcttaaccacctcctactgtctgtcaagtgtagttctaagtgcttgggatccaagagtgaaaaggatagacaaactccctgtcctcatggtacttacattctagtgggggagtccttaatgggcacaagcaatcagaacttcaatttgcagaattttgtgaaaatgtgctatcatatatattttattaattaactagttaacaggcagggaggatctccttcaaacttttgttttcatctttgtatttttctttctttgccaaatttccactttaatctctttcattctaatatgctcacgagtcacttaatgaggaggatatgttctgggaaatgccctgccaggcaatcttattgttgtgtgaacatcatagagtgtacttacacaaacctagatgttatagcctactacactcctagctatatggtatagcctattgcatccaggctataaacctgcacagcgtgttcctgtgacgaatactgtaggcaattgtaatgcagtggtatgtgtgtagctaaacatgtctaaataaaaaagcacagtaaaaatgcagtattgtaattttatgggaatgtaacaacccagtgggttctgtttgtccactgcccagatggagccaatttatcaagacaggtgaattgcagtagagaaagagtttaatacatgtagagctggctaaatgggagaccaaagtttgattatcactcaaatcagtctccttgaaaatttggaggctagggtttttccaagacagctcggcaggtaggggtctgggggatgggtgctgctgattggttagggatgcaattatgggatctggaaaatggtccttatgcactgagtctgcttctgggtgggggccacaggactggttgagtcaagagttgtgggcccaggtgggggacatctgattgtcagaagtgcaaaagcctgaaatgacatctcaaaaaggccaatcttagctgctacaattagggatgttcattataggagtaagtgggaaagttgcaaatcttgtgacctccggaataatggttggtaattatttaactctgcctgcatcttagcataattcaggtgtctctcatcctcttaacctggtggctttcattagttttacaaagcagtttagtttttgtgaatggttattatcatttaaactctaaactaaatttctcccaaagttagcttggcccatgcccaggaatgaccaaggtcaaagaagtttggaggttagggcaagatggaattggttagatcaggtctctttcactgtcataattttctcactgttatatattttgcaacagcagtttcaggaccaccttcacatactcagtctatcattaaccaaaatgtcactgtgttgctcatgactgtaatcaaaaaagcacagagagctctctcgctatctggttctatttctaccaccctgacaaccactatagtttgttttcaacaccaaaagaaaataacaaaaaaatagcatcttcaccctcgattctagtttcttttttcttgaaatgactatggccatttctattatttcattttgaaattgtgcagaattccttctgaacatccatctacatttcacagacaacaaattgctaaaaacacctaaacaccactaacctgggggggagaaaaaaaaacaaccaaaaacaaccaaacaaaccaaagaaaacaaatcaaccaaatgaaaacccaccctctctggtggaaagactgcaccatttttggtaaagactttgcaatcctgcctagactggatgactgcctattgccctaacactttccttcctacccccagttatttacaagatcaccccttatggtaacagtattagtacaaatgaggtttttccctttacttaactgaatgctagaagaaacagaatggaaccacatgttccctttgattcacacccaaacactgcaaaacacagagtattcgcttcctttttcaagctgtgtgtgcacattaaacacatgcaaacattggactgaaacagacacagtaagtcagctctaggggaaaactatagaagtctttttattttgtttctctaaatctcaatcttttatttaagctaggtctttgcagagattcaaagaatgatattttgtaatggttctccaaagagcagttagatgtgtctcatccaaatttgtgtatttaccttatcatcacagatactgttctggaactgggaacttagcattagctctcttcttagaaatgactattaatttttgataaaaagaataaaaaacaccacattacataatggatataagagaacatagacggcatgataggaatattctgcctgtgtttccatgaattgcttctttgttaaaaagtgtttggtataaattaggccagtggtgtcccagcactttgggaggccaaggcaggaggattgcttgaggtgaggtgtttggtataaacagtatattaacaaagaattctcctatggtataaaccctaactctagcaggaagatcaaatttctctttgaggcatgcagtctgagctccagtgactctctgcaagagaaaagctgatattgtcacattgtgagtcatagtgactcccaaggatgtatttgtgtggatgtggttggtcagaaggctttgtgtgcactgtgacatctttatgctgcagatgccaagatcacagggtccacacagagcagttcatttcacacagtgggaaatgatgcgtgtgtgtgtgtgggtgggtgtgtgtgtgtgttttaaaaaacctaaacagagcaacactgttctgtgcactcaaactctacagctaaccgccaagggccatcttataaatttggacattgaattgctaaaatttgaaaacacagccactcctattcacactctaccatctggaaataaaccctaagtcactgtgggtgtccatatggaagtcactgttctgcttccttttatcttcatggtagttcaaggttcgatttcctcctagggagactttctgttgttcccattgagccagctctgctgtccccactggtcacgaaccggatcagtacatggagattcctgagcatatgcagggcagcggcatgagagcatctaaaatagagtcattcccattgccccagcacatccttccttcctacattcctgggagaaaagagcagaaacaaaggcttttctttcttctctcttttggatgtttggtgatttgcatacagaagttaactcacttcatctactggattccaatcattcccttcctggttcctgatcttagagtacagggtgcttcttgccttccccttgtcaatataagggctttagaaaacgtgcccagctggtattctttaaacctcctccaacgcacaaatatatttttaaatgcagatatttcatatacaagttgatatttctagtttctttttgaaaatcggaaggtttaactctactgggccagtgttattcatagcattggtcaactggagctgaggagccattgccatttttatggatattcttttaagccccccaatctccaccactccctgtcacctcactcagcttcatccatctgcctgacccctggagacatttgattttgtgcttcctctcacacagaacttgtgttcacaatttggggtcataccttcacatattatatgtaaacagcactctggaacgttttcaaagtcacagctattttaggtatttagtttagaagaggttagaagttgacttttacattagtatcttaaaggaatatatttgcctgctcagaaacatctggggcccacatattcagatctttcgtacatataatttgctatatagcataacacattgaatgattttgactcagtagctcgacttattttttgtgttcttttaaaatctttcatattaagcatagaattgtaatttattgatgaatattttattttctgagaaaagttggttattattcttaaaatacattacctataatgttcatgtttcctatgttttaatatataatattacaatattgatgtgtcgtgattttttttggttgttctctaattaggggtctttatatgaatctctgattacttagcagttctctgaagggggcagtctttcagagatgcatttaagagctctgaattctgttaagaatattaaggaacacaatttttaatctttactttttactccagggctttgggctgtctgtatcaaaatgcttcagatacttcctctagggattgctttgcctgttccatccttaagagagtaaagaatttcttctccccaccaccccccaactcctgacaatttcagctaaatttttttcttccattgctttaggccattgcttcaagttatatcaccttctgagactatgaataattctttcccttcaattatattgttaccttgaaggtatttataggctgtgatcaaggcccctggagtcactgctttggcagactttataaatttagctcttaccacttctcctcacattttttatcttccagcctttgtagcactccttttgtgtgtgtgcgtgcctatctgtgtagcttctctgatattttaatatccttcctaaactagggaggtcagaatagcacatcatattccaggtattactgtgagtatcagattttagagagtgaaatcaagggagaggattaccttgaaattgaacttaatctattttgtgactcagaaaaatagacaaaatggtagaaaaagctaacggggcactgtcaacatgttttcatatattttaacgtactgttagagcaatcctggaagcttaagggggaaatgatgatttttcttagagagaattctggcttccattagatgcttgaacgtgtcctttagagtaagattttctttacaaatccaggcttcaaatatggctatgtaataagatgggttttttccatagtacatgagctcttaaatctgtattattgttattattattattattaatattatcagacctgtctttgtggcttaaaattaagaaacatcattaaacatttaattttacaatgaagaaaacaaattgctacgtaaaccatcttgctactagctttaagctctagtccaggtcattctgcattttgtcaatatagtaaattgagtaacagcctctgagggccctgcaaagagccaaggcccaatttaactccctagtgccagggtctccaaatgtttttggttgtctatacatactagaaaaaaattaactctgcaccaattaaaaatatgtatatatgtatgtagaatacacacattgcttatattatcacacatacagaaacatcaggcattttaaaagataagattagatacatatatatcccagtattattccctgaagttcccatgaaccaaccttggcacccctgtggatgcccaccccaacttggagaccactgctgtggtgggaaaaccatggtgacaaacggagccaccaccctcagcagttcccaggaggaaccccagtatcaatggttatgtactgcagagcctataagcgaatatttagttcagacactcattttagatatgaagatatggaggtgcagtgacttacctacctatggttacagagttggatgatgagaaagctgggtgtaaaatgccagccttctaatttatcagatttcaacacatgcagaaaatacatagtgttctgttttagctggaatctcaggaaaatggggactgaggtcctgaatgaatgatgaagaaggagagggtgaatcaatttccaatcggtggtcttaaaggtgaaatattgttagcctaagtaatctctactcttttgtgtcccttctattaaactctctttacaggttctctctctctctctctctctctctctctctctctctctctctctctcccacacacacacaccccaagataaaatccaaagcttctgattcaatagccaacctcttcagcaagaagagcaaaggttctgcagccagattgcctgggttcaaatcctgatcctatcactgaatagcagactttaggcaaattatttatctatgactcagtttcctcatccgttgaaattggggataaaaaagttccataggggttgatgtgagcattaaatgacacctgtaaagcactcggctcactgcctgatcccacgctaatggccctttatatgttagctatttttattattttattctaattcttcctaaaagcttaaagcacagtccttcatatcactgcatcgcatttcattttgtaacatgttcttgtgctacatgtttcaccatgtgctacatggtgaaaggcattttcctacccgctttacaaaaacagacaccgaggcccatgtttagggccaaaatcagtgctgaatgccaggacagactcccaattcagtgtctcgtatcaaactgcatttcctttcaagatgaaaattgttactcaaaaccctatgcagctgggcgggaacacagattccatggtttcctttttcttcctgtttccccaaagcaaagcatctcctctctttgcatgggggatctatccctccagaagtctacccagcctgaggataatggcagctgcagggttacaggggtaactgtccatctgtctgaattctcagttgtgtgagagcctgtgttacaaccttagtagcttctgcacctcactagcttttcccactcccttggagtgcttccattttctccagctttcggtatcagggagtgttattaaatgataaggagctggctggctggttgtgtattgtgagaggctgagaaacaatgagtgttacaacacattagattgcatgttagctctgattttgggaactttgtatcacagagctcatcatgcaacaggactgcatctgggatactgcctcccttccccagagggttattaatgggccttcatacctgggaggacagattacaggagagatgtgataattagagatacttcactgatcataagcaggcccccgagcaccaagggctagcagctgtgttacacatatgaggcaagctccatgctccagagacaaaagtgaagtagaatttgctgcagtgaccttacctaaaagaggtcatctcaaaaatggtcacccatggacattgattggcaattggtttgaatagagaaagagtgttctgagctgaggatcagaagacctgagtttcatttctagttctgccatcatagagctatagggtcttgatgaagagtcacttaacttgtgacagtttttttatataagaaaaatgggagctacatatgtcttacttatcacaagagattgcaactcaaatacttcttcttccaaggtagtagggtggcaacaagagtgtgtgtgtgttctgacgataaaggaaatataagaatattttgaagcaaaagaaggagccagtacaaaggcagaaattgacaacgcatgggagcagaagtggataaaattaaccaagctggggcagaagaaggcagggaagggtgagagaaaaacagtagacggcttaatgtcatcaccaccacaacaaatgatggtgataacttgatgctggtgatgatttggagctcttcctatggagtaagaaagaatgcaagaattgggtcattgaccagaaactctgaggaggaaattaaagaaaattcatatctaggtgtcttaaacttctcagtaaagaaagttttaagctcatcaatcaacaggggcaggggtagatttagggacttgaagaaagtataagatttttagaatgatctctttgggggatcccaaaataagtcaacaaggcatcttttcaatgttgtcttgatctcggagtcagaacaacttgggtttcaacctagctctatcttttttcctcctagagcacccttaagcagatagatgcccataccttacccatcagtactttagggttataatctatatcttgcaggcatgttatgaaaattaaatatgatcacatatgcagtgtgcataacatcatgtttggcacatagtagcctgtcattattttggaaaagtgaccataatgaaagagaatgcatcaaatatataggattgttaaataacaatgtccaatttagaagctgagttgtgttggcctatctgcttgcaccaagattaaataatattctttacaggtgtctacacctttttctctccaaggcatgtcttcagcctcagtgctttcatggctcatattttctcctctcatgctttcctacctgctcatatgatgaaccacatagaggaggtgattctccgaggatttataatgtgtttcctgtgctcctgaattggtgccaatggcacaccaatccagtcgggtgggcctcaaggcacaccttgctcctgactgagaaggaaaaaatctttgtggagtttgcacaggtataccaagtaattgagcatttgcattagtatggaaccacctactacagacaccgggctcgtttcactcaaaggatagcctagaataagcatgaaggacctcctttcagaatcttgtttatgtaaagcccttcttggatttcctctttattatattttacataattgatcacaaatgtgaacatctatggaaatgagttggagtataggcgataattaacctggaagggaagaaaacccttcaccagaagcaaatagatacccctgcaaatatctggtaatttcggccgggcgtggtggctcacacctgtagtcccagcactttgggaggctgagatgggcggatcacgagctcaggagatcaagaccatcctggctaacacgttgaaactccacctctactaaaaatacaaaaaattagccgggcatggtggcaggcacctgtagtcccagctactcgggaggctgaggcaggagaatggcgtgaacctgggaggcagagcttgcagtgagccgagatcacgccactgcactccagcgtgggggacagagcaatactccatctcaaaaaaaaaaaaaaaaaaaaaatctggtaatttctctttcattagaaagctccaagtgaggtacaaactcaattcaaatattctatgagaataaaaacaggcttatacccaaagataggcaataacaaatgctggtgataacatggagaaaagggaaccactgaacactgttggttggaatgtaaattagtacaatcactatagagaacagtttggaggttcctcaaaaactaaaaaattgagctaccatatgatctatcaatcccactgctgggtaaatacccaaaagaaagaaaatcagtatatcaaagagatatctgcagtcctatgtttgttgcagcacttttcacaatagctaatgaatggaagcaacctaagtgtccattaacagatgaatggatagaaaaaatgtggtacatatacacaatggagtactattcagtcataaaaaaagaataagatccagtcatttgcaatcatatggctggaactagagaacattatgttaagtgaaataagccaagcacagagagacaaatatcatacgttcttacatatttgtgggatctgaaaatcaaaacaattgaactcatgggcatagagaatagaaggatggttaccagaggctgggaagggaagtgggggttgggggaggtgggggtggttaatgagtattaaaaaaaaaatagaaggaatgaataaaacttatctggtagcacaacagggtgactgtagtcgataataactcatctgtacattttaaagtaaagagtataattggattgtttgcaactcaatggataaatgtttgaggggatggatactgcattcttcatgatgtgattattgcacattgcatgcctgtatcaaaacatctcacatacttcataaatatatacacctactatgtacccacaaatttaaaaaaaatgaataaaaacatccttcaaacgaagtggctattttgttgcaaaaaataactattacttctcaagcactgactgagtgccagggtgtatatgtatgtgagtatgtgcgtgtgtgtgttttgttctgttttttctcttgtaaatccgtcaaagattgcaaaggtaggaactattatcctgatttttcaagtcagaatccaaaatttagtgaggttaagtgacttgccaccatgcttgctgctcacaagtagctgaggcaaaatttgaatccattttgcctggagcccaagcccaggttctttctcctaactgggatgtcctgatgcctacacaatctgctcagtgaattactcagcctccatgtttttctattctatggcacccctacgtcatactagccactagagtgaaaagtgataagatgaaaccaagagattgtcttatcagcttctccattcacatgtcttaaatgatttctacctttactaacaagagaaaaatccaggtacattctggggaaaccattagtgcttagttggtaaaatcttgagacttttatcttactagtagaccctcaacatttttccaaagaggcactaatgtaccctgtaaagaaatgacatttttcgtctcaaaaaaaagcaaaaacaaaaaagaaatggctacttttcaccctaaaataaaaaagtgtgtgtgtgtgtgtgagagaaagagagagagagagagagaatgaatctatctccaaatgccaatgagcatgatggactagtggcaagactttctacagaatatgtaatttggtttaggcagggcaatctcctttgtatgaagtaaatagtaaattcagttacagtatatataaacattaagaagaatcttcttctgtttaaatattgcttcttaaaatttgttttgctatttaaaaaattcattttgaagttacaagtgtctctcctaaggagacaattctctgacaaacataaccaactggcaattacaaatcataattgtgactcagaccaatattaagtgagcaccttcctgctttctcgtagatgaatgtctataagttgttagtgcacatactgaactagaaagcccacatcaggaaggtactgctctttttttgttactgttaaatttgcttggccaactcagaatgaatatccagatttctcaactcttgagttagtggatatataaactccaaaaaaattaattaaaattgaagtttaaattttaatactgagaaaaatagttgattagctagaaaaatcaccctaaacataattatatgtatcagtaagtcaaggaaaaaattaaatttgtcaataggtccctattctccagtgctgtcttttcaaagttactttgcaaggtattcagttttagtgctaacgtatcaatcttttttttttggtgggcgggggatgggggcagggtctcactctgttgcccaggctggagtgcagtggcgccatctcgccttaccacaacccctgtcacccaggttcaagtgattctcctgccttagcctcttgagtagctgggattacaggcacgtgctaccatgcccagctaacttttgtacctttagtaaagatgggttttcgccgtgttggccaggatggtctcgaactccagacctcaatgatccacctgccttgtcctcccaaagtgctgggattacaggggttagccaccatgcctggctaatgtatcattttctagaatacatttatcaatgaaattttcaaagaaccttattggtatggtgaattatgtaaagtctcagaagattacttttgactttccacggccagatactcttgactcacttctatcaatcatgcattggaaatactctgacatcgtcaattctaccgtgatctactcaagcatctcacctgtttccttccagaaagcatgttttaatgttggagattcattggctagtaaatgtatagtgtcttaaatgatgtcaaatgaagaaatgccaaaaacatgcccaacaggaacagcaaagtatttaccttcatgtgtaaaatgccagtgtgagatagcccaatgtgatattgaactggatcaatggtggggtgccagcacatgaggaatcgacattaattcaagttgggacacagaagttggcattgtgaagatttttaaattctaggactaaatggatgatccactgggaggcaatgtccagacagatcaataccacacaaaacgttaattgcttttcttggtgaatcctaagaaagtgctggggctttagggaaattgagagagatttcttttcttccccctccacaaaaggtaattaatgagtacaacagacaattcaaagcaagaaaatagaatctgaaagcttgaaagccatacattcagaatccatttagagatttacagaagggctttagcccagaacagtgcctacaggagctacagtggtgacagtgtctccttgatagatgcatcctggaatcttctactgggcaagcatccaaaaatatttgaacaaatgaggtatgccttccagcatagctgggtagttagaaaagagtcaaacatatagaaaaaaagcatagtgactgaagtcatcttaaagctagtttacaaatgtagtctgaaatacactctatcacgggatgaataggtatggattttattccaactatgatctactgtgctttctgggactgtaaaaagtgactacaccatccattaataatatataggaaggcagtttgggaatgtcaacccaaagcctcttcgtaccttgaaattcccatgcaatttggttacacagagtatatcattactcaggttaatattataagacaagtattagcattatgtttgaacaaaggttttcacaaggtctatattaactttacaaaggttctgctgtatactgaatgacaaaggctgtcacagtagcgaccaatttgttccaatttgcttacttctccagatctctctgtcagactttaagttccttgaatatagggtcctagtcttcttgcccatccttgtatacatggtaggtgttccatcaatgtttcttgaatgaatgtataaaaagtgtattttaattgaaatcttaacaagtatgcattaaatgtatagttggtgcttggtactaattctctcaccagtttattgaaatttgactatatttgagcttgaaatggtatacctacagatatagatcattaaaaccaaacaaaaccctttctttatgatatcaagagatttgcctcctaacataaaaatgaataatcactgtctaccctaatggattagactttcttcattagcctcctgtttcttctgagaaatggctacattttcagaaactctgactcctaaagggggtcagtaactctgggaagactatttctattacgtgaaaatttcaaataatctcctagaaacttgaaaactggttatacacagaaagcaaaagaggtgaaaagtgagttgcagtttcattaaacatggtcatcctccaacaccgtctttcttaccagccttgcatgaaacgtcattaagatgcatcttttatgcaagggaccaaaaagggtactacttttaaaatatagcaaaaacaggggttgcagttgcccttttattgagggtcagtttatatatgtagtctgatatatatttcatccagaaatatagttttttaaactttttatcgtgaaataattttagatttgcagaaaagttgtaaagattatatagtttctttaaacccttcactgagcttccactaacgttaaaatattatgtaaccgtgatacatggtttgaaactaagaaattaacatctgtacaatacaatttgctcagataatcccagtttttccactactgtcctttgtatgtgtcagaatccaatccaggataccacattttatgtagctgtcctgtctccttagtttcttctaatttgtgataatctacaaatactttttaattgaaagaattatctaaacgtatatttgtcagatcaataccgtcctttctatctttcctttctccactgaacttgggcgtcagtctctttcttggctactaactctaatttatgcattggatattttactactttgggctcattattttaaaaatctgcaagcagacacagtagtctaggactgttcctgaggctggagggccagggtatagcatgtgcgcaggccaccaaggccagccttgtcattgattctgctttgttaccaagcaactgagatcgctcccactaaagaaaaagaagcaccacttccacttcaaaggtaaatgtgttgaaaaaagaacagaattgacacagcttcctttatcccttaggtacaaggatgccatgcctagtcagagttctgaattcaggttctcaaagcaggaacagggagatgcagcagctgcagttgggaactcttctttctttctacattttttttttctttttgaaagtccacatctctatcaatccagaatcctaattacatatgatataaagggccctcaaaagacccattacccctgttaaagtatgtaaattcaggggcaaattatatgaataatggctaacatttattgagcgcttattacatgtcaggcactgttcttctaagcattttacatttaatccttacaacaaccctgtgatgtaggactgattattaatactattttacagataagaaaactgaaatacacaatagataggaaaattgctcaaagttgcacagctagtaattgaataatcttccaaaatcttttttatttaggtaatagtatttttgataaataatttatatattttatgaagacctttacaatgatggtgttattccatttccaccctagattaaattagcatcttgagaaaaagccataaacccagtgatcaaagtcgatggtatttattttatgtttaaaaggtgtcatctctatcgagtagtcaagtgctaaaaaaaaaaaacaaaaaacaaaaaaacaaaaaatccagtcaacagaaacttaaacacttgagggcaaacattgagcaatgttggggttttgttaccttgcactaattttgggtttaagaagggaaggaaatgatgttcgtaatccagtgttctggaaggaggagtgcttttggtagattaatttacaaagttttctgctgacaaaagaaagggaaaggaaaaaaatcagataataattccctttacaggcctaatttgaacttaattctctctctctctctctctctctcacacacacacacacacagacacacacacacacacacacgacaactgtgagctgtaaatccatggtcatctagttactagcgcagtaagagcagttgtctgatctgatcaaagagtgtcatgctccaaaaaatctgatctgtggtgaaaatagattccccctggatactatccagggattagatattttcagagaccaaaaatacagtgaagtgccctcagcaagatagaacacagtgtagtcattcttggtgaattggaaggattttgccgcagggctgtcattatgaacatcagtgatcattgtaagaatatggaaaagtgctagtgaataggagtcccaattacagaacactgggtgatacagcctttgctataattatagtgtgtttagattgatgggcctaatgagcagtgttccttaatctaaatgttgattttggagcgagttaaaattagaggtaaaactgtgatagtaagtttgtttactagattgactatgtggctccacgtagaattcagattagttcaactaacacttcctcagcaccaaacccttgtcaggccttgggctaggtcctggagacccaaaagcagatgaagtcctcagggagttacagcccagcatgggagagggcatttcaacggcattagtaatagcagtggatatgaattgagcctttgccagatgctaaacacttgttctaaaccctctgcgggtattaatccatttactcactccaccataaccccacaaagttgggactaggtgagaggggagccaacaggcctggaagactacagtaacttttccaagcttatatgtgtgataagtggcagagcagagcttaaacctggtccggaccttgggttcttaactctaaccttagtattccagagaagatttcaatatacagtagttcactgtcctgggaccaagaagaggtacaattaaccatgttgcctatgctgctggtgatgaagccagaacgtaaacagaatgatttatcctcactcctttgttcgtgaacaaaggaaccataatcccccatgaaccattctggcctctttactatcctccagacaggttgatcttgtttctacctcagagcctttgctcttgttgacctgagtgtcccatcccagataccgttgtatggcccttccactcaatcctttcccacctccctccaaatgttaccttattaatgaagacttccctagctcattctattttatctgcctttcttccttatcccacctccctgcagttccttctcccttaccctgccttactttttcccacagattttaccattagcaatactattaatttctttttacttgggtttttgttggtttgtgtgtctgcctccccacactagaacacaggctcccaggggttagtgactttttaaatattgtttgtcactgaatttccaatgcctaaaataggacctgaccacatctgagtttaatatatacttttagatttagtgaattaaaaagccagaatgaggctgggcacggtggctcacgcctgtaatcccagcactttgggaggccgaggtgggtggatcacgaggtcaggagctcgagaccagcctggccaacatagtgaaaccccgtctctactaaaatacaaaaattaactgggcatagtggtgcgcccctgtagtcccagctacttggaaggctgaggcaagagaatcacttgaacccaggatgcagaggttgtggtgagccgagatcatgccactgcactccagcctaggcaacagagcgagattctgtctcagaaaacaaacaaacaaacaaacaaaaaaaaccaggaagaacatattccaaagtgtttaaaatagttatatctgagcgtcggaattatactattttaaatacacttttaccaagtttcctataatgagcatgcgttctatgagaaaagggctaaaaatagatgaaagttaaacattagtcactaattcatctcataaacctacttactcctgggaactattaacttctgtgttattattgcacattgggtttttatacatggtagatgctattatcgaggatcccttggggaaggtttgtgtatgaaatgatcatttctttcctgcttactccagattgagattgccagccttgactcacctgagcgggagactcacatgtgagactgcccgtgtgaagagcttccactgtgatacccagtaggcatctgaaaagcatcaggtccaaaatggaattcttgatcccccaacctgctccttacagagtgatccttgtctcagtaattccaacatccatcagttgtgtgatccaaaaacttagaactcatacctccctttcctcatgcccacagtttgttcatacaaagttctatagaatctacctcccgaatacattcaaaattagaccacttctcactgcaactcaataccatgctcctcacttccatctctactactcgaagccactcgagtcatctcttacctgaattgctgcaagcactttccagctggtatgtttgtttccaatcttttatttcattattttttaagagacagggtcttgctctgtgtcccatgctggagtgcagtggcacaatcatagctcactacagcctcaaactcctagagtcaagtgatgctcctgtctcagcctcttgagtagttgggactacaggcacacaccattatgcccagttaacttttttctttctatagaaatggaggtctcactatgttgctcagggtggtcttgaattcctctttctagttttctctgacactctcactccctgccaatcttttctcctcaaagaagccagaatggtattttttaaaaaatataatcagcctttattaccaaccacccccaattaaaatcctcatgtagctttatattatattaccaatccaatctaagtgcattaccaaagctttgaagaccctgtttgatcctacctctcaataccctccagaacatcctcctcgtctaccactttcctccacatctaccacaccctgggctgtttgtcaaacatgcctggtttgttctagctttgagcttttctctgtctgggagacttcttccttcagcaccagagctgacttttccttgttttatacatagtgagatgtcagctcagatgttacctcctcaaaatgatctttttgatcatcataacttagtaagctctctccctccaccagtcacactgtcccacatctcttcattctgtccagtattagtctgtaattaccatgtgcttacatgtttaatatctgcctcacttttgaatgaaagtatcaaggggaaaaggaatgtgactgtttaaatcactgctataacttcagtatccaaaacagtgcctggctcatagtgaacccttcataaatagtcactgaatgaaggaataaaggattggagcaatgaatgtttttgtgacatctagatgaaaattagagatgataaccggtgcaattttgatcatctatctcccttcataccagccaccctaatctaggggactagaataccgaaagaaaatttgcttctacgaacaaggtaatgtcatgatatggactgactcatttatttgttcatttgttcattcattccttcatcattcttcactcatcagacatgtagtgaggactttctttatattaggccccctgtgtttggttttctgtcagttatcttagggtcgtgtgtgtgtgtgtgtgtgtgtgtgtgtgtgtgtgttaaaggacgaataaagtaaataaactaatgcaatgtaagaagtgttgtggttttttagtaaaggttataaatctagacttatgtgcgtattgttttgagaatacaaagaaaggtgcttctgtttctgtttatgggaagtcactttacagacatttatctttaagtcatgatagatgaatttctcatatgggcagttttcctaaatctgagttttagcataatgagatctggagaaaaagaaggcaaaaaaaaaaaaaaaaaaaacccataggaaatgatacagagactaatgatcatttacccaaataaaacagataccattcaaagttagacactgagcctctggtaatccctgttcttctccttcatcttgagcgagggatactgaaaaagactgggctggctactgtttaatcagggaatgatgaatacttttcattagcccaagaaaagttagtttctattccagaaatattttgtaaagaccagttaaaattattaactattatgcatcacttgtcaactataggaagcattactgcaacctctccatagatgattagaataattgctgtcctttcatctttcccatctaacaatactcacccagtacctcccactttcgtttgtgtcttagtatgctgcatgtatctgctttgctaagagaacatcaaggcttggcataattgggctatttccctgtcatactggtttgcttctaaatctgcctcctctgtgggttgcagtgaggtcaatcagatgcagtcaaatggcagagaagatattaaaagtacatatatcctagaactaaatatacaccatctgtgaacttcagttacaaagggaaacttctcttaatatgaccttaggtaaagccattggcagttttattgtatctgtcagcaatcaccaatagctttgattaacaacatgactaatacataagttatgttggtctctttttttcataaataataagagatagggtttctaccaacacaacatttctcatacttgcctgatcattagaccaactgtggcacctgagaaaaatatgccacagacctactaaatcaaaagttccaacaggcctagggatctgtatagttcataaaaactccaggggatttgattatcaggcgaagtttggggagctttgtatgaataatattcaatgaattgtttgtatgtctgtccgatgctttccagactgggttaatgcctgggtctctttctttaattaagctttgattaagatgctcccagcaaatcccacactgaacatttccattgccccctccctcccccgcttctactatgagagaccgagatccatgtgaggtattctgtgatgaagatcttgttctgtttttattattaagcgtacatcttccccttttctgatattaccactatgcatcatcagttaagctgtcaccaacctgacctctgaggcattggaatcattcacttgatgaagcttactttggcataagctaagggttaggaaaaccaacagatttctaaaatattgtgcatggaagggccactggaagtcctccatcacagcctgatagctacaaaaatgagggaacaaaggcccttgagggacttgccaaagtcaaatagtcaattacagtgagagtttggactaaatctcctggttccaattattacattcttcctatgacaccattccctgattcctacaaccaaattagcctcctctttgagctttagttttccctctaggaaaaaaaaaaaaagcatgttagacgaggtcagggactctaaaactgagaccctaggttcagttaaaatgctgggaaggctactgtgataggggtggatgtcggagaggaaggacagaggtggggcttcccctagttatatttttatctgattgggatattgaaattatattaagaatttatttggaaaagccacttctgttactttttaaaaaaagatgtagaggcacaaggctagatgttgatccttgagtgcagatctgattcttacatttggagatccttagaaaagaagtctgtgaaggcaagcatttgtccttttttgtcataaaacctgattcttgggtattcagtgaatgacactcattgaccaactgcaggtctggcatgatcatcacaaagaattggcactttgaaagtgagagaacagtgggaagagaaattcttaggaagcaagctatcttttctaatcctctttaaaaggccaaaatgttcacaactttcccctaaaacagaaaggtgacattgctccttaagcagcagtatcatgcatgctgtcctctgccttcctaagaagtgcagacagagggcagaccctccgagtgaagtacctttttttcttatttgagcctgctctgcattgagggagagtttgacacacctctttagggttctgagaatagttaacagctctaagaaagagatttttgttcataagaaaaaacaagagaaactggaagcagttctcattcatattctctctctcgccacaccccccaccccacctcctcccgcctctccctctccctcttcctctctctccctctcttcagtatctaatgtaaacccaggctttctttatgttctgtgcagttggcctgagttctcttctgttttggtcaagattcaagtggaaaagacctgagcctgtgtctgcctcctttctcctaattttggtttctaatgttttacccaagaagggactagacctttgtttccctactcctttatcatagcatgctggttctcagaccttttctgcacactgctaacatccttctcacctttctttgcttggctttttttttcactgcaagctctcccatgttcatttctcatttgccatcagatttagagtaactggcttatggcatcaaagaatgaatcagatgggagcagctaagtaaactgaatgaagctgcttcctttctcttttcccatccacaaatgataaaatagcctgcccagccaagtgacgtggcattcaggggttatggtggcttggccatttgtttaagtttgcttatttgcagtcacagttctttagtatttcagtgatttggttatcactcaacagtgcacacatttcttctataaaatttgatagttacttatctatctctgatttttccctctgtgttttattatatctagtttaatttttcccctttgttgatttctgttttgtatatcttgttgcgggatatacatggaagggagacgagtttccaaagataatatagatcccagtttgcctgtaaattgataacaccatttggaaacaaatcttaaaacctcactgacacagcataaatagaatttacagatcttcttgaagcaaatccaaatctccagactctactttctccattctcccccactcatcctaaccttcacgtacagggaccgcgttaccaagtgagccaactagactctttcacacctctctgcctctgcacatgctgttccttggccagaaatgccttttttttctgctttacctgacacatttagattagtcttttaagacctaatagaaatgtcaagtgctctgatatgccttcccagatgcccatgagcaaagtcagatgttctgccttctgttcccctatggtactttactgatgtccctgtgacagcttcctgccactccagcccactcagttgggagaacttcaagaggtgaacaaagttttattcctttttggattcccagtgtctcatagaccttctgggacatatggcacattcagtctagctgaatgaggtgatgaatcaatccacttactctctccagtgcctgaaacttctcaaggagcttgtgctctcctttgctcctctcttttcaaccaatctgaaaatgcttttaaaagataatgtctgttttccagtgcagtcttctcacttggcatgtaatttctccatttttatttcctttgtgaatatcaaggtacaatttccatagctaccagtctaacctggaatcttttcatctcagttttggagttccacaacagtgtcctggtggatctatcttctatatattcctactataatgtacactcttaccaggtaccaatcagttgtttcaaaccacatttctactaaatgacctctctgaagtgattctgaactggcttccctattagatgaagaccaaacctctactctaagcacttaagacaaatggttgcattcatctcaatgctccttactcctcaatattatccattacatttttttgagacagattgttattctctgacagattgttattccttcatcgtccaaaaggagtcctcactttgcttagactggaacacaaaattttatctattttaatgttccgtcatataattataattatattctgttatctattccaaattttcagaattttatctattgcaaattttaagtattccaagttataaacttacgtcttccaaaaagactaccaggattaaaccaaccactgaatcatcatttcattacttcatattactacaagttagatttgggacactgtaatattttagccctgattttgccctttttatagtgtccatagataatttaacttctttgtataaacttccattataaaatgaagttttttatatatatatatgtatatatatatatatatataaaacattacacatttaggacatttcatgatgaaataaaagtgtttcaaatagaaaatgatggtttatttgggtttataaatcaagaattctcaagagggtatgaaacccacttctcccttatcaactctagggattttctgtagttttgaaatttgaaaagcataaagtaaaattattatcattttgatttgcttgtagtcataatatttaattcacttagaaatatcaaataacattaaaagaaaggtgtgaaaatggctgcgctcagtggctcacacttgtaatcccagcactttgggaggcccaggtgggcagatcacctgaggtcaggagtttgagaccagcctgaacaacatggcgaaagcccatctctactaaaaatacaaaaattagccaggtgtggtggtgcatgcctgtaatcccagctactggggaggccgaggcaggagaatcgcttgaacttaggaggtgaaggttgcagtgagccaagatcatgccgttgctctccagcctgggcaacaagagtgaaactccatctcaaaaaaaaaaaaaaaaggtgtgaaaaatagggtagaccacgtgtgctgttacagtagaccccaaacataaaagatgtttatctcactcatatacacagtccaatatggttccagttggtgagggttagggttgtcattctgggagttggccagtagagatgctaccatcttcagcatgtcttccaaaagcttcctggtatcaaaatccaattgttgaaagcagagagaacatgaataagttcatatggaaggattttatggactaagactaaaagtagtccacattaattcagttcacattccactaaccacatggacacccctaacttcattggtgactaagaaatgtagtctagactattcccaggaataagaggaaatggttatactggagaactagatgtctaatatatattaccttacatagttatcaaagtcatttttagtttggacatggtctttactaatgggttgcaaatgctctttatgcagatgttttatgttttatattactttcctatgcccaacagcataaaatatagaagtctggatggattaggcacttgatgtgtgtattagcttttgattgctatgtaacaaatgaccacaatgttagtggcataaaacaacatatgtttattgtgtcacagtttctgtgggtcaggagtctaggcacagtgtgactaggtccccagcaaggctgtaatccagtcgttgatcaagactgtatttctcatctaaagactcaacaggggaagggtctgcttccaagctagctcaggttgttgtcagattttactttcttgtggcagcatgattctttgaagaatcaagaattcatggttgcttgcttcttcaaagccagcaacagagactaaatcaaatctagccagatggtcttatataatgtaagataactacaggagtgacatcccaacacctttgtaatattggttaagcaaattacaggtctcatatacattcaaggggaggggattttacaaaagaatgactaccaagaagcaggatcactggagcctgtccaccacagtaaatgactgaaaaaatctgggtattccagagaactaccactttacctgaacatagctctttacacaaaactacacagaattatgaaagatctcaagagaaaagtgttccttattgccaagagctggttattatgctagtaaaatcagcagtgctcaggaacaatatttgctaagtttcacagttatcaaccttaacccacacaatcatctttagaattggatccagaacaagatgggaccatcttaaacctggtacattctcataaggttcattctcataagaccctaaagccttcattatatggcatttttgaaactcctttgtcattttaaatttttgtctttcctagctcccttttcctctactattctatctaacttaggcagcattgaatttcatttttttttctccttagtctttctgtttgacattttcccttctagcttcatttgtcctttaagacaaccccataacctttcatctaggggaaagaaatctaaaagaaagctctagaatgagattttagttgacatattcaatttgctttagaggggcatcacccatacctcttcttccactagtgagatctcctgagaggtgaaaatatgagagaatcagagctgcttatttatatatcaactatggaaagatctttcctgcctaatctgacctcttctttgaaactccaaaagtgactttttgtggttaattcttccaggatatctatgatgcagtcccacagatattaaaggttcagggcatcaaactgaaagatataacagctctaatagacagagtcacatttctaaaaaggaaaaccaaattctgaagatattttctggctctgtgaacagctaaaaatacaaggataatcgttcctatagtcctggacttttaacacggaagctaacttggaaggaaaaatgacactgagctataggaagagaagaatagaacagacttcagtgaaatcggccgcttttcttttcaaggcacttattcctagattagctcatctatctttaagtttcatatgatttttactatttggcatgacttaaaactaccaagttggtgaaaggtacataggaactctctgtactattttgcaacttctatgtgtctaaaattattttaaaataaaaggtagcaaacatacaaacaaaacaaattattgagctgggaagtgttccccttgcaaaagtctagcaactggggtaaaattgtttctttgaatacaaatgcctagtctctgattaataaaataccaggaagaggaaaagaaggagctgaagaaagagagaaagaaatagagaaatggggatttccagttgctgtagatcttgagtaggcaggaccttagcacatggtatctaggtgcatattgcctgtcacttttcaattatctttgctggccctgcctcaatcaaagcccaaaccataccccaagggcactctgcatcgttgaatttatagatgagatctttcttttgggataaagagctattctcaacttgactattataccttggccttcattccctaaagaaaatgggcagggaggcttgcagacagaagtatatagtgtggaaaatgaaccacctcttttgactctttgcaagatttgtgatgtcctactgggatgcctgggcccaggcacattcaccttgattctacatcagagacttctgtgtcttctttctcatagtatgggttattgggttgagcaaatactttgtcatcagtgtgtcttatggagtaattgagagccttggatttgaactcatatctatttgggctctattttgggctgtgtcacttatgaactgcatgaccttgagcaaatcactgaaactctctacagtccagattcgtaatctattaaatggggctaataatacctcatgcatatggctgccaacgggagttagtgaaataatgtacatgaaatatttaacactaaacttggtgcctaatgtatcttcagtaaatgataactattgtcatagtcatcattgcttttatacttttcggcttccagtgatttccagtgactacagccctaaggccattgggggatatcttttttataactgaattttctttataaaacaataactgattttttttttttttttaagacagagtctcgctcttcttgcccaggttggagtgcagtggcacgatcttggctcactgcaaccttcatctcccgggtacaagtgattctcctgcctcagcctcccaagtaactgggattacaggtgcctgctaccacgcccggctagtttttttgtatttttagtagagatggggtttcaccatgttggccaggctggtcttgaactcctgacctcaggtgatccgcccgcctcggccttccaaagtgctgggattacaggtgtgagccaccgcgcctggcctaaaacaataactgattttttaaagaaacatactcatgactatttgtcattttagtcaaagaggatggagaaaaacagggttcagttttattttcagttcaatgtttcgaccatgacatccagtgctggcttgattacattttaggaaactgaattccttctctaaagaaatagtccaaaattaaacacatatggttactgtaatcaataataatgctaaccaagcatgctggctcatgcctataatcacagcactttgggaggcagaggcgggtggatcatttgaggatcacaggagtttgagatcagcctggccaacatggtgaaaccccgtctctactaaaaatacaaaaattagccggttctggtggcacggacctgtaatctcagctagtcagatggctgaggcacaagacttgcttgaacctgggaggcggagttggagtgagccaaaatcgtgccactgcactcaagtctgggtgacagagcaagactctgtctcaaaaataataataataataataatgctttgtgcatttcaaaattactaaaagagtgtaatcccaggacttttggaggccaaagcgagcagatcacttgagatcaggagtttgagaccagcttgccaatatggtgaaaccatgtctctactaaaaatacacacacgcaaaaatattagccaggcatcatggcgtgtgcctgtagtcccagctacttgggaggctgaggcaggagaatggcttgaactcaggaggcggaggctgcagtgagccaagatcccaccactgctctacagcctggccaatagaggaaggctctgtctcaaaaaaatatatatatattatatatatgtgtgtgtgtgtgtgcatgtatgtatatatatatgtgtgtatatatgtatatatgtgtatatatgtatatatgaaaagagcagaatttaaatgtttttaccactaaaaaagatatgtgaagtgatagatgtattaattagcttgatttaatcatttcacaatgtcaacatatataaaaaatcacatcatactccgtaaatatataaaattgtaagtcaactaaaaataaaattttaaaaagggaaacataataacttttattattttgtatttttaaaaatcaaagttaggacacatattgagtttctctgctactcaatgaactgaaggttttggaaaacaagaccaaaaaacaacaacctccaaaaaagaaataaaagaagatcatagttaaggcctttcatgcagtcagctcagggatcaagggtagatctcaacccgcctgtcactgagtatgcagtgctcacagatgtggggaatacctatgtacatcacagtcctcagggaactgtaaaaccagttgcattgaccaaaccaaaacacgtgccattagaaagcatataattgtaaaccaagagcttcttttccgtttacctaagataattgcagaggctttagtctaagagaatcaaagttaagtgatagcactgtcaaaaaggtttcttaaggaagaagatctaggggttctcgggattcgttgaatttgatgccatggctgaaaaattaagtggagatacactgtatgccattggagtcaggcactcatgtgaaagatcagcactcacatttaggaattggatacagctaacagcaggggaattgataggctcatgaaaagagcatgggtagaggatgacatagaaaattaagcacagttagggaagacttaccagccaggttacaagaagcaaacacctatcccaccgattcagaataccttgcctcactcctgcatgacaggacatgtgtgttctttacgttaactgagaaactgaggccagataggaagacagatgtggccagaagaagttgacattagtaatgagagaaataaacgaagtgattttggggctggcgttaactatctagaactacccaggagggtagatttagagacacttccatctttgaaatacccagaagtctgtttctccaatgccttgactctgcctaaagcagtctaccattaatctctgaggaatctcttcaaacagctttctgccaatgtatcactgaagccttttgagaaataagtgctgttccagcttagtcatatctcaaggcagcgtggcatgggaggtggagactacgagtaattaaaaataactcccagctcaagcagggagagggctgtccctgcctcatctgtattcccatcacaggctccccagtgagaccccagctgttgagcaagagactctgtagtgtctgatgcactcaatcttgagttgatcacaaaagaatgttaacaacgttaagggcatggagttctaggttttggaagaattcttaatgattctgttaaagaggaagaaataggaaaaagaccaaaaagacagggacaaacaggaaaaacggacccagctctactgcagtaatagccattgatcactttacctcccttggcagtctgatcagtttcactggaaagatagcaagtggaaaaagtgtgcagagatatgatgtgaaaattatattcaagctttagctccccagcacgtctctaaggaaagcactataggaacagctgctggagatataaacaaaggcccaggaacatctctgccattcatgtcaggatctgagagagccaagggaaggacaagaggggaattagctcccagacatgcttgagtctctaagctgttactccgtgatccccatgttctaggtgcagaagcattgcgtctctaagcaattcccttaccaccagctatctaatgctgtcagaggaccaactatttgctgttaacagtaatgctcatttgaagctattcagcctagattttctttgtattaggtaactgtttaataaattaattccaaacagtacctcccatctctctcagtctgaccattgagcgctcttagtcaatctttgcaaacttgtccccatttagttgttaaacctgctccatcaacccaataatgaatcaacctatatttgaggactatggtttgtgcctgctccaaatcctatgttttctctgatttcagaccccttgcctcaactggatgaacttttcaagctcagaacaaataagtgttaaaaaacattattaaacaaacatattcacctttctacaagtttggaaaataacagctaaggaaaaagcttgtaatcaatattttttgttgttgttcttgttgttgtttgagacagttttgctcttgttgcccaggctggagtgcaatggtgcgatctcagctcactgcaacctctgcctcccgggttcaagtgattctcctgtctcagcctcccaagtagctgggattacaggtgtgtgccaccatgcccggctaattttgtatttttagtagagatggggtttcaccatgttggtcaggctgatcttgaactcctgacctcaggtgatctgcctgactcggcctcccaaagggctgaaattacaggcgagagccactgtgcccggccttataataaatagatgtatcaattgtagcttaccagcaccaaaaacaatagttagtaagagtgtggagtctagaatttgactgtttagagaaattatgcctcatcttggggaaaatttcctaatgtgtccaatctcctgtttccttatccataaaatggagataattgtaggacctcctccagatgactattaggaagagatgatacatataaaactcacagcactgtgtcaggcataaaataagtaatctataaacaatgttatttaacacttttatgataaaaatatagaaatagaaaataatagtttcagtgacagatcaatgttgaagcctcaattcaaaacataataaaattgctctttatggttcttacgatgtacatttatttcaaatagtaacaatgctgttcatggtgaaacgtattgattttaagattgagaaattggacaaacaaggctagtccacaatagtgggattgcagtagaccctagaatatgtataccactttggaaggtataattaatatgtttatatgtgtcgtccccaatctttccattctttattaccaccattatacctccatttactccacagtccgtctcttctagaatgaaagctcccacaaatcagcaattgcatctgtataacctattctgtatggcataacacctatatacttttccaaaaagaggtggagagaatatttattgacttaggtatgtctgtgatgatctaatgaaatgtcatggaacaacttaaagtcatagccaaaggaagaggaatgttaatatgtaagaatttgcagatagattattaacatggaatgatgccaaaatagcacagtagaaaaactaaaataaattaaataggcctggatttgctgggtaacctggggtataaccccataaggatggtgtatgtagaagaaaagtcagtgaatcattagtaattcataaactgtgttttttctcaggtgttcaaacattggaaagctatcttttgcaacctgatgctttccctggaatatgcagtgtttcttgactcgtgcagtaatggctgatggagtaggtgttcagacattttatttgttggttttatgtatccaggtagagaactcctgtctaaaattatcaagagttggtggtgcattcaggacaggaatttagattttctgactccaaggacatttcaccacccactaaaccaccctttgccatgagctcccaggaagagcaattgttcagtctggtacagtgagggaataatctgtccctagcacaggaggctgaacacagcagtgaataaaagaagacaaaaccagttctacaatataaatgacacattccattaatacaagtggatccaaatgaactaatttcattcaatagtactttcacattctgtagctatatgggcttggatacaaattgtaatgtcagtctgtcaggagagtggatggcagtgcataattacaagttcttgttcagcacttcaggagctaatcagagcaaggatgtgaatctgtaatttgcaaatgtgcaaagacagaggttactatggcactaacgactctgctgataacattcttgccaccacatcataggactgtgagcacaaattctacaaaatcatttgacctcctgtttagtcgtttgcaagaaacagcctgctggcagtacctagggacatttataagtttaatgttgttcaaaaatctaaaatgtcactatacaataaattaatacttacattctaagggactatacacaatcgtaaagcaatatatagagcaaattaatacataaaatacagagaaatatagaaaattaatatactacatcatgcaacctgcttctaaacaagtgtttctttcataggactgaatcaggaaagattaaataaggagttgagtagaaacatatatagatatgtagagatagagatataggcaatgttttctttttttttatttttatccaccaccccctccccccgctccccaccatagcatttctgctttaaacacttattctctttctctaacaattttattcattttcgttcttggggcagtagaaaaacaaagcagcattttagagttcagtactggcctaaaattcaagcctctctctaaaagattatagaatttcgctgtcctctcagttcacagcagcaagcagaataatttctgcttgccattttcctcaacttagtcctgcaaaagtaacatcattggtctctgcttctttcctcccattattacctgatcctgctctacagcagatgcttcctcagagaaagaaatacctcgaacatctccatcaacttcttcatggtagtaacccttaaccctaaacttttcttgtgtagagatgggtgcatcatgttgaggattcattgaccattctgttaatatatgaatttaatcaattttaattttaaagaatcaggagtgattacgtgcatcacaactttcaggttaaataattttatcatgggtgctaagctagaaccatggctcacctggtcagatggctataggagagtcagcacaatagaagcttcaggcaatgtgaatcctgctgctccctaccagggatcaaaactgaggtcactgtgtggtatgtggaagtcaaatgactgcttctctttaaaaagtgttggaatgatgcgttttctctcaccgattctgtctagggggtaatgtgctagggtgcagtaagttaagtgttagtcacatatttgcagggttaaatcttagttccacagctgactcactgcacactctaggcagaattatttaactccttcagtctttgtttcctcattcaaaaaagaaagagagatactatctgtggcagagcctcagaggattgagggagttaaatgtaaaaatgacacactggtgcctgttacagggagggctccctgagaagcagacctgtgggctaagtttagcatgcaggatgtttattaaggtgtgcctttgagatcaatacctgtgaaaagtagggaaagaaagcagatgaggcatagggaaaaggtggactgccacaggcaacccagcgaacctcaccagcagctctggagctaaaatagctcttcagaattgtccagagttgggctgaggaggccagaattttatttgtgttcccacgatgatgactcagtggatggggtcatttcaggaagagagcagggcatcaaccttgagcaagaaaggtcactgcagcttagtctaaccctgaagaggctggcagctcagggcatctgttgacagtattccaaggaggcagggcgactagaactttagcaaaggaagatggcacatcacagtgatcatcacagtccccagtcataaagagtagtttcttacatgtgcataccccttagccttgttttcatttctcctcctcccgccttcctgtcttcctcttcctctcccttccttttcttctttttcttcttattttgattttgttttactttatggaattaaacctccataattctgtagtgtgccaagtatgagggggaaaaagtctctttcccccattaatagataatgacaccttgacagataagtgagcaattctgcattgattcattggggaaaactatggcaggaagtgggtagcagtgtttagcgtggcataaaatacatatgctatctaaagaggtggcttctttcccttctgggggatttatgtgcttaaatcagggcccacaaactcaaagcacgcatttgggctaaaggaagcttggctaagagtaaaaggagagccaacagggaaagggccttgtaggctgtgacctttcaagctaaactgcccctagagaaagagagacttatttgaatttacagatgccttaggactccagtgagccacagctctggctcttttcctctggggcactacaaagcttaggtctttgcagatcaattaaagtcattagcgctccatctaatgaatgttgatttccatgaggaggctgagccagctggcctgccctaaacagcgcaaaggcaagcagggtaccagagttagagcaaatggcaataagccacttgaattagaaggcccccagcttgcagcagagttaatgctgcctgttttccaggtgacctcaatcactgcctggggcagacactggactcagatgctctccagtcacaagagagtttgtaaatatgatttaaaaattgtcactggctgctcaactagcaggagtgttcagaaagctgcaaggtatgagacactggatgcacagatgtgttttcatctggggaatgttgcatttttacaattttctctcctggctattatgatgggagatttctagtttttaaattcagtgtgctttttaaatttttgaatagataataagatgattgcaaaaaaaattaatgctgcctctcatttctgttcttcatctactcaagaaaccagttattctttttgtgtgattctagagttttctgatatatgtacaagcaaaggaaagtgtatagtctcatattctcatagtcccacctactaaacaaataacaacatactgtatatataattctgcatctcgcttttcttctcttttaatatatcacagctgccttaccgtatcagaacaaagagaaattctttttttttacagctctgtcatatttcattgaatgaacatgccttatttacttaactgttcctttactgtttgcagttacaaataatactgcaggtaacctcaaatatgtttcattttttacgcatgtttgagagtatgtgttgaatacaatctcagaagtagaatgacttctaggaggtatatgcatttgtaatttcaatagatagaaggattgccaaattgtccttgagaagtattacacaaatgtacagccccccccccctcaacgaatgggagcgcttccccacacctcaccaatagagactgtggtcacacttttagaaatttgtccatctggtatgtgaaaatggaatttcagtgtagttttattttctttttcttatgatgagtgagattgtacatctgtttatatgtttaggaactttttagaaatcgtttgtatgaactttctattgatattttttgaccacttttgtagtagtttgctgcttttgtttttaattgatttctactagagagactaatctccatgatatgggatgcaaatatccttttcctcccctagttttttgtttgccttttgattttccttacagcttttgcccctgagcttttagattttataatgttgaagttatcagacttttcttttatggcatccttatttcgacacttaattagaagggaggacttcatattctagagtggtaaagtaattcttcatggttttctcttagcactaccatgttttgctttatattattcattttcataatttttaatgtattcctgtagaggacgtgaggtattgatacaaatttaatattttttttcaggtggctacccaattatttcaataactatgtttctataagtcatcatttcccatttaagcctctgttatgatattttaaattcatttctgcacttttattctgctgtattggtctgtcagtgcacatttttcaattctgaaacctgtacaatagatttcagaatctaaaagggctaattctcccttattactttttctttcagagttttcctgactttcctttttttttttttttttttttttttttgagacagtgtctcagtttgtcatccaggctggagtacagtggtgcgatctcggttcactgcaacctccacctcctgggttcaagcaattttcctgcctcagcctgctgagtagctgggattacaggcaagcgccaccacacctggctaatttttgcattttagcagagacagggtttcatcatgttggtcaggcaggtctcaaactcctgacctcatgtgatccacccgcttcagcctcccaaagtgttgggattacaggcgtgagccacggcacccagcccacttttcttttatatttttttatagaagcattagagtatataagcagtttcttttaataatttgtatatgttagcatatgtatatataaattagataatgttaatttacaaattaaggagagctataacttctatgacctatatgtgtctttctatttagtgacatgatctgtctctccttttgcttaaattttattttatataatttcatatgtctcatattttgttaggtttatctctaaaagttttttcttctctgtacctaattatgaatggttcttttctgttattacttctactaatgagctgtgtgtgtatatatacatgaagatcatgaattaaggcatactaattctgcatcctgcttccttacagaatcttcttgttaatagtaatcattttcagttgtttcttctgagaactccaggtgctcagtcatatcatctaaacataattttatcactctctttccagttttatatctccaatttctcttgtttaattgcattagataataatcctatctaataatatagtaatgatattgtggatactttagcctcgttactgactttagtaagagtgattctgatgtttccacaatcattatgagcctggcttttgcaaacatatacatccctatggtttcttaacactgaatggtctggtccttacattctcaagttaaatcccgttagcattgagtattctttataatatagaactagatccttgtaaacaatttaattattttctttttctatgccacagaacaattaacttggcattaaaattctctactctttaaaagcttggaatgatttatctgtgaccttttctgggcctcgtgctttctttttctaagggtggctcaggtgacagacaacttcctccatttcatcaatggaaatgaataggttttgaatatgtatcccctttagaattatttttaggcaattacacttttctaggatattctctatctcccaagttttcatatatatttgcacagagttagccaagactatttttgtcatttttctgtgcttattttccacttactatttttaaattttatgtatctgcaattttcttcctctttttcatgatgagataatctaatgtttaccctttttaatttttttgtaacagaaactttaaatatattaattttaccacttttgcatttcctagaatattaaattctccttttccctatatgaattggccctttatgtttttcttaaacatattttatgtttgtttaaaaattttgtattaaaaatattgaattgattttgttattttctcctgtcaatataaatatgtaagaccaaagatttcctctaagcatggcttttcctgtttcccatagattatagaatatgagtgcttttacatttttattgttctaggaaacctgcaaaatgggctgtattacattcgacccaagaattaagagagagttttaaaatttctgattggaatgggattctgtttccgatcttgttgttaacatctagttattacactgtgatcagaaaatgtgtacaatagtatttcttttttttttttttttttgaaaaagttgcagttttctttttggactgcatacagttacatttgtgattatcatgtggattcttaaaaagatttttttaattttcaatgcataagtctttaagtgtactgtttgatataccttataaattatgctatttaggtcaattatagtcttacttttgactacttcatctatcattgaataagcaagatgatttaaagtgtcttatttctgttttttggctgaatgtttcttcagataactcttaagttttctgttttttgaatgttatttttatttcatttggttcataactagttataattctgacaccttcattgcgaatttcatcttttaacattttaaacaaaaaggtcttttctcaattatttaaaacctgaataccactttctctgattttaagatccctatcgctgatttatttttgtttgcattcttccggcatgccttggttgaacctcttattttcaacgtgattaacaaatttaattgttttatttatttacttatttattttaattatactttaagttctgggatacttgtgcagaacatacaggtttgttacataggtatacacctgccatggtggtttgctgcacccatcaacctgtcatctacattaggtatttcacctaatgctgtccctcccctagccctctaccctctgacagtccccagtgtatgatgttcccctccctgttccatgtgttctcattgttcaactcccacttatgagaacatgcagtgtttagtttctgttcctgtgttagtttgctgagaatgatggtttccagcttcatccatgtccctgcaaaggacatgaactcatccttttttatgcctgcatagtattccatgttgtatatgtgccacattttctttatcactggtcattagagaaatgcaaatcaaaaccacaatgagataccatctcatgcaagttagaatgacagtcatcgaaaagtcaggaaacagcagatgctggagaggatgtggagaagtaggaatgcttttacactttggtgggagtgtaaattagttcaaccattgtggaaaacagtgtggcgattcctcaaggatctagaacaagaaataccatttgacccagcaatgccattactgggtatatacccaaaggattataaattattctactataaagacacatgcacatgtatgtttattgcagcactgtttacaatagcaaagacttggaaccaacccaaatgcccatcaatgatagactggataatgagttgttttttaaagcaagtctcttgttcatagcacaaagttggttctgctttgtgatctattgtaaaagttgaaagtctttgtcttttaataggtatattaagccagtttatatctaattatgtgatagatatatttgttcctggtcctctcctgttactttatcatatagtttctctttttcttattttgtttgtttgcttgtttgtaatgtgttctatgcatgtctatatgtatgttttgctatttaagagtttgcattttctcccttgtcatttttacagttataatgtattatatttttagtgctcaatatatttaaaccagagcttctcatccaatataccacactcagggcttttggatagaccctctggccatgaacaatcttgtcttctcctctcagtctcgacaaatatattatttgctttttgacctatcatttgaaaaatattgggaaatgtcactttaaggaatatgcactagctctttactatgagcagtgaatcatctttcttaatatttaatacagaaaaaaacatgcatgtattaaaattaattgagttgatactttatatattatcctttgactcctagcaatcagataatttacttcctactttctgtcctcttctaactatttttagttgtattacttctgtattgtcagggtttattccattttcattctggtcttcagcatattattcccattaggttagacatagttcttctttaaaaactatactctgtgcttaccttcaatttcattgtcatagttattctaattatgttttggttgatcaaagtcatttcctagtagtttcctcaatattcccagtgttcctgaaggtaaataccatttgtaaactatcattgagtatagtttggctggatataaaatgttgggtcatattttgctttttgttgggaggatgtttctataaacttattaatacagtcctggtgagtcagagaagcctttcttgaagaggcattgtctatgtttaatctctaatggatgatcgtcacagaaacatagacagaggaaatggttccaggcagaatcaatggaattgaaaaaaatcatggtacttctgtggaacaggtagttggatgactgtaatgcacaggggaaaaggtagacacaagttgacactggagaagtaggaggggatagagcaagaagaacttgacagaccgaggagtctggattgcttccaggacaataatctaaactgcagagtggtatgaagcaagaaagggatatccggttgtaactgttcatattaagaggggtgcacaggggtatatgagctttctcttccaaggagcctttgagtcctcatctctgctgttacagtacagacccagaatttcttatgtaggagagtaaatacatttatgaaataataatggaattcattttatgctagggccatatttctaactaccttccaatgtagcaggagatagcaagacttaaggatatcttagtctgactcttttaaaaaagaaaaaataaagaattacagttcttgggtatatagtcttgtacctctgtaatctgtgaactgtctttcttccaaggatcccatggaaacctttacaaatctagctgatattcactatagttctaaaacatttccttccttagctgttccatggggagttttctgtgatctcgcagtttcaagctactttttggggaccttccatacttcattcaggtgggagctgccatagttaactagtttcggagcacaactctttatcaaacactatatatgtaaaaaactgccatgttaaataccacttgttgctctttcatcttcagtcagctatatgcaaaataggtctttacaggcaaatttacattctatcacagaaacagtgactatcagataaccaactcccttctcaattcttttttttggcttgttttcttgcttacttgcttggttgctttctctctttcctagctgaatagcattacaggccacttctaaaataaactgggttgtggaatttccactgaaggctggagatgaaaaacatactcatttacactgtgtgcgaacttggtggactaacattggttaaactttgaaattaagagatttttttttcctgatttttggccatctctttaatgcaatttcaggtagccacatggttcttaaaaccccaaatgcagctatcttcagtaagtacaaaatgaaaatatgttgcatcctaacagataagaatttcttctttctcatgatgagagctgttacctaaaggagcaaagctttaatggggtctcagcttgattttgccatgtttatatacaaaagagatgaggcaagctttgttttgaagatgttaattgattctgtccaccatgctgtctaacagccaattccctgaaaatgtagtgatggaaaaaaaatctgttccaattactgtataagtaaaatgcttcccttccacctccactaaagaaaaaaatggcactcactgctcaggatctgagatcgacagctgattctgcacatgcaaagccctgctgccatttgtcatttcaggaactgctttatttttgtcaaaatggaaggaaaaaaaaggagagagacattatacagacatcagaattcaaatcatttgcaacctgatttgggtaatgaaggctcaaggcggagttgagatttagggactaaggtggttgtataagtatgtaacttcacaagaatctgttttagacccagagcagattaatagccagattacaatggcatttcctgggcttaggaatctcattatcctcttctttcatatttctttaaagtggaagacccttccactacggtggtgtcatttgaactcaagtgtcaggttcacatccttgtgccctgaagtttcaaagtgtccagttgctgtaggagctttttctattctgatattactgatactgagactggataggaagcataccctgtttagctgcacatctaaataatcggtaatgagaacatccttgacaaaactatcttgcggaggagaggtcaggtcttacctgcatgcctgcgaccttcagcaaacaaaggcagagatctaaggagaaaacaggatgtgggatgtttccagtggaccttggcagtggacttgctttgtgtttgcaatggaagaaggaactagaggggggataacctcatggttgtcttttcttctaaatttctaagacaaccagtgaagcttgaggccttttctccagaactatacaatctttgcctccagcaagctctgtttttactaataaccagattgtcaggtggaaaactttttctaagtggaccttacttctctaagtaaaaaaacaaatcccctgaggcatgaagacctccattttacacttttgttatatacttcacaggtacctgaaatggttctggacaaaggatatgatgatcgacaataaagaaatcaaagatcatattcataattataaccaacaaaaaataattctggggataatattgtcaaaatggattccactgcaaacaggcagtaggatttactttgacaatattctccccagaattattctggatatcactgtagggaccaaaggagagtttttcccttggccttccaaagattctctgaaaaatcaacttgcaaaatgcaaattgatcagagaaaaagtgtacacatttatttaatgtgtatacacaggagccttcaaaatgaagacccaaagatacaggagaaattgttcatttttatgcttaggttcaaccaagtgtggacatctgtgtagaaatatgattggacaaaaagggtatgatctaatggtaatggactgaggcagaaaacccagcgaggcctggccgtgtagactcttcttggcctctctgagcccacattcctttttttctgggtagggggcaaaactttttctgaaatgggggtcttatgacctataatcaaacaaggtagtcaggcagtttctgcgtggtcagtttttacacagaaaggcagagggaaattggagtaatatttttaggtcttatgactagctttgaggaagagggatcctagtttctatggctagcattggggaagaatgggactgagaaacaggagggcaggggaaggtcagaaaaacttttgcttctgaggccttcattttggggtattgtttactgagccccaacaccacctcgagggtttccaggtatattttttaaagaccttctaacaaatgttccttttatttatacatccatttaattattggtgctagttccaatgcaagacttaaaaaattccacttctaattccccacctgcatggagggcacaaatctccaactcatgatcagaatttcctgcaatccgtatgtcatttaatgaattccactctattcttctggaaatcgaacactctagaaacatagttttccttttagctgcaaacctattaatgctggcagccataaaataaatgcagtcacaactattccccacaaatgaatcagtcagctcagattaaaatatactctttgcatatcactgaagggctcttcctggtcagcttgtaagtgttctgttttcattgcgtggtattcattttccttttagcattgcacttgatttgtgaagtagtgttgactgctagattcccatcattaacattaagttttattgccttaaatctctgtcttatgttcactataaatgttttaagtcaacataatgctagcaagaggtgctgggttaacagactacagttggcatatgattctcatttggggcagggaattgtgcagggttattaggagctttctacctttttatttatttatttagggacagggtctcactctgttgctcaggctggagtgcagtggcacaatcatagctcactgcagcttctgacccctgggctcaagggatcctctcaactccgcctccagagtagttaggaccacaggcacatgccaccatacccacctaattttttttctttttttgagacggagttttgcttttgttgcccaggctggagtgcaatggcgtgatctcggctcactgcaacctccacctcctgggttcaagcaattctcctgcctcagcctcccgagtagctgggattacaggcatgtgccaccacgcccagctaattttgtatttttagtagagacggggtttcttcatgttggtcaggctggtctcaacctcgcaacctcaggtgatctgcctgccttggcctcccaaagtgctgcgattacaagtgtgagctgccacctggccccatatccacctaatttaaaaaaatttttttgcagagatgtgatcttgatatattgcccagcctggtctcaagctcctggcctcaagtgattctcctgtgtaggtttcccaaagcatgtggctaacattttttaatcctatacaatgttagcactggcctcatctagtcctaagaagtttgctcctaatcatgtattcattagaattgaggaggagaatatttcccatggtgaatttatatgttccgccaattcaaccaacatcaaatatttattagctgcataccgtgtgccagatacagagccagacactcaattttgcagacacagtatacctgctgtcctagagtttagactctaatgagggagagagataataaacaaggaaataagtgtatgtaacaatgtacagctagaaacgctgggaaagaaacgaacgtgagagacacttattggaatttaaatgcaagccactccactatatctactaggtgtgtgtgttacaaaatacaaaaaaagaaaagcctcctgggagggtagcaggagttaaattactcaaaattaagccacagtttaagacagcaaaacataacagaacccagagatgccccaaggcaatacaaagttaattatctaagtagtagtaacaagaataactgctggccaggcacagtggctcacgcctgtaatcccagcagtttgggaggctgaggcaggtggatcaccctgtcaaaactctcaggagttcgagaccagcctggcaaacatggtgaaaccccgtctctactaaaaatacaaaaattagccgggcatggtggcagaagcctgtaatcctagctactcgggaggctgaggcaggagaatcatttgaaccggggtggcagaggttgcagtgagctgagatggagccactgcactccagcctgggcgacagagtgagactctgtctcaaaaaaaaaaaaaaaaaaaaaaagactgctttaggatttaaggaagagtagtgtggcgggttagagatggtggttagaagaggctttctagaggatcccaaaatgatgaggagattgtggatggaaagtggtctcttaagcagaagaaaaagcatggaagaaatactagggtcagggaagataaaaaatattacgctgttatgaacaatcaattatatagggaaagtaaataatgttagaaaggtagtttaaaattttccttttttgcttatcatgttagaaagaatttaaaatagtggccaggcatggtggctcatgcctgtaatcccagcactttggggggccaaggtgggaggatcacttgagttcaggagttcaagcccagcctggccaacatggtgaaaccccgtctctactaaaaatacaaaaattagctgggcgtggtggtgcacctgtagtcccagctacttgggaggttgaggcaggagaatcgcttcaacccgggaggcagaggttgcagtgagccgagtttgtgccactgtactccagcctgggcgacagaatgagactccttcgccaaaaaaaaaaaaaaaaaaagaaagaaaaaagtaatggcagtagtagcaggagtagtagtagtaacagataaaacctatcattggcagcaacccaggcaagcatttatttctatatcttgctgatggggttgatggggttagcaattgctatagtctccctagtaggggatttaggagacagatgaaaaactgttagactatttacgtatttaaccaaaaggttccattttggggtattcatcctatggaaatagtcatgaaagtaggtaaagatttagttccagagatgtttattatagtttcttgtgaacattcttatttgaaaagaagataagtgcccaataatatcagattgattacagtacactcaagcggttagcacagatattcatcatagctgtacttgataacagttgttactattatcatgttcttgtgtgagaggtaaagggagataagattaaactttttgatgttataaacaccatcacatacttcaatctaatattttagaagaatatttaatactattttaggtttactgttgaattacatcaacagatgtttgtaaaacacagagcaaaaagtagagtaagttatacaagatcaatttagtcacatctctatgtgagtatgtttgcatcaaataaatactggaatgatatatgtgtgtgtatatatatgtatatacagtatattcaaatgtgaacagtgagtagtgagattacaggtaattttgattctttttgtttgtttgtttaacattatgttctaaaatgtgtatggtaaaaaaaaaaagtagtttttttttatttctaagactagaaaattatttagcaaacaagtggaccaaagatattacagatagcatttcctaaacatgatgtgccttttgtcatggaaaaaatggatgattttgttttcttcttcagcttaatatgcgatataataagctcagtcatcgaagagtgaagtgcagcatactgaaaaagtatgatttggtttcacacagatcttggtttaaatcccagcttcatctctcattaatgatcacatcctgaacaagttaatatgtatgtctcggtcttctctttagaaagctgacaatggggacatgtatgttaagtgactagcacagcgcttaccagaggaccattctcccgctgtagcaggacgagccgcagacgaaacctctcagacaccaaattgtaaaaggaagggctttattcagctgggagtatgggccagctactctctcaaaatccgagctctctgagtgcacaatttctgtcccttttaatggctcacaacactaaagatttcacgtgaaagggtggtgattgatttgagcaagcaggcggtacgtgacaggggctgcatgcaccggtggtcagagagaaacagaacagggcagggagtttcaaaatgttcttctatacaatgtctggaatctatgagtaacatcggtttctaagttatgagttgatttttagctactgggtttaggccaggcaggcccaggcctggtttcgggcctggcgccgggctgcctgtctttgattttacttccttgttgttttttcttaaaacaggtactgagtataaaacaatataaaacaatatgagagggtctctctcttccctcaccacatatgtgagaaaagagaaaatatggctaagtcatgtacttaactgagtattaaaacacatgtcttaccagaaatagcaatttttcaagtgtgtgaaacacattaaaaataaactttgaaactccaaaaatctttaaaatatgtaaattcatttagactttactagaaaaataaagttatctctctgaaattttgttgttaaatatttgtagaaaaggatgtaaagtggaatgaggtctagagagagaattttgatggatgtgtgtatttgagtcagttttcatcccactgaatctttagtcaaatcaaataaaaatgaaggtaatttgtcagcttgcagaatcatgccaagcaaagtcgaaaactgccagcctatgttcattctcatggtttgaacaaaccgaactccaagtaattcattgtttggttttgaattacttatattcactctgttgatcccattttgctttgaaattgtactttcatgtttattttctgtagtccagaatggaggtaggaggaggaaatatctggaaatacctaaaaacatcttgaacataccttaaaagtaacatgtttaggaggtccctgagttagttttattagcacctctgagtgttacagaaatgattgcaaatctccaaactcacagacatttgcccagagtccccacctataatcatgtgctgggagagctttagtataattattaggccagtgtaggacaagcagcagcgtgcacatagtcacatttaaagtgaggatttaaatgacaacaaaaagcaaagcaaaatgacactctatataacttgggattgtttttatttaaatcaaaatttaaaaaattttaattatacatatgtcctggggtatgagtggaggggtggctatggggatgggtacacaggcatgaatgaacacaggagactatgaaagatgcttcagatgccccccggacaaagatggagaaggaaatgttttctgtaccatctctatatgggcagttcagctttctctctgtgcttgttttctctgctctctctgtttggatttgaagaaaaagaggttttttgttttttttttttcctttttcttttgtctctatcttatttattttttaagtagactgtcaaaattttagctgtgattgaagaaaagaaataagacaaataaaattagtgggaaaccaaggagggggaaatgggattgccacttcctcttgtacagagtcagcagttttaatacctgtaaacaaaaagttctttgctggaactctttttagaatggaaaatgggatgaataggtacagcattatcaaaccatttgttgtgctccctttttcttgaattgatggaaaatatagaaataacacaaaccaaagttgacactcttgaaatgacttgtccttagaatttattgtttatctcacggaaacatgaagaaatgtcttcattaatgtttttgatctcagagccccatttccttttatctcccagcagaagtgttgcagtgtcctcacatttggattgagaatttagatagataagaattcaaccctctagtcccatttactgcaattgtatttaaataccagcttaattagctgtactcatcctccttcccaatcctctttgaagtaggaaagtcccattgcttccgtttagctaatgctatgctcataccctagtttttaagctttgtagaaagtacagatatgactgccccatgtgatctctaagaagtctagatatttgatccacagaagcattttgttccatggaggacgtggagtttgttgctttggatttgagcttcatttaaagcatttgcttatttttcatcttgcaaaattaatctaaatcaacttaatgaagggtagaacattgagatatatacctgttaatagtagaataatatgacatggcacagtatccaggtatggaaaaggtgaatagggatagtgttatgagatttttagagtacgttaattttataaagcatgcttatgggaaaagccaaacattgatgacatttcgcagaaaatgttatgttcaggtttggcaaataccaataaggtcagagaaaaagcaatatgaatcagtattaagaaaattataagatagtgtatgtctaggtcatgatctttagtatcatcaataaaaccactaaggatgcctcactatagctgtgagatgggttcggaccatgatatccagtttaatactatttgggagcagaagtaactagatatatttatcctatgatattttacacttattggacacctgttgaatctctgttggcttgagatttaatttgctaagagaaaagcaactgaagttactaaggtaatagacataacatatgatctaaaaattgagagtacgttaatcaaggggagtgagcagaaattattctcgtcaatcatccatgtgtccctctatatccttcacctttattgctgttagatttggaggaaattctgagcaatgttccgtgatcaggggtgaaaagtgtcatttctgggctgaggcagtttatagtcatttgcaccttttctataccactctctttccctgccttctcttctcaatgttctgaaaatcttgtgttctaaagggacttgaataagatggagatagagtgccaacccacattagcatttatagcatatatggagcaagaaatgaacacgtgtgtatgtctttatgtaagttacagatacttatctatgatacctatcctgactattgcaacatgttaagctttccactgataattaaatttcatatataaatagataattaattttgatatttaaaaaatgtaagttacaaaagcactatgctactctgagaggaaattgagaaatactaaagttttctttcatggagccccatagttggaccttcacaaaggcttcaaaagctagtttcctaaccagtaaaagtcagcatgagacacagtgggctgagataacaggcccctcagcctaggggtggtttgctgaagtaggaggccagagcctctggatgagtcatcttcagttgttacgacggcttactctgtggaccatgcaaataatatcattttcgatgtgttccatgatgcgaaaaagttagagaagtaccataggtctttgtatcaggcaccaatataaccacccctacactccagatcttctttccccatactcatttctccactctcctccaagtcctgcctcaaacgagttattattttcacataaaactgagaaggaactgttgaaatgactgacatcttcagcaaataaaatagttgtcaaattaataaataaatgtcacttgaggcacttctgagcttctcaatatgtcttcttttggaggactatttgttggcataggagaagatttcctagcaaccctcaaaatctttccaattaggaacctaaattctattcccaaaggttatgatataaagaggaaacttgaaaatttgtaactgaactctattgaagtatggggtatttcaattgagtaagcccaatatttacctgcatcacaaaaaaactagattttaataatttcttatcaagtgtttatgccatgtaccatatttaacatatatttactcattagtttttcaaaattcttatgaaatgatattgtttttatacccattttacagatgagaaaactgagagagaccttaaggagctttctcatgatgcatggctagttaatggcagaactcatgttaaagcaagcagtccaaccctgcctgggctcttaaacagtggagtctgctgtctccttttaataggatgaaggtgaagttctcagcttgatatttttgtttcattcagtgcaaagtgtcatcttctaccccagtgccaaaaattacttcaaagaaaacagctttttgactaccgacagttatgtacaagaggtgtgatttggggttttaagagcttactttgacacagctcagatcccttttttggtagtgaaaattatgctgttatctcctaaaaaacatcatctgctctgtccccacctctttaatttgacaggtgattccatatccatgtaagagcattttggtgtctgaaaaacaataaaaatcgtcccagtaaacccatgttctattcaaaaaattttggcatattgattgtctggggtaaggttcaaaattgcataaacttccttgccccacaaatcactttgttgcatcgacaataataatcacaattattgatagtaaaataatttggccattctatgaatagtaaggactgcacatgttaaaaagaggcaaaagaatggatagatgatcagaatccattctcagtaaccagagctaaggaaacagctcaagtaaaaacgctcagcttacttaatgctctatagtaattaatagtaattgataacaacttgtagcaattaagatctaatgcacttaatttgcaaatgtactccttaactttgaatacacttttttctctaaggcgaaagtctagaattggagactcttggattcttcttcccattcttttccttcttccttggaaaaaatcagaaacaatctcgaaatgtggcctgttggagctggaaaagagcttagagattgttctagtacagttgtgtcaaactacaggtgaaaactttgaatcttggagaagaccactggtttattccacctctctagccatcggcatgaatgtctattggtatacttggtttagctgcccaatttatggccaagactgggacatgatatggtacaaaatatggtgtttttgtataaagagctatctcttgttccttcgttgtaaggggactgagggcacaagagttctaagactgataatcccatcaacttaatatattaaaagaggttttatatctaaagcatccaacacagtgtctggcctagaggaggcactatatctatagaacaaataaacgaatgttcgaacatagcctctctaaattctatttgaatgacttaacacaaagatcagaaatttgcatagctgtttgtgttagccctttaaaacaaaactctcctaggggaacatatgtgaattctattcagagtttaaaaacagattcatgggagagccccaaaccaatcaaaaacatggcaaggtttaaaaaacaaaaaagacaaaaaacaaaccagaaaaaaaaaattatgaaaagaccctgcctgccaagagtgacttgtttgcaattgaaaacctggagatatgagtacataatagaaacgtggcaatgatcatctgggcaaaaacacaatttgtatgacaatgaatcaggaaatgtcctggaacaccagaagatgaaaaacctgggattttataaggcacattcaagttgctgcgcatgcgtcacaccatgaattttcctgtggtctgacatcctgttaaaagcattggtctctttctaaacattggtagtagaagtgtaccacaacaggcaaccttacatttaaagaaagaatgtaatagatacctgtggaaactgtcaaaagtgtcttctagagctatttttgaggtctcttttattccttcattcctgatctgaaattcattaaggctaagagtgccccttaaattacgttctgctgtatcctggaggaacacctgaagaagttaataataaaccctagagattaggcaagtggaaagaattatgaaataaaacaaagcaaagaaattgtgtaaacaaattaattaattgtctgaaagtgaaagcatgtttgtaattttgcccttgtcaaagaaaaattggagttcattatgctcgctgactgatttaaaagcttcttcccgcgtagcatcaccgggagaatgagtgtgttgtgagtgcaaagcatggatcggttgcagcatcaattaaaatagaaattcattattgaaacctccagagtaaaaggtttgtgctttctgctttgaggatgggaggaagcttttcttttcttatttttaagttttgtttattttttttctctcctctctccaattggtataggaacatttattttggatttccagtagcaggcattctacctttttgtaataaattatattaatacctgttatacattgagcacatgctatataccaggcattctatatactttatcatctttaaccctcagagcaatcatgtggtgaaaggtatccatcagtatcacttgaggaaactgaagctcacggaggtaaaattgaacagctactaagtgatgatgccaaggatttaacacaccctaggtttgtctgactaggaacttctggtctctccaggacacaacagagccttctaaggcaggtttactgtgttgagttgggtttgcccctataacaaggctatcaaagatatatgtgtgtatccaggataggcattctgtattcagttacgtgttggagtgctatcgagagcccagtgggattataggtggaataagataccttcaacacagccatctgctgcatatggtgacccttgtgctctccaaatgagcagaagctcaaccagctttgctgaaatgtgtttgatgagaggatggtgtgttttacttttgtgacatctttccccagaggtggttgcctgaagagttgaactttagagaacaaaaagaaagaaatgtaggatccatttatggtctctcctagaatcatgccatatgttggactctatatggaaagggaggaggaataaaatgaagaaagaggagtacacagagcatggaaaaccataagtacgtgtgatccatgattacatcattgcaccttgcaaaaacttgttgattttagctctggggaggatgagtgaaaatcatggagtcagagcagaatcatgaaaagagattggttttggagccaagggaactcagatttacatctggtcacaacattttttttttaatattccctttttttattaattattttttttttaatttaagttccaggatacatgtgcaggatgtgaaggtttatttcgtaggtaaatgcattccatggtggtttgcagtacctatcaacccatcacctaagtattaagccctgcatgcattaactatttatcctgatgctctctctccttctactccccagcaggccccagtgagttttgttcccctctctgtgtccatgtgttctcattgttcagctcccacttataagtgagaatatgcagtgtttggttttctattcctgcattagtttgctgaggataatggcttccagctccctccatgtccctgaaaaggacatgatcttattgcttttaatggctgcatagtattccatggtatctatataccacattgtctttgtccagtctatcattgatgggcatttaggttgattctgtgtctttgctgttgtgaatagtgctccaatgaacatatgtgtgcatgtatccttataacagaatgatttatgttcctttgggtatacatcttgtaataggattgctgggtctaatggtatttctggttctagatctttgaggaattgccacactgttttccataatgtttgaactaatttacattcccaccaacagtgtaaaagcattcctacttctccacagcctcactagcatctgttgtttcttgactttttaataatcaccattctgactgtcatgagatggagtctcattgtggttttgattttcatttctctaatgatcagtgatgttgttgagctttttttcatgtttgtcggctgcataaatgttttcttttgagaagtgtctgttcgtgtcctttgcccacttttttttttattatactttaagctttagggtacatgtgcccaacgtgcaggttagttacatatgtatacatgtgccatgttggtgtgctgcacccattaacttgtcatttaacattaggtatatctcctaatgctatccctccccctccctgcaccccacaacaggccccggtgtgtgatgttccccttcctgtgcccatgtgttctcattgttcaattcccacctatgagtgacaacatgcagtgtttggtttttttgtccttgcaatagtttgctgagaatgatggtttccagcttcatccatgtccctacaaaggacatgaactcatcattttctatggctgcatagtattccatggtgtatatgtgccacattttcttaatccagtctatcattgttggacatttgggttggttccaagtctttgctattgtgaatagtgccgcaataaacatatgtgtgcatgtgtctttatagcaccatgatttataatcctttgggtatatacccactaatgggattgctgggtcaaatggtatttctagttcaagatccctgaggaatcgccacactgacttccacaatggttgaactagtttacagtcccaccaacagtgtcaaagtgttcctatttctccacatcctctccagcacctgttgtttcctaactttttaatgattaccattctaactggtatgagatggtgtctcattgtggttttgatttgcatttctctgatggccggtgatgatgagcattttttcatgtgtctttcagctgcataaatgtcttcttttgagaagtgtctgttcatatcctttgcccactttttgatggggttgtttgtttttttcttgtaaatttgtttgagttcattgtagattctggatattagccctttgtcagatgagtagattacagaaattttctcccattttgtaggttgcttgttcactctgatggtagtttcttttgctgtgcagaagctctttagtttaattagatcccatttgttagttttggcttttgttgccattgctttttgtgttttagacatgaagtccttgcccatgcctatgtcctgaatggtattgcctaggttttcttctagggtttttatggtttcaggtctaacatttaagtctttaatccatcttgaatatcttgaattaatttttgtataaggtgtaaggaagggatccagtttcagctttctacatatggctagccagttttcccagcaccatttattaaatagggaatcgtttccccacttcttaatggggtggtttgtttttttcttgtgaatttgtttacgttccttgtagattctggatattagacctctgtcagatggatagtttgcaacatttttctcccattctctaggttgcctgttcactgtgatgatagtttagtttgccaatcgcagccacttttaacactgttactctgggtaggttatttggtctgagtgtcagtccctccttctgtaaaatggggggaattcctgaaggacagtgttaggatgaaatcacattacttataatgtcgaattcctctgtcaatgcttatatgcttctcattcattatttctaagtcaagcatttttaaagcatttaacatgcaattattcatttttgtttataaagtgaccctgtgaacttatccctattttacagttgatgaatctgagacactgagagattaaataacctacctaagatcatccagctataaagtgatcgagacaggttttgtttgttggttggttggttttgagatggagtcttgctctgtcacccagcctggagtgcagtggcacgatcttggctcactgcaacctccacctcccagtaatggtgcaattacaggcatgcaccaccacacctggctaattttttttttgtatttttagcagagactgggtttcaccacgttggccaggttggtcttgaactcctgacctcaaatcatccacccacctgggcctcccaaagtgctgggactacaggtgccccgctcaagacagattttaaacctagcattcttgctccagaattcatgctgttaatcactgctattctgcctctctgttgactctcagaacctctcttggtcaaagcaagaaggtatcgaacagacttcctgtgctgttttataagctgcctcaaatccttccaggacagggcaatgtctatataaatagatgttataaaaagtataatctaggccctatttatttttctctcagattcatgtctaattcataccagttgagccttgctatttgagtttcacttaaaagcattctgacatagctcacctcccctctttctcttatattgctacccataaggactagagaaaagatggataacataatcctgagtctatgagttgctagaaattcctcattataattgtgtgtcttctggcaaaaataaataaataactttctcttttaaagccacttataggagacaatgcacattctgtgttttttctctgtggctgtgcatggacacagactcttctgcccttctcttgcctgttccttgattcctcatgtttctgtctggtgcctacctgagatccaggtattcctctttacctcgtcgtcttgctattttttctagggacttttcttctcccaaagttatgttgaaacaggcaaaacacctagaaatgggtcatgtgggtgagtagaggggagtgagaaggagagggaaaaaattcccaaagctcatattaggcaattacagttctaatgaatagaagcagtctattcaggcttctggcaatattttatgctcacctagtgtagtctgtattcccttaaatgggtaaaagatgccttaaaaagattgctttgaaggatgaagagacttgaaacaactctctgaacaaaagaacttgtttattcattcatttattcagcttgcatttattatgtgctgggtattatgcatataaatattttcttaagttttgtttttaattaacacataatagtatatatttatggggcacagtgagatgtttgatacatgtagacattatgtaaaaatcaaaccagtgtgtttagcgtattcatcacctcatatatttacctttttcttctggtgagagcattcaaaatcttctcttctagctattttgaaatacaacaatacaatatttttatccctagtcaccctgctgtgcagtagaacaccggagcttattccctccatttaactgtaactttgtacctgttgaccaatcatggtccctattctaaaagtgtcacagcctaggtaggttgacaaacaggtaaatcaggattacaatacaaaagtaaaatagcctggatcaaggaaagcacaggttgttatggaaacacaagagaggacatgtaaataagattgagggaggttcaagaaggcttttcaggagagatgacttttgaactgagttttaaagaccactgggtagacaataggagaaaaaaacatttctggctaagaggttagtgtggatgagcaagtggctctgtatagctggaggagtgtctgaattttccaacatgaaaaggaccacaaacttggtggaatcaaacaaagattttttttttcttttgtcacagttctggaggttggaagtccaaaatcaaggtgtcagcaaggctggttccttctggaggttctgaaaatgaatcccttccatgcctctctcccagcttctggtgctggtggatgcatcactctgatctctggctgtctttacattgccttctctgtgtttctccttttctgcctgtatcttctcttcttctaaagacacttgccaggccaggagcggtggctcaaacctgtaatcccagcactttgggaggccaaggcaggcagaccacctgagtttgagaccagcctggccactgtggtgaaaccctgtctctactaaaaatacaaaaattagccgggtgtggtggcgcatgcctgtaatcccaacgattcaggaggccatggcaaaagaatcgcttgaaacccaggaggcggaggttgcagtgagccaagattgtgccattgcactccagcctgggcaacaagagcgaaactcatctcaaaaaaaaagatacttgccattggattcagagcccacctagataatccaggatgatctcatctagacagcctttactaattccatcttgcaaagactcttttttcaaataatgacacattcatacattccatatcttttggggagacactatttaacccactacaaggtataaagatgagctataggcctgatgaggtaggaaagaggcagggcaaggtctcccagacactcatgtacctgacaaggtgagtctcaagagacacaagaaaaccttggaactgtaattgtgaaattgacatctatctctggaaaatgactattactcctaatgcctctagccaaagactatcagaaacccacctgtagctgatggagttgcatttgttactcattgtttcgatgaggacacacatcatgaggaaccatcatgtctcagctagagggtgttggagaaaacctattgtaggaatttgactttggttgggtaatatgaggaagcgtccaagaaagcctagttcactttagattagatgctgtcagaaagcagaggcaattctaaaaatgtgtatcttgattaaatcttctctgtatggaacaagagtgaggataaagttgtaaatgataaagaagtagcaatcactagccaagagaggggactgtttgctattttgtgggtgaagcagtgactttgtttttctgtgcattgattaaattaagatgtagctttgttttgactcagtttatcatggtctcagagtgacttcttctgagattggtattctgtgacattgctcatgtgcaatagaagaataacaagatctagccatgagtgccaggttacgttccagatgtcacaggctgctcttttgttttgtttttctttttcaataccaagtgataagaatgagcatgcctaaaattccagcagttgtaataaaatacatcaaccaaaaggttcagactgtcctgtaagacccataataagagtctcaatgtgttcttaaaagaacattctttcttagcctacgtgaacatccttctctagacttaaattacttctgacccacatgttgggccgtatctattttaaagacaagaggagctaactgcaaagttccttgtctggtaagctgtttcatctgatagttgtaatagcattttctcccgtctcactgtagggcctaaccccacaagcatccttgtgaagaaagaccccacagtcctctttttaagctttctccctccctttcctggggtgccttatctatttaaatattagaggtgagtcaaatgtaattctctttaatgaaaaacaaacaagtgatagaaccctaaacgctcttttggcaaagatcccttcagaacaaacaatcttcttttaaaagaagtcagagctaggaaagggccacaggagagcagggatagccaactaaactatgcagcaggcttctctgaaaaaaagtgagtgacttttttggtgtggcaagaaaaaaaaaaagtaaagtttgatataactagtagtccttggaatgacaagtgacaagagaggtctcttccctccctatagtcccaaggagaaaagggctctgtaaaattaaaggcacaggtattcagttgaaaggacatatttttctcctctaacttataattagcctgcgatactggcttctgtaggctcttatgaaggcaaattgctcaggacagtgactctggcgatgtcagtcatacaggcaagcactgggatatctatcacaaacacatgccagttgtcatcttccaaggcatcacctgattgccaactcaggtcaggaagaaatcattcctctttcttcttctgtgatgttacttatctgttgcaacagaggagagggttagcacctttcatgacatattccagcatcctgttaaattgatcagaagaccaattgcacacagtgtcttctaccattgagattggaaacacagccaagggtggagatggtcagtgaggcttcccagtgtcttgcaagttccaggtcagttgtttatgcttagagtcccctgacagagagatggatgtgttagcaggttctagggcctgtggtttcccttgtggaaatgccagtggaccatgtgtgctccttgggtatcagggtgattgggcttgggttggttgtggccacagcatgaactggagagtcggctgtatttggcatgacaaggttggcacaggccagctgagaccttgaaaaatttggagctgatgcagaggtgaataaacacattgaaaacagaagctgcaacctcaaatttctacagggaccagacaggtaatatgcctgagtgaagcaggccaggtggcaaattgtacagtgcaggccccaatcaaagtgcacagtggccactcagctgccactggattataattgtgtagagatgtgagtttagagttgtcagcttttcaagagaagccaacagtctggtgtgtatgttaaatcccctgattctggcatctaattaatgcccttagcagtccaaaccaaacaatgtgtgagctgccatttttgcaaccttgagctaatggtgttaacgtccagtttctttgtttcataacatctatggaatggctttgtgaatgcaaatgttgaaacattgtgagtctcatccccaacagtgaaaataaatacaaaatttaggcaaaaaataaaaataaaaataaaaatacttcttaaatgtcacagcgcccccatggggctggctggggcaacaaattaagggacacagctgagctttcgattctgtcagtaactaagtagtaatggtgcctcagggggtctgagtcattgaacaagcgctacaggatagcacaatactaggtacacaaagtaggcgagcacaggctccctacctttgaaaagtttataagttcattaacagtattatgtttccatgcactggagcattagaggaaaaatgccacgataacatctaaacaagagtgcagtgggccctgagaagtatgatgattctgtttccttctttaaagcatctcttcttaataatgtgcagtagtagagagaatagaaaagcagcatgatggccatgtgacttgctggatggatgccatttctgttggatgagattggacatcaataggtaaaaccaataagaggttgtgtgcattttcagattctggaattctggaatctatgacatttttggaaaaatagctctcctaagacactggttctaaatatagcagtgggtttcaatagttctatgaattgaaatcaatagtactaaggagcgaagagcctagatcactctcccaagaatcattgcttagatgagtggttctcaaagtgtagtctctggccaccagcatcacctggcaacttgttacaaacgcatattgttgattctcattccacaactattgaatcagaaattctgggactgagtcctagcaatctgtgttttaaacaagccctccaagtgatttaatgcatgccaaatactaagaatcactgttatccttggaagaggggaaagctcagataacccacaattgaggtctagagatgttcatagtctcttctacaagtaagtcttaccagtgagctatagtagagataaccaagatagcatgtagctggaggagctgttgcttatttgactggattttttggtcattttttctttctcacttatgtgtttgttctccacttgttttcaagccccattgatttctgtattagctttctattgctgctatgataaattaccacacattttcatggcttaaagcaacacaaatttatgagagttctgaaggttagaagtccaatacaggtatctctggataaaatcaaggtgtcagaattagagcaaatcccttcttggggcctctcgggaacaatctacttccttgctttttccagcttctaaaggccacctgctttctttggctcatgggcccttttcttataaatgcagatgttgtttttaaaaatgaacaatgttaggctgccttcctcgaggggctgtctctcttgttctcactcttctgcctccccttccacctttaagtatcctgtgattacattgggtgcacctggatgataggcaagctccctattttaagatcaactgattagcaaatttattcccctgtgctatagaaggtaccatattcacatgcttcaagaattagaatatattgtatctttcatgggggaggtacattattctgcctaccataagagattgtattcggagggcttgtttttttttttgttgttgttgttttttcaccaggaaatggagcctggtgaaaaatgtaatatatagcctcttcctccacactactaaactacctttctgtgtcctacagagactgtgtaatattcactggtgaagacataagctttgtagtcacaaacctgagttgacgttcctactctggcacttactagattgatatggtttggctgtgtccccacccaaatctcatcttgaattcccatgtgttgtgggagggacccggtgggaggtaattgaatcatgggggtaggtatttcccagggtgttctcctgatagtgagtaagtctcatgaggtctgatggttattataagggggagcttctctgcacaagctctctttgcctgctgccatttcacgtaaggtgtgacttgctcctccttgccttctgccatgattgtgaggcctccccagccacatggaactgtaagtccaattaaacctctttcttttgtaaattgcccagtcttggatatgtctttatcagcaccatgaaaatggactaatatatagatgtaataactttttgcaagttatgcaattttgggccatagattcctttattctgaagtggagaaaatactttccttatacaattgttatgtttacataaaataaggtgccagatacatagtagaaataaaataaatgatgttactacttcctaaaatcctaaaagtttcatttcagattgctgagtaaacccagttaaagaaaccagcctctgtgttttggtgttgtcattaatgctaagttacatttccttagggtatctgcattaagcaaatgtaagatgtttgagtttcaaagatgaacaagtgacttgtaagtgtaaagtggtatggctgtttttaataaataggtaataccacccttttggcgggtagtagagaaaagaagatgagtttttagaaaaagactcagagttactcagaattaagaaaatgaatccttactgtcaatatgagtctcccaactgctagcgcaagtggtggatagattttcttttccactagatttacttcctgatatacacatttatcactcaagcatggactgttcatcaagtcattttccatctataaccccagctgaagcctgacaggttgtgtgtttattatgtactcttaaaaaactggagctcatttgcccctgctgcggggagagcagactcagacagatagagggataaggtcattcagtggaatgcccattcactgcagtcaagcctaaataatagagaggtgtaaaacaaccaggaaaagctctgattattgccagaaatcaaatattgatcagatagtcccctaacttaccaacttccctcttaatgatctgattcccatgtattcattcatcagttagttgagcccctcctatagaccaagccctgtgcatggctataaaaaacagtatgtccatgcccacttccccctctacactcaatctggagccatgagaaattaaataacctttaatttctgaagatcgggtgctcttataaaacatcagtacttataattgtatcctgcagtggaaaattgtgcaataatctttttctgaaggcatggccatgaattgtactatattactccatctatcttcttttaacactaaacaaaatgaagagaatacattgtgcatggcccctagaaatttaccttcaaatagaaacaaagctgctaactccacacacacatgatatgctgaaaactgaataaatattgaagaatctaaattcaattaattagcaagccaaatcttgcctcaaattatgttgacattatttattcctttgttgattaaatgagttgcctcttaagccaaaagagaagatcttaagctcttgtttcttcattccaggtctcttctctccaaggaatttgggaaggagcaagcacagcagaggccagttttactgcatgctggtgctcagagggaatagggttcatagagtagaagacagtgaggagagaaccagtaaggaggttggggagctggatagcatttacagcatgggttcattgattcattgggaggcttataaatttcctatgcatagaagcacctgtttttaaacagagacatgtattcaacacatgccttcgagaactaattggaaagagtctttgatggcctatcgttttgaatttgcatgaccagaactccactatccatgcaaacacagtggacttgctgcaattgtcctttgacttaggcaactttaacaatgcaggggaggaggggtgagaagaggctaggagaggaagtgtcagtgggagaagccaagaataattgaagtagtgtgttatttcttttttttttaactattaattttttttattattatactttaagttctgggatacatgtgcagaaggtgcaggtttgttacataggtatacatatgccatggtggtttgctgcactcatcaacccatcatctacattaggtatttctcctaatactatccctcccctagccctccacccacctgacaggtctcagtgtgtgatgttcccctccttgtgtccacgtattctcgttgttcaactcccacttatgagtgagaacatgcagtgtttggttttctgttcctgtgttagtttgctgagaatgatggtttccagcttcaccagtgtccctgcaaaggacatgaagtcattcttttttatggctgcataatattccatggtgtatatgtgccacattttctttatccagtctatcattgatagacatttgggtttgttccaagtctttgctattgtgaacagtgctacaataaacatacatgtgcatgtgtctttatagtagaatgatttataatcctttgggtatataccctgcaatcccattactaggtagtatggcatttctaaccaccctttccttccatgagcttaggcctgggagttgcagtgagtgggagccttaaatctaccaagccgcaaatttctgtgttcctgaggcctctcaaggcatcaacatcttgaatagaaaataagtctatccttaaagatacagtacatttaaagattaaaaaaaaaaaaaacaaaaaaaatcatgttccctaaacacaaataacttcatctgctgcccaagcaaagaaacaaagagatgtctactaaaggcaaaaatgccaatgtcgtgcttcctgagcacagacattgcactgcacagaatggaccattttggagactttcaaagacagttttgactcagtaatctcctatgctgactttattacctaactgtgtcctgtggaggattaggtgatagtggcaggttaggtccatgggagattggattccactgtgatcagcaaacagaataaccagcatgtgtgaagtgacttttgtcagaggagtgatgaggagtgctctctgaattcagtgttttccctctttaatttttgctaatcatgggtcatttatctgtgagctactgcattgtttccactgcctgctttccaaccagggataggttttatctcaaaaaacagaagacaaaacctcttaacctaaaactaagactccctctgggagattccaaagagagacggctttgatgtaatgggaagggagctgatttagggtctaataaagtcttctaccagctgtgtgatctttggcagtttctagttccctaggtactatttgcctatctatagaaatggggttaacagcacctactgctgaagttggtatggacataatgagataccatacatgtaaggaaatgaaaagtattccacaaatactccttccctgagcttgttccttcctttcaccaaaacacacatattccatctttcaactctcctgctctacacgtgtatgcttgagtttagggccctggaataagcaatcctgggtcaacatctgctctgcaaacatcaaaaagtgtgagcaggggcagcctagccttggtattgatgtgtttcccatccacagccacattcaccattagacccagtattagtcactgggtccccggggccagcatttactgttgccttcaaaaatgcagactcattactaacaaaagtggtatgtccattattatgacctatttagtggcccagcaaatccccaaattctattgagccacatctgtctaccgaggggctctgcggttgattgtctgagacggatctgcttgcaaagaggctgatttgggaaagttcaacagccccacttagttgctctgtgacatcctgacttcctacaggttacttctcatattgttgggtgtttgtttgtttgttagtttgtttgtttgacagaggtctcactctgtcaccaggctggagtgcagtggcatgatctcggctcactgcaacctcctcctcccaggttcaagggattctcctgcctcagcctcccgaatagctgggactacatgcacaccccaccacaccaagctaatttttttattttttagtagagacgaggtttcaccatattggccaggatggtcttgatctcttgacctcatgatccacccgcctcagccttccaaagtgctgggattacaggcatgagccaccatgcctggcctcaatgttgtgttttaaagttcagctggaagatacccttattcctaagaaatccactaaagaaaactgttcttccaggagttccatttcattctctgggaagggtccatcccttgttcctgttccctttcctctgaattctataggacatatcacagcaccttcttgctgcctccttgtttgtgtctttcattaaactgtaagctccacacatgcagggactgtatttattttttcagagatgtgtcttcaacactgaatgcaacagtgacacttgacaaatatttttcaaacacattgaaatgagtttgatcaccacctgggcattcacagtagtccagaggtcccctgcactgtgagtgtgactaaagctcaggaaagtcagaaaggccagccaaggaaggaagatgctggcaagactcggaaagtgcaggagtgtatgagattgaatcacctggacaggggcacccaaacaaaggcgtctgctggctacgtgactttggttaagttgctgaacttctttgtccacagtttcctcaacactaaaacaaggagtaatcattatatctactttatagggctgttctggggattaaattagttaatatttataaagcatttaaaattatacatggtatgaaatgagcacaaataagtgggatgagggagacataaacaaaagttcctaaagtggaggttaattcagagccaaagacattgcctgggcattagaagtagtcagacatgaatttgagtcccagctaaggcatttatcaactgggtcggccttgaagaagccgcttgcattctgagtcttgctttccatagctatgaaatgttctcaatcacagttatctcccaggattgttaagagaagtttcctttaaatgttcagaatagtgaatggcatttcttatgtgcctaataaatattaactcatctactgccatcccttcctttctttccctctcattctttctcttttcctggcccataactttctgctcagaactggaaacatctttgaaggagggagaaggagcatgagagtcaggggcttgtttacaaaacaaaacatggaaatagtaaaaacaacaaatctaatagtctctgaaatgattttgtctcccactaggaccagaaaaagcagcagaattttatgttaatggattcggtggaaaatacggctttaatgaaacattgactatgattactctgttgtcatttctctgaatttctggtcctctttccatctctcttttaagaagatctgaatggttatttctcaacacaccaggattatgttttcttcgtcaagagtttgaggaacctagggtgcagcttgagctgctgagctgtctgtctttattctgacaggcgtggactccagtgtttagctcaagccccagggactggcttttgaacagcagctgttctcagtgaaactgaaatgcgcagaggggaggggaatagtacaccctgggaagtacagggagcaggtaagttgttttgctaatacatccctggggaagtttctagtgtttctgggcatggctgagcgcacagctcataaaaaatgcaccagatcattgttggcatttgatgtcagaagaagctacagtaccaagagacatggactgtctggtttcctgtgacatccaggtgacacaccaggtttccactgcttttcgtcattagcccagatgttcccagttacttggacagagagccttgtagatccctgtatatggagtcttccttcccgtggttcattagaaatggcaaagccaaactggcagtattcttcaatttgttgataagagtgcttcagtgcatgtatttacaaatacacattgttgttttcaatttgtttattcagtgaatcaaaatagcaaaacacattaactataagacaagagaaggataaggaagtaacatctattgggtacctgctatgttccaggcaatgacagagctgcttgacagaaaatgtttaatgtcttcctcattgtagctacatgtggtgtttcaggtatgattactgcatgttacagtgggaagtagcccagcattcttgaaagagtatagggtcctcactatctgtgtgaatttgagtagttacttaaaccctctgagctttattttatttctgtaaaggaatttaacaaagtggctaatagggtgtgtagggatgaagggacttttaagtttgctgaaataaactggaaatagattagcaggagagaaggcgtacaaatttattaacatgcagatgtgcacaggatccacacaaaatgggaagactcaaagaaaggccagatagttgaaggttaaatacccttttcataggggagagggaaatgggggacattgccaattttagagaaagagtaaataatttttagaggagatgagtggcctggaagaacagatgatagcctgggacaaagttcctctgcactatggggcaggtgatgacaagctataggaaagtgagggacagaactgcgcttcaaacaaaggttgttttattatacagataaagtctctaaggtaatggcccttagaagaataatgggaagaacaggtgaaaactctgtctgggtgtgttgtgggtgccctggaggtagagacttcttcttatctctcctgcatcagagttaatcttctctggttagtgtagatttcagggagcggtcaaagaccattgcattccttctggataaactttcttctggtgagagaacttcagagagagcccctccctacacttaggaaaggaatgtggggggtggggaaagctgtgcaggagaaagtcagagaaagaccttggttctgaggcctttcaaccttctttgttcaaagcaatcagtatgccaaagtaccatattttggggtatcattttctgagcctcaacaattgtcatgaagattgagtatgattgtaatataaagggctaacatttttacttgacctacatgagctgatcagtactgagagctcctcttacaagaaatggaccagagagggagggaaggggaaggggaggaaagggaagggaagggacaaaaagaaagaaaataaagaattgaggttcaggaaggttgaataatttaattcgcccaaaggcttacagctgctaggacgttcagccaaaaattacacccaggtctgatttcaaagacactaaaaccactgtttacttatagctacttagtgcaccccatctcatcccacccaatgccacctaactcccacctctattgtgagataactacatgcacgcactcatttggtaagtgggatcctggtgcctatttgactgacatttgagagttagcacatacaggtggcacaggtggtatctgcacagaaggaggaaggtggtgctgacacctctggatcttacacttgggtttagaacatagctggtcactaaagccacagggtagtggcagaacatttggatacatctttaaagactcaattagtatcccctcactgagtccccatcttattcattggttagccccctagactgaactgtcaaaaatgttctaagtctccttgtgttctctttatctttgtttttacaatcacaacacaataacaggagatactttttaatgaatgggcaggaactctccactgagatgtaaacatgttatactgggaattctgctgcagggttaatttatgatgatggagtcatctatatcatagctgaaagcaaggctttggggaagtgaaacccaggaaaggtcagttgtaatgcgcattgtctatattttaatgtaaaataccaattttgttgggaaaagggtggtcgggaaagaggtttgatccaaaaggttggaagttggggaaataattcaaaaagaaaactccaaataaacaacagagttggctggtcagttagccaaaggacaccggaggattcctgaaggtctgcatgtggtgagcacaaacttggtagggaaaaggcaggaatctgggtggggagaaggtactagaattcacaaggaagactcgtaaaatggaaactacggttgctgaaacacgttgtctactctattaattttctgccaaacatttcatgtgcttttagttcttcattgagcatgacatacttcaaatactcaaacctatttccttcttgtaggaatagctaggcatttcctcccacggtccaaggtgagactgaagataagtagaatctccacacttatttgtttactttggtccagactatagagtcaggttaaaagccatctggggaaatagccagtagccaatgcttattagcgtactacttgggtaggtgggaggatgcaagagctgtcaaacagcagccatcctgatgagaaagtgaagaaagccagaagcagcgtctcttctgtggcagtcacacagggtcccttgatactcagcccccaacatgagattgcctcttaggagaattctagaggttaggctaggcttgagacattatagagaacaggttacagcaccccatttttactttattggtaactgagaaagtaagatatattcctagcctcccagtcttagtagtaagaggtacttttaaactgttaatttttatgagcaacacagtggtatggccggcccttcctcctccttcagggagttcatttgatgtagtttggttgattcccatgcatgtggaatagctatgacatcatcaaattaagtgtacactatgtgctaacaattatcggggtgtcaagagtgaaacattcaggtcctattggcagttctaataggtgaatctcatctcactgttttatgtgttcagtgaagtaaatcttcagtaagtctggagtagctggggaagccttcgccaagaggtgaggtctgagctgggccttgagcattgctgagatctgaatgggtggaaaacagaagagaggtcattccagtcaaaagcaagatgtactcaaaaaatagcaaggaaaaacagatcacctggatgagatagcatttggggaagggtaagactatagtatggttggatttattgaacaggcacagtgtcaggaatccaactggctactttatatacactacttggtgttttatcctgcaaagtaaccctaataaccagtagcatttgctgagagtgtatgtgggtagcaggcaatgtatgagatgccgggaatacagagaaggatgattcgatgtttgccctcaagacctcagaatgtaagtctaggatatagtaacaaaataagtttattctagtataataggaatatatacactttaccaaggaagcatagagagcagaaccatttgctttgcctgctagatttcaaaatgacttctcagagatggtgagttctgagctgggtggtgaaggatgtgtaggagtttgtcagataaggagatgaaacaggcattccaggaaaagggaatagcaagttcagagacttggtatagtcctaaattatgtttgtcttcatttcagctagtgctatttcattgttgctggagataacacacacttggattccgttacgtattttcaccttgccaacttgctttgtttgcagaccataatttctgagtttatctctacagcaggttttcagccaaattgctctactaaaataaccctaaaaatctatcacctctgttttctgctgctgtcactggctgtttgtgtccttacttttcagtcaacctcaatggagactggaaagagaaatacaaattgccccagaaagagaacacaggcccctctcttcagcaacagggtgtgagtggatggggaccattatcacattatctacacagacaccgttttaatccacattgccaaggaggagaggaaaatgcatggccttcacagaacatcattaggagggtgggccattgtgcagcatctattgttaatgtcaatacctacaaacatgtccagactcttccattctttagcatactcattctctgagtggtattttatgtgtattattctctgagaggtaagcacggacaagtataattccatttttatgtaagggaaagctgagtaaagaagatgcttaaagaataggtggatagaaaaatgaaatgacttcagctcataagcattttgagtacctattatgttttagtcattatggtagaaacatggcaaatggatataaacaaaaaacatataattccatgcctctgttcagattgttgtctgcccctgagattcctctttttcccactccccttgactaactcaactagccctgctttttgtttgcctgtttgttctatttattttttggaggacagggtctcactctgtcacccaggctagagtgtagtgatgcaatcacaacccactgcagcctcaccctcctgggttcaagtgatcctcctgcctcagcctcccaagtagctgggactacaggcatgcaccatcacacctggataaaaattattttttgtgtaaagatgaggtctcactatgttgcccaggttggtctcaaacttctgggctcaagcagtcctcctggcttggcctcctaaagttctgggattataggcaccagccactgcacccagtcaactagccatgtcttttggtccaacccaatgttgcacctttgcataacaaaggcaattaaagaccacttcttccctcctgccccctgcaaaaacctaatagttctcaaacacattggttcatggaactcattatatatgaaaacccatcaacatccacacaattagcaaacttaaccctctgcagggttgacattgagttggaccttaagatatattcaaggctagttggctgggcttggcttgactcccccttagctctctctataaaagcaatgattactgtattatattggttttcaaagaattctgtcccacattctgttctacttattaccttctttgcttgactgtgatagattgaggccatctttctgtctgtccctgtattaatacattcaggctgctgtagcacaataccttagcgtgagcaaaggaagttaaagaccacctcctccccctgccccctgcaaaaacctagtagttctcagactcattggttcatagaactcattatatatgaaaacccatcaacatccatgtaattagcaaacttaacacacttgaaaatgctacctttcaagtcagtattcatattaggcagactttggagatgttgtggattctgcttcataccaccacaataacgtgattattgccataaagtgagtcacacaaattttttcgtttcccagtgcatataaaatttacgttgacattctactgtagtctattaaatgtgcaatagcattatatgtaaaagtaatgtacaaaccttaattataaatatttattgctaaaataatgctaaaaaattatcagagccttcagagagtcataaccttttggctgatggagggtcttgtcttgatgttgatagctactgacagggtggcagttgctggaggttggggtggctgtggaaatttcataaaataagacaataataaagtttggtgcatcaactgactcttcctttcatgaaagttttctctgtagcatgtaatgctgtttgatagcattttctaaatttatttcaaaattggagtccatcctctcaaacccagctgctcccttatcaactaagtttatgaaatattctacatcctttgttgtcatttcaacagtgttcacgacatgtttaccaaaagtagattccattttaagaaaccacttttcctcatccataagcagaaactcctcatccattcaaggtttctcatgagattgcagcaattccatcatatcttcaggctctacttctagttaccttgttctttccatcacatctgcaattccttcccccactgaagccttgaacccctgaaactcatccgtgagggttggaatcaacttttttcaaagtcttagtaatgttgatattttgacctcccatgaatcattgatgttcttcatggcatctagaatggtgaatcctttctagaagaatatttcaatgtacttcgtccagatccattagaagaatcagtgtctatggcacctatagccttatgaaaatatttcttgcatgataagacatgaaagtcaaaattattccttgatccatgaactgcagaatggatgctatgttatcagatatgaaagcaatcataatcttcctgtatatctctttcagagctcttgggtgattaggtacattgtcaatgatcagtaaaattttgataggatgttcttttctctctctctttttttttttttttctgagcagtagctctcaacagtaggcttaaataaaccatgatgtaaacagatgtgttgtcatccagactttattgttcctttgatagaacacaggcagagtaaatttatcacaattcttaagggagccctaggattttgggaatggcaaatgagcattgacttcaacttaatcaccaactgcagtagcctaaaacaagagagtcagcccaagactacaccttcgtccagcagaagactgttttgtctgcattgaaaatctagtgcagccatctttatcaatgatcttagctagaacttctgaatagcttgctgcagcttctccattagcatgtgctacttcaccttgcacttttatgtatggaggtgacttctttccttaaacctcatgaacaaacttctgctaagcttcctacttttttttcctacagcttcctcactcttcttagccttcatagacttgaagagagctagggccttgttctgggttaggctttggcttaaggaaagattgaggctggttggatattctgtccagacaactaaaactttctcatgtcagcaatcaggctgttttgctttcttatcatttgagtcttcactagagtaggactttcacttttctttaagaactttttctttgcatccactacttggctcagtgcttggcttagcttttagtctatcctggcttttgatatgtcttcctcaccaagcttactcacttctagctttttgtttaaagtgagagacatgagactcttcctttccctgaatacttacaggccattgtagggtcattattgacctacattcaatattgttgtgtctcagagaatagggagacccaaggaaaggggaagagattagcgagtggctggtcagtggagcagtcagaaaacacacatttatcaatccagtttgggcaaggtgtgtggcaccccaaaacagttacaatagtaacctcaaagatcactgatcacaggtcaccataacagatataataataatgaaaacatttgaaatattgtgagaattaccaagatgtgacacagagatgtgaagtgagcccatgctgttgaaaaaaaatagtgtggatagatttagatttgcctaacttaaggttgctacaaactttcaatttgtaaaaagcataatatctacaaagtgcaataaagaaaagtgcaataaaatgatgtttgcttgtagttttaaagttttgtatgaaaacagtagttggataaattgtttgcctaagcctcttttgtagtcagagggctattgtatgtacttggaaaaagtgtacatgctagggacttccagggcagcttgcatccctgaggacgggactaaaaataacagagtcccctgctttgtgggacctaaagcttgtacaatttgtgtgtgtgtgtgtgtaacgtcttgagtaaaaagaattcaaaatataaaaatgatttcatttaaaatgaaaaaagataatgaaaaattacagattttaagaagttggtaaatatcaccgaaatggataaattaatttactatttgcaactaactgcttgacattcttctataacacttttttctataaaattaataatgttcgctatgaatgccttttcatgtgaaaattctgtaatattcctttctacagataggatagaaaggtaattcagtctttcctctggcctggttcgtcaaactttctaaaaaattatggatagtttttagagtttatattggtaaatttaagtgaatttttaaaaaatgttataacttctggcaaacctctatcaaagtacaaattctggtcctgggtgaccagagaggacccctaggtaagacagcactgggggtgggaggagcatttctggaagccattttgacacctggacagtagcaataacttaattctacaaggacaagattgtaagcttttttttttttttttttttttttgagatggagtctctctctgttgcccaggctggagtgcaatggcacaatctcggctcactgcaacctccgcctcttgggttgaagccattcccctccctcagcctcccaaatagctagtactacaggcatgcacctccacgcctgggattacaagcatgtgccaccaggcctggctaatttttttgtatttttagtagagacagggtttcaccatgttggccaggctggtcttgaacccctgacctcaagtgatctgcctgccttgccctcccaaagtgctgggattacaggcataagccatcacacctggccgattgtgagctacttaaagataccccaccaaagaacttaaagtgttccatctcagcaccctggccctgtgttgtcaagctgctcccccttccatcatactgtgcactgtatggtgcctctttatgaaccagacgctgcttgtgcaacagaggctgatcccactgcagagactgtatttgtcttctctttattttactggaagtctttgccaccatccggctggtaattgctccacaccacttctgaatcgattgcttttagagttgttgagcttttattactactactcattggggagagaagagagaaagaagcaggttggcctgggctctgcaagagacggatgttgtcaaattgtctttctccagctgttgaatacaactcataatgctattcaataaaaccagaaagaaaatgagagtacaagggaaagaagagatgtcagaaagagagaacaagagaacatacgagtctgccttctcttggaatagacagcaaagccatattgtgatgttgactatatcatgcagtaatggtgaacaaatgtagcaagaagtaaaagacagagctatttaaatatatctgtgggcaattgcacaaatctgccacttttgtaggtatactgatgtttcctcattcctggagctgagaaaaagggtctatgttttgctttattttatttctttcatttagtttggtaggctatgtaatttgattcaagtatgatagaatttctccttagttatacacattactgttattttgctagtaagtggctttgtatccacaatcaggacactcttatgaactgtttacatctgctattgactgatctcgttgcgtttcctcatgctttcatcaaaaggtagcagttggcagggccattcactggagaatgaggaacacgcataattagatttagtgaagaacaccctcattccaattggaatctgtctttaagaaaagaaaagaaaaaaagctccaggttaaggagcttcgaaagactgaatactgatgtaacttttgttcatgctaattactcacaacccagataatacttcgtttaatgattttatcccatttgttatcccctataacattcatctgcataaattagtttcttgtcaacctttcagaaagggtttaatgacagttcatggtgtttacttattttctaaaagtagtctaagtgagtcattataaattgaacattcaagttaaatttgtctgaaacatatataagtatcatataaatttcagattttacacagggttctcctctactaagcaggtggaatataccccccatttcagaatgccagtttaaattacttgcctggggtaaaataccaaatcagagttggacataaaacccaggtatccttattctcattctactattctaataaccagatccaatgctataatgctgcaaattataggccctatttttcgagtaggatgcatgtgaatgtcatttgtctcttaaatgcatgaatagtgtcttcccttgtggtcgctctactgcttccagcctgtcatgtcaagcagcattgcctttattattgaaatgaagacgatacttagatcattgatctcaatggcatttggcaccataagaactaccagtctgttgtatcatataaaatgatactgcctggtatgcaaatcagccagtgtgtcaacaaaaatgctggcatcagatagaatgtccaaattgctatcactctgccagttttacacctacatccctattagttcctgtctaattaccaatgataaaagtactttgaagtcccactgatttccatgtaaatatcatacaaatttggatttgctttaacattataattccatcagcttagaagttaaaatttagaaaagctgtagttcattagtttaagtcacttcaaaacttaccttgcttagttttcagatagactcccatcctatacttctaggactgtacaaataaaaaaatgaattaaaagacatttcttgatgggtttaatgttttctactaattattttgacagacagtcataatctgttctgagttcttcttttctccttccatttcaattcttcataaaacatggaaaaaactttggagactgaataagatctatggtaatccacaatagatgaggccctgaacacaacatagggaaaacatataacccacccccaataagctcaacttactgtaaactcttgaggagtaattagggacttcagcagtctctctgaaaaagccaacgcattgtaaaacccttttagtttttacatgaatattaattctttgaaagtagatgaaagactttctttaatgctaaattcttatccatagagaataatattagagcgaggatctagtgtattattcccatttcatgaataggaaacggagaagtagagaattttagggaccataaaagtgacccaagtgccatgtgtcaaagctaatatacttaactcaagcctattccagtgggttctcacccttcacttgtgccctaaggcctggcagcttatttcaggagggacacccgttgttggtgtaaagagcaagatcttttatgggtatcagttttaaggggcttatgggaataatcaatatgctatggaagtaatgaagatatttaacgtcctgaaaattctagtctaagctttgagaatgtgaccataaaattgacagggattaactttaatatttgactagttaacggtaggattttttccgttacagtgcactgtgtcaaaatttggtctcgttaaataaattcctattctatcagggatgagcttcccacaaataatgttaaaaaaaaaaaaaaaaggagaaagcatgataaaccttttttcctgtttctcttcttctaaccacagggtgcactatggcagttgcagggcttggtaattgaattcagttctgcaacctgaatacatttctactgtaagtggatctccctcctctaccagagaaagaaaatggcctcaaatgattctgactggaacacagcagccacctctcttgtaaatagctgggtcttattgacttatcttggtagggagccaaaattgctgcccagatgagtccaagcagtagccagaagagaaccagctacttatggggtctctgtctttgtgaaataagtattaagagggtccatcttaaagaaggaagagaagtatggtcaggtgagtcaggcaatgatgcttagtgaagtacaacctcagagttacggtttttaataatacgcaaaattacatgtgtaagtgtattgatatgttttataatacagcatgcccagaatctcaaaaagattaaaaaaaaaaaaagatgttcctaggttctaagtatttttctttgcatagtggtttgagggcgagtcaagtttataggtgtgctgacctttaagagagttaggaataaaagagggcattgagagaaagtggtttgggtcgcagacaccatccctcaaatagctgacaatgaaggtctataataataattggcattatctcaatttgccaggtatctttagtagaatgtgctttatctaatacccaaggtagggtttcaacaatgttgagaatctatttatgaaaaggccaagatgataatgttagctaagtgctaaatataataaaaagtagtcatgaccaccattctagacaagcttcattgtcccgcacactttatctggacctgtggtttctggatggttaagcggcttgtactcacaaagacaaattgtgcattcttggaatacattcttggaggtctgagagttttctgtgagtggtgctgaaagtgtatatttcatctcaatgacaatctcaaaaaattataatgcaagcatattctgaatgatcttgttgaccacctaataaccaggtatttttatagaattttaatgcttgtgttgagttgtgttcatggggaacaaacctgtcataccttatttggtaaggactattgagaaaagagcagagccaggttgagaacataaggaatgcatttatgtcaaggaaaaaataaaatgatgccagagtctgattttaaaaacaaagctatctcacgatttcaaatggagaaaacagggagggagaataaaatcacagcaagcttaattaggtgtgagcatcatgacctcaggagaacctgggccagagaagtcaggagtattaatgtttaccatggaactggtaatttcatttaaaccaagcagcatcagctgtcacattaaattaatattattgaaattttatagcatttatatttatttgtatttaatttataaatgggtgttggttgtgtaagtgctataagtataaatggattgtagctagttttatgtttgtgtatatatatgtgtgtgtatatatacatatatgtgtgtgtatatatacatatacacatgtgtgtgtgtatacatatacgcacacatgtgtatatacatatacacacacatgtgtgtgtatatatatatacatatgtgtgcgtatatgtatacacacacacatatgtatatatatgtaatgctaacaaaaaataatttgaatgattgccaggggtccccaagaatgagctttttcttttaaaattggcctgtactttctttgagaagccttgccacgggtagaggagctattcagtgcctattgagtcaaaatttggccttaatataaatggggaggttttcccttgccatgtttggtgcctgctaggtatagtcacttgctctaatttcagtagggtggtggaaattaccaataggcagaaaaagacagctttgctgacacctatttggttgaattttacaaaatggaaggatgaataatacctcaaaggcaatctggtagattctttgagggaaagagatgtgtctatttacagggaataaagctaagcacattgactgttcttaggttaatggaaaagaataaggctagtgtaggagccagcaaattatgtttcctccataattagagtcttataaaaatatcagcgtgaattacttgctaaatacaaattacaattgttaatgtttgttaagaaaaataattcaatttagagcaagaatgaaagaaatacaggcacccaagaacaggcacagaatacaatcactttaaccaaagcttagcatggattattttcccccacttcagcttcaagtttattctaatctttttctggggggcaggagacagtcggaggggaatgcatctgtatgtcccagctgtgtggcttctgagcctgacacccctgtgctctaacaagacccagggaagaaatccttagcaggctcttacccttatcagaacaaagctatttagttgccaccttaactccagtaattaactcagtggagcaaatttccttatttcatgtaagatgtgagccaaaactctccttgctgcacttcttctatctctgggataaagccaaacagagaagaaactcaaggaccatagaatctttccttgcttttagttttcctttgaggccctacctcccaactccctcctcacctctctccttgaccactgagtagtaccactactcagttaatactgaattttcttcttttccaagccctgcagtttactctagaatttctactgacaaagccaaatcttgctgtgatttttgcccccatggagaagcatgtattataggaacaactaaccctttataacttaggaggccctggggcttcattgcattacagagtcatacaaccataaatgcccagacatacatcaccagggttaaatcattttcagtatgaaatgatgtaatccaatttgaacactgcctcaaacccagtgcccttcatgtggtaagtattcaatacatacctaatattttaactttatttatttttacctcctccgatacaaaaaaatgtaaataaccctcaatgatctgtaaaaaatcacttagttggaacactttgttcatcctctagcaatgtctgataagttagttatcattacatcatgaatcatgatactcctcatcaggcagtaaaaatacagtaatttcgtttaattgaagggaaatacatgtttaccttggtaaaacttatatattatctttaaataaataaagggttatcttgttcaaatagcttaaacccataatcaaatgttgcttatagaggtcctgctttaaggatctcataatgatttgcatatcattagcttgtcagaataccatcctaaaccttgctgatatctgctctctttgcagttcattctttgttgcatccaagtattacagtaagttgttctctggcaatttgtttatactaatgatttgacagttattttttgacccttgaatgacataattatgttaaatacagtttaggctagcttgtgttcaaattgacatgaatttttaaattagtaatgttggtatctagtatatgacagaaatgaaaaataacgtattttgtatttatgcaagaaattatctgtaccgatcaaaactgacctccggacacaagaccagactggacttgcatatgttaatgggaaacaaaatggggaaggggctcctaattacttaagtttattaagaatcccaggatacctcttagaatggtagaggtgatgttagcccttatgtcctggacatgatccagtttaggtaattgctaattacaatctgtctacttaattcccacggcccttgcttctgaatgttattttcttcacttagcaatatttaactattatttgctcttggtgtgtgactgttggaacatctgctgattcctccttctacgttcggcatgatttgcttttcatttggttatttgataattattattttcatattatttttgttctaaatatgtctatagatagaaaacagaagccctgtaaaagttttagatattttttaactgcgtgggctggactatgctttgtcaatcgagcatacagactttctggatgtaagtttgggaacagtgggcataccactggcccatgaaacactcactataagatagtgtcaactcagaggtgaatcacagatagaccagggttttcagtgtcttcaaaactagggctgaaatcacagcacttaggggcttataagtagatccctctaaggatctatcctattctggagccattccaaaacaagagtacctctgttttgggtgctagagcatgctttatttcaatcacaattcaatggaactgaagaacagaattagaaagtgatgagtcaaaaattcttattcaccgcaaatacagggctagataaactccaggtattccacacagtttccatccctctgaaggaagcgagattactcttgtgtccgctcagctatgagcaccttgatttgggatatattgcttggagttcagatggagaagacatccaggttttatctataaactaccctccatatctctaaaagttacttagaggaaatcactgagttgaaacttcattcattccctagcattgtcagatgaactgaagcatctttttcaatagtcaatatatcctgagccttcttagtgaacacagtgcttagaactttcaatgaattcacctctctaagattatggactacatattccaaatgtgtagattttgacctaaattttacccattctacagaaaaccaacaaactccacctcagagagatgttctcactatatctacccaccagggtaccagtctaaaaggccccaatattttctcctgtgttttctgaataattgtgtttgagctagagccgggagactcctcctgtggcttttattaatggaccaaagtttggttcctgtgaggactgcaatgtgtgattcaaatgcccagtccatgattcagctagtgaggggagtaacccattttatcagttgtgctgtcttccactgctgttctctatattccatcagaggaaacaaatggcttctattgtgcataagaatgccatttagtcccaagcaccatttgaaatggaaatgaggagtaacagtaacagaagaacattggctaataattgtgctctgaatagccatttggccatgtgggcagggtaaaggtaattgtgtcctagagtaatacatcttctgagcattccctgagactataattgctatgttgatgggatgcatttttaaacatgtgattgcggctcttagacttaaaaaaaaatggctattttcagaatgatctgactttaagatgtcaggcaagattttgaagtcagaataacaacacacaaacacagatctaagatgtattattgtgtagctacttgtctaactgcatttttttttcttaagtctcaccctgtcttggtgatacacagattaatactaacctcctaccaaacaatccctgttgccactctactgaaaatacattcttgccttccacaagcagaaggctgagtgtctttgtggcttaggagagaacaaaaacacatctatgtattcattgccttgttcacttgcacaaacggagaaaactctttgaaaacatcttcctttctcctgagtgaaagaatgagcaggcgctgcctcccctgatttactgcacccatcctaatcagggtagatgattctgatcttgcattaaacaattactatgcaggctctgggcttaagttttgacttaagtttagaaattgagtagttcccacaatgccctccatttctaaatgtatgagaagaggatcaacaaagaaaaaaattaatgggcttttgaatgagcaacgtgtgtgtgtgtgtgtgtgtgtgtgtgtgagagagagagagagagagacagagagacagagagaggcatgatcttggctccctgcaacctccgtctcccgggttcaagtgattctcatgcctcagcctcctgagtagctgggattacaggtgcccgccaccacacctggctaatttttgtattttttgtagagaccgggttttgccatgttggccaggatggtcttgaactcttgagctcaagtgatccgcccacctcagcatcccaaagtgttgggcttacaggcgtgagccactgtgcctggccaacagaacatattttaatgtctgaaaaaaaagaagaatctactttaaacatcaccagaagggatacacccttcggtgtccccaggccttgctggcttgctgtgggtataaagcattaattcttgtcatttgctggttatagtcctccaccaaaactcttcagttcttggcctctaattcaagctttcttccaagtttctctccactctcactgtgtcatttctaggaggcctcagagttttccacgctagaacacagtcggtactctcatgtgtgttttcattttagcctctttgttgatgtctgctgcctgtcaatccacctgggtttgtaaagtccctgaagcaattcctgccatgagaatgttccttcatccagaatgctgccttctatgctccccaaactcaaagaccttcagggaccagtaaactcaactgcccaaagccaagcacagctgtccacagaattggggcagagattcttctccataggactctggcctggtgcataggtttggctgaggaaaagacatgcttttctccttccccttttcacttctatcccttttcaccaggactcttgaagaatattctcacaggcctcgtttcccctcaggtcagaaaatatgtgcggaacagaccctgagatgctgactgtgcaaggctgttcagacccagtcaggtcaggccctgaatccttgtgatatggaatgagatatgataaattggaaattgtctttaataaattgccattcgtgataattctagtgataattaatctgctgaggctgctataaaatatcatagactgagaggcttaaccaatgtatttccacatagttttggaggctggaagtccaggatcaagaacaaggtgctagccaattggctttctgtgagggatcacttcctggcttgcagtcagctgccttcttgctgtattctcatatcacctttcctaggcagatgcatgcagagagggcaagtgagctgagcaagctcactggagtcttttcttgtaagaacactaatcctattggatcagggccttcacttttgtgacctcatttatcctcaattccttagaggccccatctccaaattcagccatattaggggttagggcttcaacagatgatttttggggcaagtattcagtctatgacaatcctcatttaaactcatcagggaccattgataaaatgctattcattcttccctatgctggtgtggaaatttgccacccaatggatgcctgcaatatatgccagagactttaggtacgctgtggcatggcttagtgactatgagaagactgacatattagcttggactagcttttgttaagcaaatggactattttacaatccaagaaaatgaacaaaattccgttttacttactcaagataaaaatgcattgatactgcaagacatatcctcactgaaagatagggtcacttaaaatatcccatttaaatgcaaaggacactagaaagtatagcaagacaaggtaaagaaaataacaaccttgctaacatatgactaaaataggaactggcagctgggggtgatgagagaaatgaaggcagtcagctacacactgactgccggggagcatcctgcacctcagataagggagcttccgcaatgaatgcctgggcctttggctttgtttcaagtcttttgatctagcggagtccataggatcatttttcccgtgggccagacctctggagaagcaattggcattgttagtttgcactgttagttctgaagctagtttggtaacaaaaagttattgtagtaagtgcacttgtgtgtgtatgtgaggggtgtggatagatgatcatgttcaagtctgtagtagaaaatttctaattattgagtctagagaactaagaatacttataggaggtaattaatccttacccgacatgtggaaaatgtcttataacccttctgtttaatttaacaaaaatatagtctactgttcagatggttaccactcggagcaactcaaactatttccctacagattttcctgtagagaatgaatgagaaatttttttgtttgtttaaggcctgaaattttactaccaaagtcaaattttgagtattgattgttgagtcctgaggatggttatattatcatgacaaatcttgcttattgtttttaattagacaaaattttcaaataactgtgagttattacatatctcttttattatagtgttctatagattgtattttgtttcattacccacactacacacacaaaccacatatacacatgcacaacacacacacattctttctatacttcatgtgaatgctttgagacaatcctatttaacattgacaatgaacaggacagctggtctctcaataaaatctaagataccacagtagtatctgcaaataatatataaattagaaatatttggaatgtttagtttatttgctaaagctcttcagaactataaattacaatattaatgaacttatttttaattcccatcactttcatttttatagaatccagaaataatgcatgtaacttgccattcctccccattagtacacttgagtccaaaggagaggttcacagcatcgtgctcttttgtgatgtggtttagaagaaaaccagctcaggacaagtggactctgaaaatagcagactttcctttactcatcttttgagttttcagagaagagtagagattcagttcattggatattttctttgtactaggctccatgctagaaattggagaaaataataaatgagaacctatctttaattaccattctagaaagaagacatgtacattaaggataatatgtaatggatgtcataatataaatatgtacaaagacaaggtgtagcatagaaggcagatgaattgttatgttgattggagtgtggtttctgttaagggatgacattaatgaggtatcgcctttgcaacttcaagaatgaatagaagttaatcagacaagaaaagaaccatttcacaaggaacaatatgtacacataattcaagacagccagaatgtgaagtaagaggagactcaagttttgtcagcatattatataagtaagggtgagttttggctttgagagttgctttgttgtgtttttccagatagatgtttttcagatatcttctcccctgtgagaaatttctgcaggtttgattgatcctttcagatgctttttaaatatatattagtttcatcactttaccacattgagagtccatgtatctttgactcaaatgcctaggaacagaagatgtgaggaaagggagagagagagattctgtcatttaacaattattattcaagtacctaaaccaaatcgaaatgcctaaaggaatgcagtgggtgatgtaaaagaaggtgtagggcaggtgtaacaacacagaatggtagagaggtgggaggtggggggacgggagagtacgcagctcttctaaggtgggcagctgccttatagcttcagccagttgtcacacagcactggttttgtcagttttcagttctttgaaaaaattggaaatgtgaaattttatatggaactgtcaatttgtggaagttagaaaccactcgcaggccagcactgggaaggccatatccagcctgacttgctctgttttatacaccatgcactctcagtggttgcctcaagggctttagaaagaaggtcaaccctttgccttgtggcttttgtgcattgctttcttaagaggaacataaggaaactctactgttctcagctgctgttgtggttacttggccatttgtaagacttatatataataatgaagttgtcttggagggctgccatgtccgtgatgtagttgcttatctaattttgtaatcttttatcaattccctctacagcttgaaggccaggctgagggtatggtacagaatactaagtggtttcaaatcaagtccaatctctgttgcaatttttattgtgataacaagatatattattaataacaataaaagacaataataatgtattattatattgtaagcttaccatgaagtgtatgggcaacccaaaaagatattcagccatcattaaaatcttttctaatcacagccacacatttcatattatattaaggaaaaacataaaagcaatcttgatgttaagtagaattagtaaagacctaaaggagtataaccgaataaacacaaagtagaataagtaggccagaatatgattgtattctatcaacaatgttatatttgcttagaaatctcttatatttcttcctccaaatatgcgtgcatgcacccacacacacacacacacacatacatatatacatatatgtatatctgcaattgtctaaaggtagatggtatagcataaaggttaagagtgtaaatttggggttcatactactagagtttcacaactgcctatgtagccttccaaaaatatttagcatcctgagctgcagttttctcatctataaacaaggattaataatagtatttatctttgtactattagatatgattgaataagatatttcatgtaaatcatctagcgtactgccagatatattttatagtcattattaatgcaaatcattattgtatcattattattactggagttttaactctctggctgttggcaggaggcctcagttcttctacccatgggcctctccacagagctgcttgagtatcctcagacgtggtggctggctttacccagggtgagtggactggggggtttggggaacaaactaggtagaagaacacctctaccatgtctattctttagaagcgagtcacgatgtttggcccacaataaagaagaatggaaatatttgctaaagattttgcagatgtattttaaagccacaacaaggcaaagggttattattcttaatttgcagaagtaattgagactcaatgagattagataacatacccaagaaaacacagtaaattgcataacttatttactggagctcctccccaaacccctaaactatgtgacattcttgctttaaaaaaaaatggattatacagcacgtgtcaccactgcattctcttttttatgttgttcatgtgtgtctgtgaaatgtgccttctaataaaaatttgaggatcttatacttttccagaatcattttgttgaagtcatgttttggagtacatttgtatgcaatccgtctgataagggaagtatatttctcactggaattagtataggcggaaaacaccatcaatcatagtcatcacaaagcaattaagtacctaattgttcatggctctgagtttgctactgaaacagaaaacttcttaggcttgctaagaaaacttcttaggcttctaagccctcctggggcttggaatccaagaattcagtagaagacggaagcgtggtaaggagaacaagaactgaagacataaacaaatttatttgaaatatggttgcagtggagcagggagagtgaattcaggggaaagaaaaataaaatgaaataagatgctgaggttcaagaaaggataaaaggtaaagtggctgaatttaaatgacctgggtttcagtttttaacaaaacataaaaataactgaagaaaggctctatattttatttaacaataacaacaacaaaaatcaaagtgcttgtttatcattgggactcaacttttgcagagtttttgccttaatttttttctctctaaagcagaatttcccatcactttagattcctttccgtgtcaatgatggcttttaatcccaatttccatcattacccctcagtgaaatgattgcttccatgtttgagtatatatacatatgtctgagacttaggtcaattattttcatgcagaaatcggggagggtgctcctgtttttcatatgcatttgtaaatattttcaatcaatcatgcatttataatccaattgggaagatatgattcagacacaatagcccgtctgctgcaagagtctgttataaaattgatcagttggccaagttatgctatttttttaagttactttgctttctttcagggaagaagaaagacaaaaaagtccagaaaccagcagcagcaggtgctgccaaaatggtattcttcttatctgtgctgatttcaaggggtgtgcaaaagaatgtgtagttgcttttctctctggctgttgggatggcgtctgtctctctggcattatccacttatttgatctagctaagtataggagcagaaataaattaaaaatgctttttcccagaagccccaaggatgttattcacacattctcccttctactgatctctgccagtggtgtgtaaatatatatttagggggaagtggctgaagtcaaaagctctgttggatattctttccctttcagttacttaccttcttatgcacaaatagaaagagagaaatcagaatagcagagaaattaacagacatgacagcacaacaccttctttcccatgtgctgatttgaagaggctcatgtatttatgtcacaaatgtcaaaattcaagtttctaagcaaaagaaaaaaggaaaaactgctaaatgttaagtgatttgcttatttgaagagttgtattacaaagcaatggaatgggagagctctcccagcccaggaaagacaaatgggaagacgggtctattttcattttggcattggacagaaggcagccttctggcctgctgtcacttcctatctgttcagtcttcgttttgcttccccgctgaccatggatcggattctgactcatatcagagactccctcttctgatcctatttatttatctgaggattttttcttttctttttccatagactcctagaatccagaggaaactcagtggcatctctcatattatcctaagctttctcagaaatgtgacatcaatattttaaaattttcagtagttatcaatatttcttaaatctagcagtaaggatggtctttgaaatatcttttctaaattccttctgttataataaaagtcagtgctcttttatatggtttggctgtatccccacccaaatcttgccttgaattgtaatgactcccacgtcaagatggggccaggtggaggtaataggatcatgggggcagtttcccccatactgttctcatggtagtgaataagtctcatgagatctgatggttttataaatgggggttcccctgcacgagctatcttgcctgctgccatgactttgctcctcattcaccttccatcatgatagtgaggcctcccaagccttgtggaactgtgagtccattaaacctgtttttctttatcaattacccggtctcagatatgtctttattagcaccatgagaacagacaaatacactgtttatcatattcttgacagcaataaaacaattgcttactgtcagctcttaacaatctttagtataattaagatagtctatttggattctttttcagagccttctatttttcagtcttttgaatgtactcttattgctaaatttggaatatttttagttttgctgcatcattttttgaatttacctttctcccctcttttgcctattcattattcaaaaccagatcaaacactctttctgtgaagtcagtaacttactccttcagaaatgtaggtacattgaaattggtaaacattatcacactttgtacatacttttacagtgactatgtatatgtgtgtgtttgcaaaactttctgcctcattggacaataaactcctcaagtgcagagatcttgtgttatttatctatgtgtcttcagatactaaatgtggcacatagtagagctccatacatgtgtattgagtaataaattaatgaataaatatgatgctggtggcaggtaaattcttggtgtttactttgaggtccggatcaatacaggatcaggatagtgcttctcttacatctgtttgcacagcagaactgtactgcactgaccagatgtctcaaagtaatgtccatcttgcctggaagtgtctttccttacttggggtcttttaccttcagaaatccaggtgcattcacaatctgcactgttattataccaactctaggtgaaggatgcatgatccaaaggtccagagtttgaaagcttgcagtctgcaaaactgccctcacttctgatttgaattgcaagttcaggggtttctccaaatcactttcagatttgataatttgctcataggacttacaggactaactgaaagctgttggactcatcattgtgatttattgtaaggacaggatacagattaaactcatccaaggaaagggacacatggggcaaagtgagagagctccagatgtgtagcttccagttgccctctcccatggggtcaaataactcctccaggcaacagtgtgcgacaataggcacgatgttgctgacaacagagctctcctaagctttggtgtctgcggtttttggaggttgggtgggtgcttcagcacatacacatgattgcccatatatatatagctaatctcggtctccagcccctcaggagatagacctgagaccatgcgccccaagtcccacaacctaagccgcatcgttggtgtgactcacaacccccaccataagtcacattgtcagatattctggcatggcagcacccacactaaacaaagatgtggctcctactaggcatgctcctcctagggctaaaagatttcttcctagaagccaagagcaacagccagaccattccctgggcaagattaaattccttactgaaccacattttagttcttccacacaggtctcaccaaacctataatttccaagtgagagaacaggaagcctcatcttgctttcacagcttgagacaaggcaaaaggaaacgctgttttgaactttgtagtcagggtgggtgtgtttacaagggatacaatcccctcaagtcaatttaaatcaagaatctatatgtacagtggcatacccagggtatgtggctgtaagtaaatcgtgttttaactctctccctctactttcttcctctcaatgacaaaattattttcagtaataattatttaataatatagtaattctcaccatattttaaaattgctcttcagttttaaaacaatttacaagttagaagcatacatttcaattttacagctattattcaaattcagtagaaatatttcacatatgacctgaaatttgaacttaccaagcaaaagtattatataacacagacttctttttttctactttactgagtgagtggacacagatgaaaaattctaagttagaaattctaagtggtcctaaggaatgaccaaattgaataactcaagttttctttcttttgtcattacaatcagtgtgctatcactttttattttaaatgttggtttaagcaaatgtgtacgtatgtgtgagatatatatatatttcatatatatatatatatataatatatatataatttcagcattaaggagacattgtgcccacataaagtgataatgagactggaacattacaaacttactccttcaacgaatgcatgtagccaatctatgtgtgatgggactgataatataaccaggagctctccaaattatcattcatgtagaatacaatggtttttaaataatcggtaatagaagttattaatttgaggcttacatatgaatctgaaatgcaacaatgtctgtagaaattgtttagaattttgacaagatttgtttgtggatggagtttctttttaaaagattgatatataatattttacatatcagtggggtccatgtgatattttgttgcatgcataacgtgtaatgatgggtatttgggatatccatcaccttgagtatttatcacttctatgtgtaggtaacatttcaagttctctcttctagctactttgaaatatactttgttgctaactatagtcaccctactctgctatcaaacattagaacttaaaccttcttctaactgtatgtttgtaaccatttgccacatctctttatcccctcatcccacccacacacccattccagcctctggtatctatcattctactctctaccttcttcatgagataaacatttttagctctcatatgtgagtgagaacgtgtgaaatgtgtcatctgggtcttgcctatttcatttaacgtaatgacttctagtttcatccatgttgctgcaaacacatgattttatccttttttatggccaaatagtattcatatatatatcacatattttccttatccttgcatctattgatggacatttaggttggttctataactttgctgctgttgtgactagtgctgcagtaaacatgggagtccaaatgtccctttgatatattgatttcttttcctttggataaaaattcaatagtgggattgctggtggatggagtattttatcactgacattgtttagaattgtgaagggaaagcagaattaaattttctgtctctttaaactcagtcatcttttctctatagcacaaaagattatgttttttttttttttttcataactcagcatctttgtgagctatgaaacttgccctgatagccttttcttgcctagggtaggatatattctgaggaagggctgggactgcccatgcattcctgcagagcattcacgggtgctatttacagtcctaattaaatggaggattattagaaacgggaaggcagctataaatagcatggtccattttatctgtttctttggtgtgtaggaagagcattgctaagattctcccttgaagttcagttaactcagaatgtgttctgcttttgttattctgctttggcttaaaaaaaagtctcctgatgctgttcaaagtggggaaaagaaaacaaaaacaaacaggagtcactctcagtcattttagcatatggacagaaggaacacagaatgaaatagagttggggaggggtgtgcacggtataagaaaaaaaaatgtgggcctaatcctttccgataacttttttttctgaaaacaactattaataaatcttatttccaagtctgtagaatattggttctcttcatccaactgtaatgtgatcagtctgttcagggagcagaggagtgggtatgggagccttccctctccgtggtcctgttagggcaccttttccagggagtggggactctgctggcttctctttcagcacactggacggtgcagaaatcagctcaactctagaggcagtgctgggattggaatggaacttgacctggatcaaatcaccgagcctttgcaaattcctgattttccaagttaggacatatctttagacccagagcccttaatcttggctcttgggataagcttccttactgcttctctcaacactcatctccacctccagcctctgctctacaagctgccactcatctaccttacatctctgatccatccccagtattcaacagccttcagcatttcttggttacctgttttaaatttcccaagttcttaacctgtgtttataacaactcatgaacttccaaccaacacatcaactccagctccctccagtactccttctttcaaaagggttctagtcaaaggggtttgcaggcattgcttaagctcatggggtgttttcgtcaatgccccattggatttgttcatgtctttgtttctttgatatatcatccttcttctcctacttatcttaattgatctcaaagctcaagtcaaattatatttctcccagttggtaattattttccccttactttaaattctgaaaacgctaatgactgagcttttcatttagtactaactggatggttagttttctttgtgtatgtgatcgtttacgtggtcgttttgtttctcaccaacacattgtaaactcttttagaattgttatctaatagaaatataagtaacataaacctgtattatatttttggagcatctgaaagatttctctcaaatggtctcatctgatccccaaagcacccctctcaggaagtaatttttttatttttatttttggggaacagggttttactctgttactcaggctacaatgtggtggcacaatcacagctcaatcagccttggcctcccaggctcgtgattcacctgcctcagccttcccagtagctaggactataggcacctgccaccacgatgcccagctgtttttgtttgtttgtttgtttgttttttaagtagagacaaagtcttgctatgttgcacagactggtctcaaattcctgagttcaagcagtcctcccttgtcttggcctcccaaagtgctgggattacaggcatgagcaaccatgcccagctgaggaggtataatattatccatagtttcacatgtaaggtaataggagctcacaagggttaaataatttgcatcaaatcactcagctggtaacttttagatccagatttaaaaattctcaacttctgactatatcctatgttttttgtttggttttgtttatagcttgcagttgcttttataattattatttttttgagacggagtcttgctctgtcactaggctggaatgcagtggtgtgatctcagctcactgcaatctctgcctcctgggttgaagtgattctcctacctcagcctcccgagtagctgggactacaggcatgtgccaccacgcccagcaattttttttttttctagtagagatggggtttcaccatgttggccaggatggtcttgatctcttgatctcgtgatctgcccgcctcagcctcccaaagtgctgggattacatgcatgagtccccactggatttgatctttacaaattaatattagcacttgttaactaaaggaatgaagaaataagtgaaagaatgaaggaataaatacataacaacattatgtataacacagatgagtgtaatgattcagcaaaacttcattataatctcttcagggcacctcctggaaacctgagaaataaaactgttttattactggtacttgcctttctcgaaaactgatagtaaacgtcctgacaagttagtcttaggtatctttccttcagttcaatagcaaatgctgtttaaaagcaaatacacagcatttatagaatgtttttgcctcttcattatattttactacataaaaatctaaaacacacaaaaaagtaaaacacaaaaacagtctaaagtgtgacactgatttcagtacaatacatctagagggaataatttttctctaaattcccaggtggctaaaaagagggctctgtggatagatgtggaaagcgtgagacagatgcttctctgagcctcgggtttctcatcttaaaatagagataattacagtacctacctcacaaggttgtggggatttgttgggaggatctaagtaaagcccttaagacactgcctgggtataaagcagctatgtagcttctagtgtcttaacattgctaagaaaagaaacacacttgccccctttttgcagaagtaagctcctttagtgattttcatctcattttcttctatactttttttttatatttgttgtgagcacgatcttctcttttttaataaattcatatttttcaattatttttattattaaggtaagaagtgtgcttttgttggtggaggaagaaggaagcccctacatgcatagcaacgtccatgggaatgaatcactgttcccttcttttctatgaacttaagattatactcaagccactccagaaaatgaccatgcagtcactgtaagcaattcctctaaaattattaaaaactgtttatgtttggagaaaggcagcccctcttgcagtgataatgactgctatatgagaggattaagctgattacatctttggaatactgagattgtgcaaaatagagggaacgatgaactctccacataagctaaggaattcagcaaaaggatgaatcaacaggagagagagaatatgaagcctctatttggaaactgaacacgtagcctcccagataaaagtgagaaagattttgagtaatatctgaagtcatgtagctgagaagttccatctacacttgagaataaaaacaaacaaacatactctaggcgatgtctatgccagttccatgaagtcatcatagacttgcaatcaattgcttgggaaaatagattttaaagttgaatttctggctattactaggataattttttctcctggacattttatgtatttatgtatctactttggtcagggtgacaaatggtatgtggtatgcagagcttaactactactcctagcccccaggccccataatcttttagtggattcagccaagcagaaatgtatgttgaataaaaccatgtccagggggtgagcagaaagaaatgcatttgaggaaaggatattatgtcaatcccaaactcgatgaaatgttctaagagtatcccagagattggttctatgaatctagtgaaacacagaataccctactcttcacagatgggtgtttatttgcatgagtccataggcatgtgagcttttgttccttagctggaggattagagggaagaaatgacataggtgattagggatgggggagagctgggatgaatatggagaaaggttagagaatgcaggcggaagttgatggcagcaatttgacttagaaccttatgggacttgggacacacgcactgtaaccttgagacctagataacagtgttttatacagattcggagaatagattatttctcccacaacccagctactgctatgggtacagctttagtgctctgcgggctcagctgaccacctgaaggtgactggctggcttggagtgacaatagaagagcctatagcacttgtaagagcagggtcctcactgagattgtgcacagcagagggagccatgaactccctgcatgagctaaggaattcagcaaaagcatgaatcagcaggagagagagaatatgaagcctctattcgattaatgaacatgtggcctcccaaacaaaagtgggaaagattttgagtcatagctgaagtcatcatgtagctgggatattctataaacatttgagaataaaaacaagcacagcaaccaatgtcctttctgttctaattaggactaacttttgagtgctagagactagagggcaggcatagccctctatggagatgggccgttcaagttttaataaatgtgttgcatttgtcatcttagtatggcatgacaaatgatctattttatattaggagctgcccaaagatgttgggttaattttagtcaaagtgattttatgcccacaacatctggatgagtttggtcaaaggaaagaagtttagtagactcataaccagaaagatctttgtcttcacctggcctgccagacttctgagggagtaatcatgcccaatatagtaactggaaggacatgccacttgtttggaaggatagaggcatagcctgagaagataaaggtgaaatctctgaaaactttgataaagaggctgggcacggtggctcatacctgtaaacccagcactttgggaggccagggcaggcagatcactaggtcaagagattgagaccatcctggccaacatggtgaaaccccatctctactaaaaatacaaaaattagctgggtgtggtggtgtgtgcctgtagtcccagctactcaggacgctgaggcaggagaatcgcctgaacccgggaggcggaggttgcagtgagcggagattgtgccactgcactccagcctggcgacagagcgagactccatcttaaaaaaaaaacaaaaaaaaaaaaaaccaactttgataaataaaatataactctaactctagatagggaccgaatgggggtataatgtttgtttaagtttttgggagacacttgataacacaacctggatatggtggagagcattcacattccttttcagtagtagcctcttaacgatgaggtatggatgaacagcaaattgctgctgacttattaattaccatgcccacaccactgatttccctatgtcttacctgtgcacacacattggctttacagcatacgaacgccaagtttgtggcgtagcatatggtgctccctcaaataagcacaactgtctgcctctctgcttatctaatcatagcaacagaaaaattgacttttcagttttcttttccccaggccctgggagatgcatatgccaaatacttggcattctttgtaacagagtcaatcataattaggattccaaattaaagtacactgccagccagggcatgtggtattttatattatttgtttgaacaaatgtattataacttgaaaatggcaaagtaaaagaattaagtaaagctcacactttttatatgtaatcatcttgcggagttttattttatcagaatgttagatgaaatcagaaagcaaagaatgtaaaatagaaaaatgtatctgaaactttattcttttaagtaacaggtttggttttttgtttttgttttctttattttcattttgtttggtttttgaaatgctcattgtagaatgttgaatatggtcagatgttgggtgtgaagtttattagaaattaaccctgaaaaagtatggtatagtcattcagttgccttttccagtggagtctgatttggcctggcgggtgtagtgaaacattaactacacccgcctcagccacccaaagtgctgggatcacaggcgtgagccaccgcgccaggccctaaagcacatcttgattgtaggttgagggtgcagtgccaacaaattctactttcatggctcttgaaattctgtgaacatttaagagccactttgacacagccatttcttgttttttgagagagggtattattgaaattctttttaatccaagatttttgtgacaatttcattcattcctactttctttacaccagtagtagctattcatattcattcttctattttctttgcatgattaactggcatatactagttcttcacattattagcctaataatagtagttacaggctataataggctattaattcattatcatctcctgactcaagtgaatctgctggtaactgagagctcctactcttgtcaatggctttgatcccactgatgaccattttagtgctattcccttctcaccatggttgagccttttctacatattcctctcagaatggttgtgccagactttcacggggagccatttttaaagctatcctcactacagaatatggcagcatttcgttggcagtaaaatcagttaaactgcatatagaatgctttagtttcttctgaataaaatgtgttacacaaactgaagtcactgctctttttaaaaaccaaagcagaataaaccgttttgtaagataattttgccactataaatatagtttcctttggcttcttcttggaaagattttatttcagcttgcactgtgagatctttgtcgttttcaccacacatttccgtcaaggaagcccttggatgactgccatgatttgcctctgctggacgcttccttcaagggctgtcaacacctctcttaattgtctggcttaaacatcaggcgagcaatgtgttaaagttagatggcaaatatacttaagacaaatatgtaaatttttactctttcaaatatgcattcaactggtgtgtatagatttcagaacaaaagccagagagagagcaagaaagagggaggagagagaaatctatatgtataaatagaaaagccaaggtagaaatgctgtgtgtgtaaatacccaatttctggattaagacgtatcacaaatacatatgatcaatacttatgtacatgcaagtgtactgcctttccaaacaccagcaaatcttggtgagcagaaatcagtagactgtccatagtgggatctagaatttgaatggaaacggtcttcaattttaaatattcatctgttttcatttgtagatatgacactcactttaagaggtgatctgagttcaaattccctaaattatatttgcatttgacttattacacatattgttagttgtcccttgaattccagtttctctttgagtaagttcttagaagatatatgtagctaggtgacttatagtcacctcttagtcattctcaaatatgattataggctatttcagattcatttcaggaaaatgtcatgtgtcaaggtgtcaattctgagcaatttttacattttgccaattctattatagaagtggctctcacccataagtagcttgaaggagtcagtatgtaatgtgccagtctcattttcactttatgtgggcacaatgtctctctaatgctgaactgttatataacctgtggtctatctgactaccatagcttcgtagatcaaaatattgttatggtcatataaatgactataatgtgggtgttttagaattgcacttttgtttatgcataactggtcccaactcaaatctgcttcatcattttttagtcaaaggatagtttttcatgtcagtagtacctcaaactccgcttgtgaacttaacacccagctatatcctgttagtttttaatcaggagggaaaaaaaggctgctatttgaactaaactgacagcttttgttgatgagctgttaggcagattaaattctgtcttgctcttcaattgttcttgaggctctgtgggacttacagtaatagaattttatttgtgtcagtaaagttgacagccctgattcagaagaccacagggagctgagatgttgattaaggagcatcatattgaccatggcttaagtgggtaacaaatgaactgagagagaagactctggatctacttttgcctgtccatgaactcgtccaaagcaaatatgctttgagttttcatgtctgttttttaatttttgtggatacacagtaggtgtaaatatttgtggggtacatgagatgttttggtataggcaagcaatgcatactaatcacatcatggaagatagatagggtatccatcccctcaagcatttattctttgtgctaacaaacaatccaattatacccttttagttatttaaaaattctattgaggctggacacagtgacttatgcttgtaatctcagcactttgggagggcaaggcaggaggatcccttgagcccaggaattcgagactagcctgggcaacatggcgaaacccaatctctacaaaaaatataaaaattagccaggcatgctgacatgtgcctgcagtcctagctattcgggaggctgacgtaggaggattgcttgagcctgggaggttgaggctacagtgagctgtgatcatgcccctgcaccccagcctgggtgacagagcaaaactctgtctcgaaacaagcaaacaaaaaattgttaaatcattattgactagagccacccattgtgctatcagatactagcccttattcatttactctatttttttttgtactgagattttaatttctgtacttagtaatagctttcaaaattgtcatgttatcccaggaaattgttatttttatccaaggcttattccatttttttttccagttgtttggggcccacaatattgtttcttttagaaataaagttagaaatattcagaataatgaacacttaagagagaataaggagtagaatacctaaaaaaaaaaaaaaaaaaaggaatcaaataaggaagagatagatagtaaaagagaagtggatgtaagcaatttagaatatattttatcaaaaattgctttttaagtggcattttctcttgctgcagaagacattattgaacaaaaaaaaagcccaatgcaattcaatttaaatttatcactctattattttaatatatttactcagggttaacaactcattaaacaccaaattgctcactcttaatgagtctctgacgctaaaattgagctgacttaaattttactgtaaaatatcagcaccattgcataaaactgtaataaaaattaactaaaagctattgaatgactgtggagtggaaaacagatttgtgacacaaaacagaaaatgtagcacacgatatgtggctggcagaaacatgagtaatagcttttattcaccaaaacatgataagcccatttttcttttgctgtattggagtctgtgaaacatgaagtcatgttttctttttttcccccattactttgtacaacgagggccagtggtggaatgatacagtttggctgtgtccccactgaaatctcatcttgaattgtaactcccacaattcccacatgtcgtgggaggaacccagtgggaggtaattgaattatgtgggcaggtctttcccatgctgttctcataatattgaataagtctcagaaagtctgatggttttaaaaatgtgagtttccctgcacaagctctctctctttgcctgctgccatccatgtaaaatgtgctgctccaccttgccttccaccatgattgtgaggcctccccagcgatgtggaactgtaagtccattaaacctttctttcttttgttaaaaaaaaaaaaaaaaaaaaaagattatgatagtgctagtcaatactgagttgactgtcaaaaataagcacactttacattagccagttacttctgggacactgttgaagagtatgtcacatgtacccacaaattagtcaaacatctttaggcatcacatgatatctaaattagtctttttctccttctccatcccctggttgtccatgaaatattggcctcaaatcagcttgcctatggccaccatggaaaccatccatcatgaacagcacctatgcccctggtacaggagtgcatttctccccaagcctacagtcttctgtgtgtcacagcaatgctgagtttcccacagaggtggcgttgatggactctttctcaactctttgctatggagtatcacctgggctaagaagttctgcttttgcatcaaatttcaatttttttctttttattggatttgaattgttctggcacttttgccactatgctgtctctcaagccctaccatcccctccatctttctaaggtctctcagaaccttagctccaacaaaacccccttctttttctctcattataacacaaatttcctgtgaatatcaatgaagcaaacagatacagtgggagctcgtgaaagacaaaggacaccgagctagtattttcattaacaacatgggctcttgtactgtcaaccaacaagagctttgttataaatttattcacaatggcaatggctttgggcaacatttagatggaaagtatttatgaaaaatatactatttatgtttctggataggaaacatactattcatgtaacaaaatatgacatttaaaggaactcactttttcttttttgttgacagtcaccgtgtcatcaaggaaatcaacatttagaaattatgattgtcactagctcactctgagccatggctctacattttatccttgtcaataagcaatccagtgttaggattttaaaaattgtttaaaatatccgtacaaagagttattttctatcttggtccacaaatttgtcaatattttccacagcatcacaattgtcagaaaacacagtgaagcttaagttaaaacaaatctgcaaagaaaaagtcaaaaagaaaactcttccacagattttcagagagatgatttattagtccaaatttgagcattgaaactagcctatattctaagtttaagaaaactgtaattttcatgtttctttcagttcaatacaatttatatattgaatacaaaagagattttcacttattgatatggctttctaggtgtttaaattctaactcaatattttaaggattcagtaatagtagggtttccatttctacatggtaggcattctctagtttacttttcctcttctttctgtagaaattaactatttttgcttcacagtcatttcatgatagacccgatttcttacactgaaattcattttaatgtttggattgagcaatggtttgctttggtcttaacttttatttattgaggtataacttacatacaatgaaaatctcaaatcttacatctactgttcaatgagttttgacaaatgcataccattgtggactccatccacatccctataacaaagcagggaactttttcaccttttcagtaccctgtaaaagttacctcatgcccaattctccccttcctctaagcaaccactgatctgatttctatcaccatagtttactttttcatgttctagaattttataaaaatgaaatgatatattgtatccttttcttgtctggcttctttcactcagcatactgtttctgagactcagcggattgctttttaataatataattacaactgagtctcaaagatttgaaaaagtcagaatttcttataaaattggacattgtggtttgctacctgctgaatgatgaagacgaataatgtacttcagtgccctgagatagtttttgtctactgtaataaaatatttccagtcttctctgtttttgcattcttcaattattaccttgaagttttaatgttttttaaaataatgaattggcctaattgtagcctcagcacaactactaagttacacattcaataaaaagactttttctttgtaatgttatatgttaatggtcagcctcctagatactgatgaagcccatcaatttctactgatagttaagatcaattaaccaattagttacccattttcatttttcctgtatattctttgtagatcacttactaaaatgattttctaagaccttcactttcttaagtaaagaaaaacaatttgactgagacttggccatttagctaaaatctaaaagacctatttaatttaaagtataagtcaagcagagatcttatcttctgtccataaataataagaatgattgtttttcgctaagtggaaaaagtgagatgaggcaagaagttgaagaatgcctagccaggtagcatatgaagcctacaagtttccagctgtgggtctgatgaaaaataatgagacatctgatggaacttaggatcttatttgaaaaataagccatcaagtactttaactttctggtatttcaaaagtaaaaacatatactaatcacttgtttttatttcacttatttgacactacacatctgtcttagtacaaactcatgtttatgcaatgagatttattagactgatagttcatatcttagccccttttcatagagaatcattgaaaaaaaaactgttcactgtgagaaaactctctcccctcactactgatcgcttatagtaccaattcagtatatgagaagacactatttttacaattattcacatccttaagaaaataaaactctataatttaaacaatgggagtataaaggtattttagaacgtatttgtatatgttaaaacaacagcatattaaaaatttaccttgagaaggccgggtgtggtggctcacacctgtaatcccagcactttgggaggccgaggcgtgcggatcaccaggtcaggagatcgagaccatcctggctaacacggtgaagccctgtctctactaaaaatacaaaaaaattagccgggcgtggtggcgggcgcctgtagtcccaggtactcgggaggctgaggcgggagaatggcgtgaacccgggaggcagagcttgcagtgagccaagatggcgccactgcactccagcctgcactacggagcgagactccgtctcaaaaaaaaaaaaaaaaaaaaaattaccttgagaaaaacaagcaaacacatgaacctaaaaaggcaacagcagatatagtgttgattgatccactgccactccagaattatttatggtagcaaaaataataattttcaatttgatggattcttatttaagcagactcattatactttttggaaaataaaatattaacattcaatataatatgactacctcagtcactttagctccacaggtgattgggatagcgctgctggcctgaataataaaatggtaataacctcagttagaacaaataattgttttactagttcagatacacttaacattataatagatgccctcataaggtgctatgtataaatcctttttttgaaaaaaagcttgaatcatcatgtaaatgttttagggcaactcattgcttagagaaatcctttgaagttttcttttataatgcaaaaactcctactgccttatctgttttgtaaattaggttgtattcgtaccagttttgttgaaaagtgaaacatccttctaagcatgaaagttttagaaataatgtctaagtatatctaaagtagctattataggacataaatgcattgatattttagtggatctcagtctagaggtgagaagagggctaatcataataattgggactgagtgtgttagaattacacatctttcccctgctctgataaaaaatatcctgccatagagagtcactgatactaatcagagcatgtcatatctttcagatatttggggacagagaaaaaaaggtgatgaattacagtactagagatactatagcctttaaaataaatattatatacttttggttctacatacttttaaatgaagatggtccatgaagtaagttatgatcaaaactaatgcaagggcttacagcctaagaagaaagtccagaatttagagaatggtgacctgtcttttcttggcaactaatattatgaacatcaatttctcatcactttgtggcttcaagaaattctcccatcatagagatgaatcacctttcttccaggtcttcaaaaaaaaatatatatatataaaggtctgtgggagataagcttagaaacagtggctgaaaaggagaaaaattcagatttcagtcctcgggggtttgcataacaaatgatgaagtatagttttatagctcatctaagtaccttggtgcttcttttgggtacaagtccctgtttattagacaggcatggtgacttctagatacattcttccaagacatcaagataattttacttcttagttttttcacatgttaggcaattccaagattaatcgtgtataaacttgtttgacacttgaatcaatttttggttttacataaacggcattatttcatgcatacctcagctgaaaattggcagttatgtattagtgcttgattttctagaccagtattaaaattaccttccaaaaatgtttcagttgcagaaagtattggtggccaacaggtcttccatgagtcgggacacattagccagtgtcaccctttctctagccagtcagttctatgagaatggtattggaagaacagacaacctacctgcagcacttgccctgtcctgttcatattgtggacaatcatcaaaagataaaagggcatatgaaagatttatggtaaatgtcttccattttctctgccttgagtacactggagttagctttcattttcatagttgcttactatgaatgtcttagatgtagcatgagaaaatcttatattttctttttgtctagaactctgctgttcaatatagtagtcactagctattacataattaaaatatggctagtatgaataagcagataattttaattcttatttcagtataatttccatttaaatttaaaaactcaagcagtgtaaaatagttttcatcaaacacaatttttgttctaataaaactatatttcacctaaagcactgaaaatttagcattgagtttcagtgtgctgttaagtataaaaatatactagattgtaaaaacttcatatcacgatataaattatctccaacaatttttatatacattagatgttgaaataatattttgattatattgggctacacaaaatacattattacaattaatttaacatttctttgtacagtttttaaatgtgaatccttggaaattcgtaattgcatatgtggttcacattatgtttctcttggacagtgctgagctagtacattctgaaatatgtagcaattatttctctatggcttcataaagaaaatgtcaatccaaggctgaggatttatttatgaaaatctaaagacagccggttttcctgatggttcatgccgtgggggaacgggtctctttcccaatatataagaggacaaatcttgggatgggttttttttttttttggtcttttatgacattctttaatgatttctcctgtgcttgccattctgccttgtacgtaatacaccctttctagcaatgggtttaaaggtttttccttcctctcctttttgagctgtaaaatatgcattatggggagaggtgagctgatagttgagaaaggtcattaagggttcagcctggcttagtcggaaagatgtgaattcaaattgttattctcccagatatatactaacatgaccttggggaaattgcttaacttttctaaattttagtttgcttcatctgaaaaaggtacctaatagggaagttttagatattaaaatcaatgaaatttaaaagaatcaagaaatatgataatgcctagtatataacaggccctcaaatgtgttctgaaccaagagatccctgtaagagttaaagaaacaggaaagaaacacgaaaagcggctcaacagtcaaagacaggttaattttgcagaataaacctgagaggggcttctggccaatttttggacaggagcactctctcttacagactaagagtatttattggttttagggcgagagagctttatcacaggcttggaatgtttctgtgtgggggagaaatttatggtggggttggaatgtctctgtttggaagggaagttatcctggggctgacctgtctctggtcggggaggggtttatcttatggttggaatgtttctggactgggatgttatttgtggtttatggtcatgctgacgttagccattaagctgatgccctttggatttaggcagtttttgatcaaggggaactttagaatggtggtgcttgtccaagatagccatgctcccgctgtgtcaatccccaagttttaaatgtgtatctttacttagtgacttatggagtcgtaactattaggacacatacagcagtaagtctaaggcatataccagcttatcagatggatcccctacctggcaaagggaagatcctctttctctactaccttagtccttctttttatactctgtgcagcttttcagttcttccacttgcattaaaattagattacctcttagattagatcaaaagattgtccctggttgtgagaagaaagaatactttaatctagcactaatcccttaatacaccattatatttgggtacattttttttcctagcagaaaaattatttttcagccttctcagaagtactaaaagtcctttgccaacatcagcccagtgcaagttaacctgttatgagatttgttttgtgctttggaaatgcttgtcagacaagctttcaacattgagatgtgtgatttaaattagtttgcataagaaaatgtaatgccagggacaaatttctctctttatcccttcttatactacaaaacagacaaagagggttaggtggttgctttttagtatgcgagtaatcacttgggattcacagaaatattagatgcagtgttattagtgaaaccttagttccctttatagatatgtcttatgtcccatttgtaatattattattgttgttaccatacgcaaactttatttcttagtttggatgcttggtctcaaccagacccattacctccttatcttcctatctcttagggtcacttcatgcttagaggcaacttgttgaaagtggaggtcagcgtgatcctttttcttagaagacatagccctttcatggaacttacgtagctgattcatagcctgagtcagtctcttggatctgtgaaaaaaaggaaaaatgaaccagacatggtgtttgcagtcagtcttctttgaatataaaatatataggcagaggaaaaaattaaaccaggcagattaacctcaaggcataaagacaaatgctaaaatgtactctaacgtgaagggttaagcattccaagatgcccgttggaaggttctttatccaacacttctctacccattccaaccccagtgtaaacattaaataattcttttaaaatttgaatactcaaacaagaaagtaaagcatggaagataatttttaaatcattatgtagtgattagaggaagaggaataaagggtaatgtgagattttagaaataggtgctttgaatagataaagagatattgcaaggatagatgaactcactatcgtctttgcagtatagtatcgttggtgcagaggatttgggatagaaatccagtctgggggccgagatgtgatcattatgtgcaatatcatcttcaaaaagtcaggtcatggttatcagtttgctacaaagaacatcttagtctcatttcctgtccaaggcaggaattttcccctgaacattcctgacagaagataacctgttttgtgctctaatcacccagtcttctaccagaggttgaagtgacattttggctccattttctcgtattttatgcaagaagctgggaattccagcatcttactctgctcatcagggatcctgagggagctggtaatatgcagaaaggatgtcaaagggccatgttactaatagctgtggaagctccgctatccacaaagcagagattatgaaacagtctatactttggctagaagcctaagcagaatctcttctacttccctcaaaatctatttcttagcaccagcaagactgggtctgtccagtgggttgtgggtttggggagaagcagaggaaagattgacatcatgtggaatctggaagagacagaacacatctcttggtgcttttgaaggtacagtgactccatctagtagtaaaaggtgttcaaatgaatggcttcaaatttgaccagattatcaaatgctgcttccctgataaacagctcagacatgggttagaagaggtggccctgggatgggaagcagtgcagactctcatgtatgaatagctccaattctcaaaaaattcttttagttaactgctgtctgtcttcttctacattgcactcaagcttaactctgcacttttaaaatcaacatataaattataactttctctcctatgataacttttcaaatgttttttgacatctattcagtaccgagctcccttttgaaaactgggccatcatttcccaacctccaatttctgactgtatttccataatttatttaaagactcctaacaatggagccacaatcataactacaggtcccctttatatctcaggatgacattcatttggttctaatccttgaactcatttgaagattctaattgctcttgtattctctcctcttctatctggaacttatctccctgataagcatctgtgttgtgattcttctagagtggagattatttctcttgtaaggaaaaaaattaaaactaccttgttctactttctctgttgcatcacaccttctctcttaagtaatagtcctaaaccttctctgttcttctccagacagatcataaatgttacaccccaacctaaaacaaaacaaaacaaaaccttccttcatgaattattattggccttgtatgcaagactgagttgatcccagtctcaatttacctgataccatctatttcaacaataacaataataacaacaataatgaatatttatttagagctttctctgttccaagcactgttctgaccactttatgtatatttacttggttgactctaacaataattactgaggtgggccaggcacagtggctcatgcctgtaatcccagcactttgggaggctgaggcgggcagatcacctgaggtcaggagttcaagaccggcctggccaacatggcgaaaccctgtctctaccaaaaatacaaaaattagccgggtgtggtggtacacgcctgtaatcccagctgtccagaaggctgaggcaggggaatctcttgaacccaggaggcggaggttgcagtgagctgagattgcatcactgcactccagcctaggcaacagagtgagaatctgtctcaaaaaattaaataaataagtaaataaaaataaataattactgaggtggctattactaatttctctattttggtgatttggaaactgaacttagaagttaaagggcttgagcaaatacattggactaaaaggtggaggagctgaggtttgaagtttcaatgcaggcatctggctccagggttcatggtcttttaccatgatgccatgctgctatgtctacttataggagtatgcacgcttttatgttctttcctgtttttgtgagccttattctagcttttatatatttttaaactctgagctccttagagagtttccaatggccagtcaaatttatttaggtcctctgaatagtctctgaatggaagaaagtgtttttcatccctaaagcccacatgtatacttcagatgcacaaggttcaaggtcagggcctgaaggagaaagtatcacagcacaagtaacaatgttaaacttcaaaggaagataaaacctcaaaataagatattaaggtcaaatactagaatctgcagggacactgtcctggttaagaggcaatagaaaggaagtagcataaggtgattcagcaggggagagatgtgagaccaacagcgttagatcagtggggctgtaagagagactctccaaattcatttatggaggagaatgccagaagagtggggagagagtgagctagagattcccaagtcccctggcaacgcgaaataccaggggtactagcacccaggtctttgcttctaatgccattctctaatgaaagggacaaggcatccttggaaaaatggctaattctagcacagagcagggaatagacaagatgagcccggagaatctggtagtgacagaaaggaagaaaatgcagaaagaaaaaggaaggaagacaagggaagggaagggatggtatgaaaggaaggaagaaagggaaggaaggaaggaagtccaatgaatgggattggggtctatttctatctgtgttcttaacaatcttcttcatcagggattagattcttgtttttttctttgttgccttttttttttttttttttttttgagatggagtctcactctgtcaccacgctggagtgcagtggcgcaatcttggctcactgcaacctccgactccgtggttcaagcgattctcctgcctcagcctcctgaaagctgagatcacaggtacacgccaccacgcccaactaatttttgtatttttagtagagacggggtttcaccatgttggccagaatggtctccatctcctggcctcgtgatctgcctacctaggcttcccaaagtgctgggattacaggcaggagccaccgtgcccagcctgttgccttgtttctgatgggagtccaagaatctccaagctatctatatgagaaagacaaaactactctttctatcctgtactgtaatcctacctgacaaatatatccttcatgctccttgtcattttgagcaaatagcctgagcttacctcactttcatttgaacttcctccctctttattgccaaggtactacgttcctttatctctgtgcctgaacaagccccccttgctataatcttcatgctgacccctcattctctagagtatatgctgttttctgcagcagactacacggccagtgcccttgcttggagcagatctagacatcatatcgccacggtcttcattctgaagtaaccttagaagtcactttcagttcataacattaaagcacaggttacaactcatatgactacatgggccatataaaataaatgagtcaatgtgccgaagatcaggaaagtgatagctcaggcaagactgacactaattcttggcctctctgtctaagagacagaagagagtgctagagactatggcacccaggagaacccagaccgaagagggcagccactgctcagctgctgccagtcatcacagcacaggagcaatggaccaatattatgaatttatcttcttttgaaagacaatccagaagtcgagacttttataaaaagtctgaattcattacctgtattaaattttctttgatttaaaacactgatcaggctaaatacaacatacctgtaagatattacatacctactgcaagaaccctgcctctgcatataaaggagaaagataagcacagttgattctcttcacaagccctgtgtcatgcaaacaggattaatagcccagttctaggctaacaatttcatagcaaccatgtggttattatgtgttgtatatatgaaattatgccataatgagctgtctcctaacaagattgtgcaggctataaagctgttttatagctccaagagagttgctcctgagttcattgacagtgcttattgtttctttccatctcagttacttttgaattaaaaagtgctcaccctactctttcttctcggctacaagttttgccatagtgcacagtgtttcttcatcttactttctttaaagaacctttcccatctcttcagttatttctacctgttccaacctccctcctgatagcaccccagtagtgggatggaatgtgctggaggggtttggccagttcttgggggagtttcacagtcacctgtctacagtttcagtgagatgggaatttatcaagctgaaattagcaaaagacaaaactgacattgtttaaacacatacttaacaaaagatctaaccagttcctcctagaactagaagatatttgaaaattagagaggagcttttttttttttcctatcgctttctttaaaacacacttttccatagataatcttatctttttggcatcaacaattatttataattctggaatgatttccaaatctaacttgtaaccatatttccaactacctgccaagtgtctgtgctggaattacctaatggcatttgatcgtggctcaaatgtgctcactcaactttattccgtgggctgctcacctcccctgtgtggagcctgggagcctctgaaggcaaatcttgactcatctctcacctctcaactgatcaaccagtagccacacctgacttaaatgccatctggaatccagttctctttcagctcttccatttcttacaggaacttttacagtaacttctgaactgttactcttgcctctgaactgcctcctttccaatttattattcacaagttccctggagttattttctttaaaacaaaatgacagctttgtttcgttaaaagactgtcaggttactccattccattggccagagggaaagggacaaagcaagtacgtgcccacacaatctctttactgtggtatttggtagctaatacatctttcaagcctcatctacttcatcgcctcctgcaccccaagctggaattacatgtgtcttattgccctgtccctgcatatcttctggccttatagacctctgtgcctttatctatgtcgttccttctacctcaacaggtttctgtcctaccatggattgtctaatgccttctgcacatgttctttatcctaggaagcaaaatatttattccttttcctgcattctttaatacctagtttatgcatgtctcattgcacttattctaatcggagcttgttcttgtcattttttttcatatttttttccttttgtgggggagtttaggacccaagtctttgtcctcttttggtttaactagtaccttgcacagaaaaggtagtcaataaatgtttgaaaaaaaaaatcccagtttgataattagttgaaaatttcttcagttaatgaaaacttggtacaaccaaaggaaaatgaattatcagagtttactatgctccatgagattcttttcatacaagtatgctgcagaggaatggaagagtgggaatataaataaatatgaaaaattcttagaacaatcttcttattatttgagacagagtccagctctgtcacccaggctggaatgcagtggcatgctgttggctcactgcaaactccacctcccaggttcaagcgattctcctgcctcagcctcccgagtggctggaattacaggtccccaccaccacgcccagataaatttttttttgtatttttagtagagacggggtttcactgtgttggccaggctggtcttaaactcctgacttcatgatctgcccgcctcggcctcccaaggtgctgggattacaagtgtgagccaccgcgccctgccagaacaatcctattttctaattggggtttttctttgttttttgtttctttgtttgtttgtttgagatggagtttcactctgtcaccgaggctggagtgcagtggtgtgatctcagctcactacaaactctgcctcctgggttcaagcaattctcatgccttagcctcccgagtagctggggctacaggcgcctgccaccatgcccagctaatttttgtatttttagtagggacgaggtttcaccatgttggccaggctggtcttgaactcctgacctcaggtgatccacccgccttggcctccaaaagcggtaggattacaggcatgagccactgctcccggactttttttttttttaatccttctactttactcatactctccaaagttaattcacacacaacctccccaataaaatggaagtgaggtttaaaatcagaccataatttaaccagctgaccaaatgccattttgtataagaagataaaaagctaccattgttgttatatctcagagcagaagctctttcttcattttattctttaaaaacatcattcagggttgggtgtggcggctcatgcctataatcccagcactttgggaggctgaggcgggcggatcacttgaggtcaggagtttgagaccagcctggccaacatggtgaaaatctgtctccactaaaaatataaaaattagctgggcatggtggtgggtacatgtaatcccagctactcaagaggctgaggcaggagaatcgcttgaacccaggaggtggaggctgcagtgagccgagatcaagccactacactctagcctgggcgacagagtgagactccatctcaaaaaaattttaaaaataataagtaaaaaataaaaacaccattcaatttatagttagcatgaagctacaccatcaatctttcctcgtgttcatgatcatggctcagcatttttctgaagtgtcattaataagccatgttagcaggaatgacctacacatatgcatgtcaggagggcttcaggccactgctgtctgtgtgtcaccttgacgtcagccttgataattgtccagggcctccaacttcacagcagtacctgggcctatgtcaggttgagttctatgatcacacactattttcatcagaaattttaataaaattatttttttctcagatgacttcccgcatactactaagtgatctgggagaaggagtcttagggtgtggatgggattctgccttgggcatattttgctctactgggccctggagtctttgcagatgctgtcaagatactgcacttttttttcttttttgagacagagtcttgctctgtcacccaggctggaatgcagtggcatgatgtcagctcactgcaacctccgcctcccaggttcaagcaattctcctgcctcagcctcccgagtagctgggactacaggtgtgcgccaccacgcccagctaatttttttgtatttttagtagagacagggtttcaccatgttggcccggctgctcttgaactcctgacctcaggtgatctgcctacctcggcctcccaaagtgctgggattataggcatgaaccactgcgcctggccgatactgcagttttgatggccatcactggtacaacaccctgcgtatgccaagactgtcatgccttgtcagctataataaaaagcaggagacaaatggccttttgttacctgaaatgatggatcagtatgtatgtgcaaggatgcacgctgtcaagttcttgtgggttaatcatgccaggctgatggaggggctccacgagttccaaagtagaaggagcttgaactccaggctgtggctttgaagcagttgttttctctggaattagctaatgaggctctctttgtttgaggattggaaagcctccaaaaacccactcaggagggaaattaacaaatgtctgttttgttacctccggataaatcttcatgatgaaatgtgcagccggtccacctcttcaatcttctctcttcttcttcctcagtggaagctcaattaccatgaaggccaaaataaataaataaataaacaacaaaccaaccaaataaataaataaagcagataaaccgtggttctttgcttaaaaaaagttgcagcaaagaaaagctttagagtaatttctagttagaagtggctgtgagattcactgtcttctggtgatatttgaaatatactatattcatgcaaatgtttctgattatttaaacacattatctgtatctataattatcagtagctgctggcattatgtgagcatgcaaaagtgggaacagcagcagtaacctgactcatttcaaccaggatggaccatctcagagggtcacagttactaatctctgcatgaactagattttataaggtattatgattctttcatagcttgtaacttttcattgatcatcaactttactgatttttgttaatactggaaattttaataaatgggttgtgcacaggtacttattgagcatctattacgtgccatagaatattctgattattaaggatgtcaaggtatataatccagagtcacggttttcaaggaactcagtcaataattacaagctaatacatgggtaccactgttctaggcacagcgtggcagaaaagaatagcgtggacacacattcaggggatttaactaggagaaaacagtaaggaaggggatcttagcagaggtagtatattaacagatgtatatgacaacttacactgctgtaagtcatcctgtttggctggcaagttttgctttagaaactgggtaaatattgttcatgaaacttctgtgtaagtttcacgtgaatgttttcctatgtgtatgtgtgcatgcttatttgcatttgtgtgcacttgtgggtatgtgtatttgtcctgtgtcacaataaaaggtatctatttctggactttgcagtcaaaaacattggaaaactgtctatgtaggtaatggacacaatagaatttagaaagcaacttttacaaacattgcagatttgtaattttctaatatcattgatatataaagctgagtataccagacacttgtaaagaaatgatcttttccaatgaaaacacaggtgttaaacagaacctttcttctggcctacaaatcactcttctaacacttggaaaaaattaaagaaatattcagcaatgtgtagaatttcaatcccagagagacaggaagagactgtatagctgcagatgcaatatgcttgttattttggcaaaagcgtaacataagaagccaccaactctcacagaggaagcagagaaattcagtatttgcttgtaacttagatatttctttctttgttttccccctaagaagaacatatcttttctggtgggaaaagggaatttagataattaaagcagagggaataaacattttcaggaccaaagagaaaatagccgtttgagccacatatttaaatgttaatctacaatttttttttttttttttgagacaggatttcactgtgttgcccaggctggagtgcagtggtgcagtcttggctcactgtaacctcccttctcccctcttgggctcaagccaacctcccaccttagcctcctgagtagctggaactacaggcatgtgccaccatgcccggctaattttttgtcaagacggggtctcactatgttgcccaggctggtctagaactcctagactgaagtgatccaccagcctcagtctcccaaaagtgctgggattacagatgtgagccaccaccgtgcctggccatcaaatgtttttcatagtggactagggctttatgatcccataaaaattatttccctcatggaaccactccatttatgtattataaagctgtcaacatctggttttattgataaatatccctggggtttttgagctttttcttttcaacatagtgcctgtgttttatcttgacctttgctttaaaattactgctagatgtaatgaggattctggaaagagcatggttcaagattttgtacaattgatataatgattctgaagcaaataatgggaaaggggagagtttcagaatttggtggccttagggtaagcttatgatttgttttatctttcctcatatctacctaatgctgtgaaattttgggattagatttggattggggacaaatgaggagtggaaatagtggagggagaaagggttaggaaagttacagaacttggcaaggctcttggaggtggtggattgatttctctggtgttgtgaagtgtcatcttctttcttcagttaaactgaagtacaggcaagcttctcctgctgcccctcagtttcactgtgtcaccatttttagtagggataagcagagacttgttgttggtaaggacaggaaggaaggtgatgctgatgaatttttgctggtgctaggttagctgccagccggcctggcaatggctgtggtccagccagcctggggcgcttctagtattctctgtcatggggcaatatgttaacgaattaaaatgccaaatagaaatgagacagaattccaaagacatgtaaactgaaaaacacctgtccccatttgttgattttttttttcctgcatatacttaaaaaaccccaaacctttatgtaagagtctcaggagtgcagtgaaaaaaaagtgtttattgacgagccatttccaatttaggccttaaacttcaagacccatttctaagacccatatgcttcaaaacgttctatataattcagctcaaaaggatcttcctctcctctagatctataatgtttattgactacatccctcaaagagcagtaatgcatcatggtgaaataaaaattgaactgcaaatccgaagacttgaattctagttcctgatcgtttttcatagtgtatttaatcacacagtttaacccctaggtctccttcactgtgactcattatggtgagttcgcgtgagaaagtgtccaccataggacactaaattcaaaagagtgaccagtaatgattgttgtcccaaggatgtccaaatgggaaaaccattatcagtctacactctaaaccagaagggacttattccaccaaaagaggttaagggctccttaccacagtcacaaaaccagaatatatattctttcagagaaaacccggatacagggcatgagattagaaccctagaatggcatatcaaaaacttctggagtctgttgagtagaagtttggagaataaacaaattgatagattgatatttgaatccccggcagagtaagaggaataataagattttgaatcaagaagaggaattctgccacatgcaactaggaagaaaaaagcaaattaactgtgataacactcattagggattatcattatatctttaatgaggaggtaataaagactgattatttactaggcatcccttattgatccctatttatcactacgtagagtaaaatgtacaatttttcctttcacttgtggatttcattaatttatacagtcatcacatattgattgtacatatactgtataccagacactttattagctttaagaataccaaaacgaatatgccagatatagtatctaacttcatggagtttgtagagagattttttgaactgaatttctcagcaaactaacacaagaacagaaaaccaaacaccatgtggtctcactcataagtgggagttgaacaatgagaaaacatggacacagagaggggaacatcacacactggggcctgtctgggggtaggaggttgggggagggatagcattaggagaaattcctaatgtagattacgggttgatgggtgcagcaaaccaccatggtacttgtatacctaggtaacaaacctgcacgttctgtacatgtatcccagaacttaaagtataaaaatgagaaaaaaagatgcacaaatagtgtcacatatagtataataatgatatggatatggcctaattcatagagtcaacattctgatactaagaggaaggaaaaatcaaaacaaaataaagaaaaaacaaagcagacagtagcctttaaccgtttccttttaaagaaacattgttatctgggttcattacttgttagaaagtaatgtgaagcacttaataaacttcaggtggtggtattaggtaattaacatgtgaaattcctcatatggttatttaaatttcatggtagtatttaacagttttcatgtttatggccttttcctgcaactaagttgtaaaatccttaagggaaaggatgaggaaaggaagacaagagagaaactagcatttgttgactggctactacgtgccagccacagcactagctactaaacctgtgtcactttatttaaatatgaaggtcagaaagcatttctcatgttcctggtatctcctgcactgcctagtataatatttcatacttacaggtgcttcatcaatatttgtgttggttgacttagcaatttaaactgcttctaaatagagttacgtgagtttttccccaaagactcatgcccttttttaggaggcaaactagccctttccatgtcaccttccttaagaagcagggcaaagaggtgacagtttttatactgaaatcagttgtttaattgttcacccatttatcaaagcctctgtagagttaaagacaagtacagtgcccatgtaccctttatgctgcaagttctggacagatagctgtcaatgcctgaaaatagtgtaaattcactgggtgaagagagcaacttgccagggggatgtgatgtagccccttctagagtatggggttttctacttgggcatagtcagctgctagtttgttggattgctgctgctggggaaagaccaggccacttcatgatggaatgcgtcaacttttggaaagtcaaattcaggatgcagtttcaactagtagtaactatatttttctatcttttaaaaagtgaaggagcaacagaccagtctagacacatggacgggctttagggctcagttgctaaagagatagaagtaaaatattatagaaaatgcttatagtacatgttaagtgagaaaggtaaggtaaaaatggtttatgacctataactgtgtgaaaactaaccaaagagacacgtatcatttaaaaagatttaatgttgtgcctgtaatcccagcactttgggaggccaaggcgggcggatcacaaggtcaggagatcaagaccatcctggctaacacggtgaaaccccgtctccactaaaaatacaaaaaattagccgggcatggttggggggtgcctgtagtcccagctacctgggagactgaggcaggagaatggcatgaacctgggaggcggagcttgcagtgagctgagatcatgccactgcactccagcctgggcgacagagcgagactccgtgtcaaaaatgaaagatttaatgttggtcaaattatacacaacgattcaacagtactggaagttgaggaggacgagcaagccagatagcaccaatgatcatgaataaattccttatctttcagaaagcattattgttcagtggtttcaagttttggatgtgcactcacattgcctgtatggaatcctggctccacaagtagttgtgtgagattgggaaagttgcacttgtttaatctgtaaaatggaaaatatctgaggattaaattaaaatatagctggatcatgcatagcataatacttggaatatactaagtcatgaataaatagtactgttgtcatttctttgacattaattattaaggcaattaggaaattttccatctagttaacatatagcaaatcaaactaagctgtgaaaaatatataatatgctatggtaataagacactgaactgtgatgctattattggggtctgtctaaatccacagaagcatcagaaattcacataaatcaatgctaatgtcaatgcctagtaaattatagtctcagaaacatgaagattctagatgttttccccttctttgcacactttgtttatatttcaccctattactattatcacctatatttatggtttttcaatcatttgtgagtgcttggaggaaattcattggttcagcagttgaaccagggtattgaatagtacatgaggactctcagactctgaagagctggtcgggtgtctctggctaacacatttccagtggataaagagctgctccagggacatctccttcctctgcagtacagtgatctttttgctggtgactagaaagtccaggggaaaggacagccagccaaagggtggcaaactgatggaaagtgggggcaagctttctgtaaccatgtaaaagaaactgccaattcccatgaaaatccattgtctctttttcttattaacaaatccccaacaagccaccatggctcaagcctgtaatcacagcattttaggaggctgaagcaagagaattgcttggggccgggagtttgagaccatcctgggcaacacagtgaggcatgcatctctacataaaaattttacaattagtctagtgtggtggcacatgcctgtagtcccagctactcaggaggctgaggtggatcgcttgagccaggagttcaaggctgcagtgaactaggatcaagccactgcactgcagcctaactgacagagcaaaatcctgtctctaaaataataataattttaaaataaaaataaaatgctaaaatgaaccaaatctccaattttatttgaaataacactgccttagttttttaagaaagaaaataaaacatttctcaccttttctaacagtcaagctggtatgttgctttaagtttggtgagtgtcaggtatgcaaaagtgttgagtggcagatacagaaagactgcttaaaggcatctgactcagttgcaaaggacatcctttgtccttcttgctgcctgtactatgaatgtagtggttggatcttcagaagcctatttaatcataaggtaatcttaaagatggaagttatgattaagaatgccagaacacaaagataaaaaatatagaagtctcagatgaaatttctgaatcagccttaaactataatgcttaaactgtttaaatgtgaagggataaaatttggggcatttatgccactattttatgttatcgttgttacagtgagtacaatttttaattggtatgtgtgtaagatttgctcagatctcaatcaatggttctaagaggaaaaagcttaattccaagctgcctctctcctgtctatgatatcccaagcatcacaaagtacacttccagctcctcagaccctgtccttgttttgcattgtttagccaaaccacttcttaacttcaagtagcaaatagataactcacattagcattaggttctcttattacaagtaattgacaagaattgtaccagtgattaggtgttgcccaaagatcttttaaaattccatgtgacccaaatactaccaaatcctaaaagatttaactaactggctcactaaccaatgcacacacatacttacttatttcacccagtatgtgttgactaccttttgcccaccaggagctaggcaggttcacagtgcctagctcccaggcacaaagataaatcagaaaccattctgtctaagtcaacctttcattttagcttagcaggaaacacactaaaccacggctgaaatatgccaggaagttggtagctggtgatgcctctaccacaccgcagtgcggttaatccagcattcgacttagtcgaaatcacttttttcttccaatactggcatttttatggatggatggatggatagatgaatatcagtatcaaaaggtccatgctttattttctaataacaattcatgtccaattatctgactgccagcacagttatctgctatggttgttagaaactttagaaagaagtaaatcctccaaaattgtcactcttaaaatctgagagaaaacagaatgaatagataagagatgcttcaaggcagttcagctctgtgatggttccgttgagatagaacacacatatacaaagtgtttgaagtaagaatttccttcgaggagaagcacaaagggaatagaagacccagcatttgttactggccttagataagcttactgttcacttatttatcaatgtaaaaacgcccagttagtttttagctcaaggaagagaggacatggccaaagatggccttcatgaacttttttttttcctgtgtgaagtatggaaactcattttcagtattggattttgactggattgtcttctacccagaagctggctctgcagaagttatgatcagatctttggaagtaacatttgatctaccgccgaatatagatccccttccttccctcttctactccctccttgcttttccttcttattacactgatttcatgcaaaattaattatcagtcctgtcacatcttgcactgctaacagtggtcagtattgaattatggggaacgtgaacagaattttcagcagcctaattgcttctcctgtgcccagcaaaatgttacgttaaatactcacagcaagtagactagactgtattctatttccataacaaactggcgggatttcattaccagaatccctagcatctactcacatgactctttcctaactgccctatcagactggtcttggataaagtaaattcctttccaaagctgcagctgcctagttaggtattgaaatattgtatccacttgcaggtcaaaaaggaaaaaataacaacaacagcaagtggtccatgagagtgaagtggaggtattaaaactaggctgggtcttctcttggaagatgacagactgagtcccacagtgcctcactccattcaaagcaattaggagtgtaggattgcagtgacaacggatctccagggctatcatagtgctttacctaaagataacaagagattagcccttagtgacagatgactaatatattctgtggacactgactgagagtttgggagtttctactgtccctctcaaggagcttagagaatatgtacacgggaagacaaaaattaaagaaataaatgtaatgcactgtataatgcataatgataaatgcatcttcaaggtacctaagtaatttagaagatattgcagtgggagaagagtactgagatattcaccaaattcctaccagaaaaaataacacttgagttggctgatgaaggttgactaggagttcattagacatagtagagaaagtcattttagaaaaaatgataataaccagctttgattgagagctcaattttgcttgtcctttttggaagtgtactgtatgtatgtattagtccattttcacattgctataaaaaactgtccaagactgggtaatttataaaggaaagaggtttaattgacccacagttctacatggctgggaaggcctcaggaaacttacaatcatggtggaaggggaaacaaacacatccttcttcacatggcagcaggagagggaagtgcagagtgaaggggggaaaagccccgtatagaaccatcagctctcatgagaactcattcactatcaaaagaactgcttggggaaccgtccccatgatccagtcacatcccactggttccctcctacaatacgtggggattatgggaactatagttcaagatgagatttgggtggggacacagccaaatcatatcaatgtattaaaacagttaatctttatagtgatagtgattctttgaggtattattcccatcttaagaatgaggaaactgaggcactgagaggttaactcacagctagtaagtaagagagcaagaattcatacccagcagtatgaagaagtgaaggatgagttgggaatacagaacttgatcattgagagtcatactagtcacaccaaggaagttagagttaatcaattgacaacggggagctcttgaaaagaactgacaaggtcagatttgcattttagaaatattgttgtggaaacagaaggattgattagaaggaagccagaactggagcctggaaagttggctacatggctttcacagtaatccaggaaggggatgatggaagagaggctgcagcatgggagcaacagctggagtgaagaagagaggatatgtgtgggaaatctttaaggggtacatttggcacaactaggtgatagacagaagtgatgggtggggagtagaattggtgaatctactcttctaactgcctttccctatctccagtctcaccaagtatcttgaattaggaagcaaggaaaaggggtcaattaagaaaaagggagagcaaggttaatggagaacaggctcaagaaggaagaatttaaaaatggaataaggcaagagaggataaagaaactacctatggagtgctatgcttgttacctgggtagcaaaataatctgtacaccaaatccccatgacatgtgatttacctgtataccaaacctgcacatgtatccctgaacctgaaataaaagtttaaaaaaatagaatgagttaagagatttggtaatcttgagaaatgtctgtaaagtgtccatgtattccatgggttcaatggggatctgccattgaaattcatagacctgaatatcagagaagggtagaagattagagaatttgctgtttggatagtcgaactccttctttcatagatgaggaaagtaaagtctagagaaattggagagacttgtgttatatcacttagtttgttacagagctgaattcataccacccatttccatgtgccctcaaatagtagccgacctcttccttcctgggagagaatccttaaccaccaagtcctgatctcataggcctgatagtcaatccttggaagggatactgtggtgcattgcttagatccgtcccacttaaccctgggacccacatactcactcaccaacctgctgggagtgctggtcactgacctgtctcaactaggttgactccaggaattgctctctgctaaaggattttttctgtttcagggatataccaaaatgaaaaaataaaaattttatataaagagcgtttgttgcctgggttgtatgcctgtagaatacattcagaggtagaattactgtttcaatagtattaataaatttttacccaatggcttttcaaaagtgtgcatccccaatggcttttcaaaagtgggcatcaatacacacttagaaatatgcagtaggatcaatttcaccaattatctcaccatctttttagaagctaattcattttgcattcttaaattccactaaatttcaagagagcagttaaagaataatacaaaactttgaagcactaaatgtatatatttaagatattatgtcttctgtagtcaatggcaaatatcaagaatagagaagatgcacaaaactgaccagtagcagaaacagagatccacattctaatctcacgtctttctactttggttaaaggcaataattcctatttcactcactgatgagtctttccctaacgagaatgtgactaaaaccagttgagtttgcgaaagggatgtagaaagagacaattaggtaaaggtgaaaaatgagactgacgaagtgacgttggtcaatctcctgtttactgagtgcaggttaggaaataacatcaactaggttttctggaatttgagaactgagtattataaaaacactgactccgttattattattattgtcatttttaattttggattcagagataggagctgaatagcagcaaaaaaaaaaaaaaacatgcttatgaagagctgcctagtgaaaatgacactcctttggcttaggaagagaaagaaaatgaaagccttacttctttcttctactgattgaagtttttactttctgctgtttacttgggtttttaatattgaagacttctttgtagtctctgatgagttttgaagattaattttgcagaagtaagataatattcctgtttaccagaaatatttctgaccataagactcattatttatttattatggatggtcattttatatatttttaatgcttatttaagactccggagtacatgtgcaggcttgttacatggatagattgtgtgccactgaaatttggtgtaagaatgatcccctcatcattcttagcatagtagtcaatagtcaggttttcaagcctcaacccttccctccccctctagtaatccccagtgtctattgttgacatatttatgttcatgagtactcatagtttagcttgcaattacaagtgagaatatgtggtatttggttttctgttcctacatcaattcacttagggtaattgcctccaggtgcatccatgttactgaaaagaacatgatttcattcatttttcttttctgtggctgtgtagtattccatggtgtacatgtaccatattgtttttatccaatccaccattgataggcacctaggttgattctatgtctttgctattgtgaatagtgctgcagtgaacatacaagtgcatgtatcttttttggtaaaataatttgtattcctttgggtataaacctagtaatggaattgctgagttgaatggtaataccattttaagttcttttggaaatctccaaactgctttcaacagtgtctgaactaatgtacattctcaccaacagtgtagctttccctttcctctgcaacctttccaacatctgtttttttgtttgtttgtttttcactttttagtaatagccgttctgactggtgtgagatgatatctcattgcagttttggtttgcatttctctaactagtgatattgatcactttttcatgtaattgttggctgcatgtatgtcttcttttgagaagtgtccgttcatattctttgcctatttttaatggagttatttgatttttgtgttgaattgtttaagtttcttacggattctagatattaggtgtattttaaatgcatagtttacaaatattttctcccattctctaggttatctgcttactctattgatagtttcttttgctgtgcaaaaagtctttagtttaattaggtcccacttagcaatttttgtttttgtggtaattgcttttggagatttagttgtgcattctttgccaaggccaacgttctaaatggtatttcctaggtttccttctaggatttttatgatttttaggtctcacatttaagttttcaatctatcttaaataatatttgtatatggtgagaggtgtaggggtccagtttcaatcttctgcatatggctagctagttatcccagcaatatttgttgaatagtagcgagtcctttccccattgcttgtgaccatgagattttatgtgatgttgaaacccaaaactacccaaaggaattaactactgctggttaattgtacctatattaaacactttctttatagtattttccttatttgggggccatctcaaagtcctaacaatcagaatttgtgtcttctcatatgatttttactcagaattacacagaatacagtattcataaaaatgaaccaaccataaaatatttattcttctactgtgtcaggtagtcttgtaggttcctaagagataccaaatacaggttcataattcttgtcctcgaagatctcccaatctactgataaagcaagtaccatatgcatgaaaagataaatgtctttataaagtttcttaatcatgagtgcccatttgagtggtctgtgggtttttagaagttattcacagaaacgaggctccttagttctgacatggggaccatttgtttttattttcaaaaagctctatgaagtgatttggatgtaaacctctgaaaagaagttattgtcttaaatattcatgggaggctaggcctacttgcatctggagttggctccagaagtctttacaaagttagcttggcattggctgggtttcaaagaataaatagaaggggataaaccaagaagaaatgtggatatatatggggcacgattgaataatttccagaaagaaatcagatagtacaaggagtgtccagagaatgatgtatatggctgaaatggaagtgttatagaatggtagttagtaataaagctttaatatcacaagcatattgaaacaaattgcatgtaaaacactgatgtaataaaaagatttagattgttggagtattttgatgtcaagtacttgtcttcctggtgatgtgaaaccatgcatatgtgttttaagtagaaatgtgactccatgggaaaacatgtaagaacatgagcaaagatggatgagaatagggtgagtgtgaagggaaaacttattaggatgctagttctctgaggttataaagaccataaggtagtggcattggagtacaataaaaagatgacgacattttaaaggaagaacctccctggcagcatggctgaatagacctgggaagaaagagaatttatgcctgaatgaatggaaaactgatgattttgtatctcaaagtggataatttatttagaggcaactggctttggaggaaagagaaaatgaggggttttctaatgtttgagatgatagagaaacaggcaagcatagatactttggaggcagttggatatgtagcattggagtcaaaggccaagtaagaggtagagaaagagattttggagaacttctcatggaggaaatacttgaagtctggagaatggatgagacctgaagggaataagatatgtagatagagacaaaagttgaagggtaacactcagactttgggggagatctacatttaggaagtaggaggagaaaagtaaaggcacagtaagaaaaagaaagattcaactaaagaaaaggccaaaaaaagtgtaacccacagagaaaagagcatttctggggctaaggagtgatcaacactatcaaaatactacaggtaaactagtaaaacaagtaatgtcagcattagtttccttgtctgcataacaataatagttattatgaggtatttttgtgaataaactgaaatgatgactattaagcatttagcccaaggctaggtaaaagaaaaggctagccaaaagcatctgttattataaatataataattactaatcagcacccaactatgccgggcacttttgtagttacacatttgaataagatgcaaccctcaatttcaaagaggtaagtgtcaatacaaagataaagatgtgaagaatagatagataccattttgtggtattgtttctacaagaaagatgtaaatacaatggaaaaggtgccagtggagaaaagtgataactttatgagtcctttgccagacataagtgatagggttttctgtacatattacatgttattcttagacttgtgcaatttgctaagccagtttatagactcttgaatctgtgtaattgctatgttcttgactcaaacctgaagggacagactcttgggagggaatagccaggttcagccttttatctttcttctgtgcacagaactcttgcttactttctccaccatgggtaaatcagaatggctttgaacaatgagcattttctgcagcctgagcagcagttgctctttagacccaatttacaaattaggaaaaacaaataaattatttatagcatgacaaaaataggatttggcttaatccaacagctttctcagttacaatgcttgctgctcaagtaatggatcaattcacagttggctaaatccaggtgtttttgaacctttctatttaaagtatggttctctgaccagcagcatggagatcccttggatatttgtttcaaatgtagaatctcaagccccactccaaacttaactggataagaatctgcgttctgtcaacaactttagaggcactgtatgcagattgagaggcactgggctagaatactgaattagggctgaggaacatcatcacattctccacgctgtcccagtatactgttggatgatgtcagagcaacgtgaaaggattttgggttatggtttagctcatagtccatgcagaagaggccataattagcacagggtaccatggcacttctcatctgagacatgtgacatggatttgcacagatgagtacttctgacctattaatgttagtagtagaagtgatccttttgtcagtggaaaaagctgccagactcagaagcaagtaaaacctgaagaatcttttagaactgttagtcaagaacttcataggtggtttatataaaatttattgtcacttgctaactgcatggctttcggcatttcttaacctttctaaacttcaatcttttcattcatggaacgtagataattattgtacctgtatgacagggtcaatgaaaggttaaatgagtgaagatacataaagtagttagcacaggatctgggatttagtgagggcccagatactacttgtctgttattatttagtttatttagtttatttttatttatttatttatttgagacagagtctcactctgtcacccaggctggagtgtaatggcgcaatctcggctcactgcaacctccgcctcccaggttcaagggattctcctgcctcagcctcctgagtagctgggactacaggcatgtgacaccacgcccggctaactttttgtatttttagtagagatggggtttcaccgtgttagccaggatggtctcgatttcctgacctcgtgatccacctgcctcggcctcccaaagtgctgggattacaggcgtgagccaccgcacccggcctattacttagtttattattatttcattattattgagtatctattatttgatcttttatgtaataatagtgaaataatagacttctgaatatttgcagagaaatccaataattttaagtgatattggcaaatactatgatattagaaatctaggtggtacttaggaatctattttcttagtctctattctgtggccagggaaactctttattccttttgtccctgctatatttgagacaaagatcttgaatgcatccactcttccctaaggaaatgccatcaactcatcatccccataccatgcaaatgccttttacagctgcagagcaggtgtgggcagatgcatacagcagcatatgaacacatgtttaccctccttggccacactttgtcttactctatgttttctaggaacacattttggggtggaaatgcctttattccatttatatttagtcaattatctggtttagcttccattcttacaacctaattaaattcagcccatcaactcagtttaaggcatagcagctgtagacacttcgtttatctacttggagagaaaaaagataagttggtacaggggttccccatcttgtgaatgcaattcccattcaactacatgcaattgaatatgagcatgggatggtattctggacctaatgttaaattctgctactaagctatcatagttgaaataatatactcaactgcaactttacatattttccagggaaatgcaaatgattgcttttaaaggaatgacaactcatttgcctgcagatttcattcaggatatttaattctgaactactagcctatcacccattaactgccatttctaatatcttttgactccctcaaagagggaaactcataatttgtttcacttagaatttacatttttttaatattctagaaaccatgaaagaaatcactgagtccttagctcctgttttttttttttttttttttggttgttgttaaattgtagaatattagaatgtttcagttttactgattgtatttgttaatcattcttcttccactaccgttgtcttttcccatcctcttggaagggtgttagagaagactctatatctcacctacagatgatttcacctagaagcttagcctcccttcatgactactgttaaagataaagactgcctttggttgacaccataacccacaagaaatgattgcattcctcctggatggggagcaggtgacattgcagatgttacacttcccacatggctaagccactgatcgagattaaaaattcaaaagacaccaaagagccacgttattgtcccctcacagggagctctagaaatacatgacctaaattgtttcttctaagcatattatcagttccattttcaaggtatcaacatgatatctttccattggttcacaggaagaccaaagagtgacaagagaaaaatgtttccatttgtagtttttctacagactcatggtataggtcagcttttttattgtaaatatttaagatgtacatttaaggtgtctccatatatgtatatatatatatatgtatacatagtgaaattactagtagagtcaagaaaattaacatatccatcatctcagttacctttgttgtcataacggcacataaaaatctactctcttagcaaatttccatgatacaatacagtagtagtaactatagttatcatgctgtaccttaagtctctagatattcgttctacataattgtaactttgtaccctttaacctatatctccccatctcctcttccactgcatctggtaaccaactttctactctgtgttactatgtatttgactgtttattagtgtcgacttaggagtgagatcaaactctttcactctctctttctttcccgtttttttttttgtttgtttttgtttttttttaaacaagatctcacactgttgcccaggctggagtacagtcacatgattccagctcactgcagcctcaacttcccaggctccagggattctgtcacatcagtgtccttagtagctgagactacaggcatccaccaccacacctggctaattgtttgttgtagagatgaggtctcactatgtttcccaggttggtctccaactcctgagctcaagtgattctcccacctcagcctcccaaagtgctggaattatggtgcgagccactgctcctggcctctacagtatttttcttgctgtgtctggcttatttcacttagcataatttcttctgggtccaatcatgttgttgcaaatggcaagatctccttctttttaagactaaataatatgccatttaatatgtacatctaccacaatgtctttattcctttagcatgaggagaatattgaacattactttgagaactagaaaaaaatgaacatgtgggttattttagtggttaaaaaaaataggaaaataactataaagacatgaaccaactatcaggggatgtttgggttgtttccatatcttagctattgtaaaaaatacaagaaagaacagacatctctatggggtgcttatttcatttcctctgggtatacccagaagaacaattgctagataatatggtagttctagttctaattgtttgaggagcagccattctgatgttataatggctgcacctatttatattcccactaacagtgtacaggcattccctgaacttcactctatattttatttcccaaatgagatggaagtacatggaataaagtagtattcaagccagtttagtcttcacattctaaatcacccctctatgaaacctctccagattaccttttctccccatgtggatctgaatatgctcctttattcccagttgtcctgtatgtatccagttttacagacatagcatctgtaaaggacactgttgtcttacaccgaagtgtagcagttaagaactcagggtttgcacctttccagctctgtagacttgggccggcaactgagcctctttcacccatagtttctttatctagaaaacaggagtgatgcatgtctcataggaccggtgtaaggattaaatgaattgtaactagaaaattgttgggaaataccaaatataattatataatgactagcctctgtaggtataaacagtttaattacttataagtttacatgtctgcttatattaaagagggaaagacttagactgtagttcattttcatgtctctgtaacacagcactctgtttagtagttacataaatagtgattgaatgaatgtacaagtgagtgaataatcatctcaagtctatcctttgtcaaggaaaatttccagatagagttctttctcctttagggggtctttaagatggtcccagtgccagcccaagaagagccagagctagatcttcaaggcagtctgggacctggatcctcccctccagatgcctagaggtatctcctgggaccatgatgggtctcagtcataccccttcattcattggttcatgtcttcatagtcattttctttttttttttttaaaccactgaaataaccctcattgtttgtcattatttctaatactcaatgtagttttaaattttctccccatgctcaagaagagaaatggaaatatggcaaacatctccatgaacccacattttctcacatctttagatcaaaaactcttattcttcagataaacaggttgtaaaattttcagtgttgaagagaatgaaatatgacatttgattttattgattcattgcttatttttggcagaagttatcctttattcagtttcatctctttatgtcttaccacctctttgtgaactagccacttgccttgagggtttacaaattcaagatttctcagcacgattagccctaatagtatgctttccttccaaggtttccagattatccaatacagtattatttctatcccaatcatgtttaaggattattattttacatagaaataaataaagaaaggggaaccaatacaaagtgttagaaagacagctacgattaatatattggactggcccattatcagaccctctagattttacaggtagctttctgatcagaaatctcgggtgagaaatagtaagaatgatggccttagttaaatcctctatcaatatgacaggttaaaaaaaagacatatgagttagttaaaagcacctctcccttggtaactctaagtgttttagtttttcagatggcaatttgtgactttctatagctttttcttgagatgaatttgtggaccagttgaatagtgatagaaatacaggacttgctaaaaattacaaagtgtttatggcagttctggcaaatatcctctagatcaccagataatgccaagtcagcaatattatcaataatgagttgcctactaagaaccaggggaatgggggcatggactgaaactttaccatagacatctttgctattctggactgttggtttgcttcctagtgtacttctgcttatcctttcttccctttggcttcattgagatcctcagccactgagttctatcttggtgcattccagccacaccccaaaagaataacaagaatgaataagccatccatctctgaatgtagagcaggttggaaaatgataaccttattcattattattgcttgatacatttccgaatttgtgttatctgtcattaaatagctaccacagccttctttcattcttctcggtatcagtttaataatttgttcaatgaatatgagaaagaacaggatcacatccagattttaccacttactggctgtgtgacactgggtatggttattaaccccatggaacctcatctttaaagttcagatgatggtaactaactcatgaggttgctagggattaaatgaagtaccatgtttaaggcttctggcgtgggtgctgagatatagcagataagagatggtagtcaaaaagaatgtgtcttactttttttatagtatatagagtgacaattttcaatacaaatagtgtctgtatatatgcagtcttaacacggcattttaaaatttcattgtagactttaaaaaacctaacaaattggatttcagcctctttcttactatattagaaaataaaagaagattaaaataaaaaaaggtttccttttaatcaatctattaataaaaagataagtactgagattccgttgacataaaagtaattgaaagtttataggcaaattcttgaaatagaaaggcactttttttcctcataagaggacagtttagaggatttaaaaagcaatcaaaggtctcatgttttatatgatcaattcaaattgactgaattttcatcatcatcctcctccctccttctttctgatagtctacatttgtggaatagagagatttttgtctttcaaattctaaccctgaggatttttgctaggcacaagttaagacctgtattgttttctcctaacagttcctatgacatttttaaagtatttactttattctagtatgtccattctgttgatcttcgaaggacctgtgtctctaggtgacatctgtattcaaccaattttgaagactcttctgattggatttagcaggagatttgtagagtgtggggctttgactaggcccaggtcctttgccagccaggcatagtttgtccttgtgagggcagatattggaaaggtggaggagaattatgttctatggcactttcagaagctcgagaataccttggcagagccaagccttctgcttagggaatggctagcagtaacaaagcatggtacctgagatcaggtacatagtcaagagttaggttgaaagtcgaatattaacctgaaaaaggaagatttggcagcacagtgtatcttacagtcccaggaaaagagccagttgacatgttctgtgagacttcagaaaactgtacgacgtgaaagtagaagcatttctaatcatagttatattttgagtaatctcttcacagtagaatgagtcccccaacactggatgtactaaagccaaaggaagggccaccacttttcagagttattgaaggaattcacccatcagatatgttttgattttattcagtgattgttcaaactagatccgtttctctaccttattttcaatgggcagtggttctctagttcatcaaaaagtttttcctctggaatttttgagaagcaatagaaatccagagcatttaaaggtgatgattaattagtatattaatcttagataaatgtccccagataatttttaaatgatcaaatttgtatcaaagacattatttattttagcatcattttgatttcttctactttgttgctggggttggggtaaaagagggagaaatggagaccatatataattccgaaatgaaaaaaaataagcaacaatacactgaattttcttagagtaaacataatgctatgctgggttgttatagcatttacaatgctcatcttcccttacacttgaatgacttcctcctggatctgaaacaccttcctcaagagcatcatcacaggactgttaaaaatcctaacatgttacaattttactacctttcttcttccagtattccagcttggagactttgcgtagccctggttaattaatgttgaacttttcagggtatctgtgaatcatggtggggggtagggttggggactagaatttaattaaaggcacaagcttcatggggattgtgaaatcacagattccaaaagggagacagccattctagggagactgctaatagggagtaagcagggtgacaaagtgtgcaggaactgaaggaagatgacattcaaaggtctaaacaggggagaagaaaaacaaagagatcagcatgttacagctgagccttttcaaatgcacggtgataaagaacagatatgttttgtgtgtgtgtatgtgcgtgtgtgtgtgcgtgtgtgtgtgtgtgtgcgtgtgtgtgtgttatgcacagtggcttgaaggtagcagccctttcccctgatagaaatttgatgatggcagcaacaaaacctaaacagagaataattaaagagtaagggggtagttaatgaaatgaaaataactttaaaaggatgaaaagaaattgttgttaacacaccatgtggtttacctatgaacctagctgctgtggaaacataataacacagagtcagctcctgcaatgcaagtaagccacttcctgggtagaaatggggctcttcggaaaaagattaacttttctgtccacaggggtattatttagctcactggaatagcaatttgacaaatggtgcctttatggcccaagtgaatactgctggtttctgctaaaagggcaggtgctacaaacccaagaagaaaaacattcttgcatacttgcccccctcagcataaggacaactttgagcctgttcatttttgagagttccagcagtggaaagaaagctctaaggtttggtaacctgtgactcacagagagcagaatttcaagcctagttgagaaaacattccttcaagagggtgctgcttatctgctttggccacgttggattttggaatcttaactgttcttgtcactttggtcctggttcaagtcaaaagagtttcttctacttgggacttgaattaggtgaagactgacggacatttatttacgtaccaaaatacacaacatatgtgttgcagttagttcctccttacagaggaactggtaagcactttagccaggtagggctaaggcaattttcacagttctgactgtatgaggattcctgtttctttgttgtcctattttatgcatcatccactgattctcatctaaaccccaggccattttgcgtgaaaatagtccttctataaataaaaaatttagaccagaggcaaaggagcctccatctctctgcttacaattattgctcaatgttcaaagttctcaagacttatctcttcctattgcaatccctaatatacccgtatatagatacatttaggtctgagaatgcttgagcttaaagagagtaagttcttgtttggtacaagctctgcataatacgtctgagctgtctccctgctttagaatgcagtggtagaagttttttttacagcactctgattttagccaaggaactaacaaccgttgtgtaatgcactagctaaaatagtctcctttatcgtgtaaaagtcatccattgactcatttatttatttaccaagtgcctactatgtttcagaaagggttgtaaagggaacagctaagacaaggtccttgtcctcatgcatgtcatactctaatgagaggagacagatcatactttaattggtaaattatagtcaattgccaacagcagtaagtgctagagaggaaaggaccagaataagggtaggaggtacttttgagaggtgacaacgtgctagcagccctcgctcgctcttggcgcctcctcggcctcagcgtctgctctggctgcgctggaagagcccttcagtccgccgcggcgctgtgggggcccctctctggggctggccaaggcctgccctctgctggcggggaggtgtggagagacaggcagaggtgggagtcggggctgcactgggcgctcgctggcaggcaagggttcgggctccgtggccccgcactgggcgcagccggctgatgcctgctgggcttgaaaagggacgagctccctctgggctgccggagtgcccgtgctaggttccaaagtcgccagtgagtgccactgagaggtgaagccggctgggcttttgggtggagtggggacctggacaacttttctgtctagctaaaggtttgtaaacacccaatcagcactctgtgtctagctaaaggtttgtaaacgcaccaatcagcactctgtgtctagctaaaggtttgtaaacgtaccaatcagtgctctgcatctagctaatcaggtaggggacttggagaccttttctgtctagctaaaggattgtaaatgcaccaatcagcactctgtgtctagctaaaggtttgtaaatgcaccaatcagctctctgtcaaaacggaccaatcagctctctgtaaaatggaccaatcagcaggaggtcggtagggccagataaggaaataaaagcaggccacctgagccagcagcggcatcctggtgggtctccttccacactgtggaagctttgttctttcactctttacaataaatcttgctgctactcactcttagggtctgtgccgcctttatgagctgtaacactcaccgcgaaggtctgcagcttcactcctgaagccagccagaccacgaatccaccagaaggaagaaactctgaacatgtccgaacatcggaaggaacaaactccagatacaccatctttaagaactgtaacactcaccgcgagggtccacggcttcattcttgaagtcagcgagaccaagagcccaccaattctggacacacttcgagtagtgtggttggagaaggtccttgggagaagacaacatcacacctgaaataagagagattagaaggagccagtgataacagacctggaagaagggaattcaggacagagggagcagaaggctctaacgtggaaacaagaaggccagagtacccagagcagaatgagaaggggattcctaatcaggaaggaatcatatgtggttgttcactgagagcaatcattgacagtctcacccatgttctacaaaatttcacttcatgattaaaacaaattatatctctgtctttgcctaagacgtgtattaaataacagcaatacaaataataaacatattaagtccattctgtgttctagtcacaatattaagtattttatatatattatttaatcttcacattactgctaagaagcagtgataaaaccaagattttaaaatattaaccaatttctcaagactaaacacagctagtaagttgcacgacctggatcaattctccattggcttgtttccaaagccacaggtttactttaacatatacagcttttatagcactaacattgtgttctatgtgtccgtcattaagttgggtattttacacacattatcttaatatataaaacaattatatgcagcagatgttattaccatgatactgcaaataagaaaactgagaaatagaacattcaagggatttgctcacagccaaataatagtaattggcagtgttaggatttagactgatttctgtgtgatctgtagtccattctgttcaacactacatgtacctgccttcccgtggtatcattgccccagttctgaaacctaggtctaggtcgcaggagaactagcttgataaggatgggctttagagccaaaatttaagccatgctttgtcttatctgcataattttatgttcccagtcaggtaaaaccttacccatttatctttatttcctatcaaatgcagacttccctatgagctgttgcttggtaagttccaacccaatatgatgtcaccactgggtggacctctatggcacctgtctcactctgccttggttccagttatttttgtatatgcttcattgattatttctactcacttcccggaaatgttccctttccctgagaaatggagttgtatctccctcattgatgcatcctctgtaacatctagctgtttaatgtgtcactcagaataagtgctcaataaatatttatcaaagtagctgatgtttcaggaagtctaggaagcaaaccacctcttctgttctgctcttggattcaagaacttaagaggattttgttggaaatccacaaagaatattttaaacgagacacataataagactctcttttgagatgagagaaaccaacaacagcaaaagatgggtggtaacagaacggtgctgtttgctgccagctgatgttcttcttgcctcctggaaagatagagccagaagtcttccatcacttcttgggatgagccaactggcctgttttaacctatattacttgagttttggctaccaaaactctaagcattcacatgggcccccacgaagctctgccatctgacactttcagcaccttcaactctatccagtctcactcctgctgtactaacaaacattccataaacacaaaaccaaaaccacttaaaaaaaaaaatcttaggctgtccctacaacttttgctatcctcacgaaagagtgttactccagtgagacaaaagtccatcacaagaaatgatttttctacggaaacagctgtgattggagcaagatacaaggtaaaacatgttgtggtcaagttcaaggagaaaacagggtggctagccctagcaatcctactggtggacttacttctgcacacttcatgctactatctatcctgtgttgtctaaggctatataatgtcgagagacgggctagtccaggaatcatgacagcaaatgagggagagagagagagagagaggagacagagagatggctcttgcaacctttccaatagcttttgataggttacgtatggaaaaagcctcatattgacatcaggtttacttaggttcaagtgaaaataatgtctttaaaataaattatctcttttgatgaaggaagtcctttttgttttttgataccatgttgcttttgggaaaacatgcctgaaagtaggcaagtttctctaaagcaagaactgtaaaactcacagaaacataaagttgacttgatcatgcccattttataaataaaggaatggagactcaaagcggttaagggacatgtctgcagtattttacccgtgagctatatgccctctgggtttctcctcatccatctgcccccaacaactatgctctttcctctttcctttactgtttctgggcatatcaaagccaaacttaacagcaccaatttcacattaaacaaaagaagaggaacctactgaccaacctttccccatcgccaccacgtctagcctcgccagactctggtaatcattacactactctgtaattctaagatcgacctttttagattccatatatgagtgagatcttgaggtatttgtccgtctgtgtttggtttatttcatttaacataatgctctctaggtttacctttgctgcaaatgatgttctggtgttctgttgcacagtagggtaactagagttaacaataatatattgtgtcattcaaaatagctagaagagagaattttgaatattctcaccacaaagaaatgacaagtgttagaggtgatagatatgctaattgcccagatttgatcattatacaatatacacaggtatggaaacatcacattgtaccccataagtatgcacaatgattatgtgtcaattaaaaacaaaataaaacataaacaggagagaaacatgagctaaaaagaaaaccagtaagcaaatgcactagctgaatcagatcattttatgcctcttgatcggactttgatggtgggaacatcaggctacaactcttgcctgaatccacagacatggaaggcaagagaaattatttaagcctatgcaatcatccaggaatggaaagtgggaatggggttcaccaaacgtactagttttctagggctgttgtaacaaagtgtcacaaactgggtggcttcaaacaagacttatttttttcctattctaaatgctagaagtctataataaagccagggccacattcctgctgaagactgtagaatccttccttgcctcttcatagcttctggtatgtgccatccacctttggtgttccttggcttgcaactgcatcactctaatctctgcctgtgtcatcaaatggcgttttccctgtgtgtctgtatttgtctgttctcatgctgctttgaagaaatactggagactggataattcataaaggaaagaggtttcattgactcgcaattccacatggctgggaaggcctcaggaaactcaaaatcatggtggaaggggaagcaaacacatccttcttcacatggaagcaggagatagaagtgcagaccaaaggggggaaatggcccttatggaaccatgagatctcatgagaactcactatcatgagaacagcatgggggaaactgccaccaagacccagtgactccttactgggtccctcccatgacatgtagggattatgggaactactattcaagatgagatttgggtagggacaaccacatcactgtctgtcttcacatggtgtttctttcttcttataggaacaccaatcattttgagttaggatgcattctaatgacattatattcgtttgattacatctataaagatcctatttccaactaaggccacatttgcaagtactagggattaggacttcaacatatctttttggagacacaatttaacccataactccatgttataactgtactttttcagaatatcagtacgatggtgcccctaatcaacaaatatattgtcaccaatatgctgcagtctgggagaacattcagggatttaatttttctgacacacagactgtgagttcttttgttttttgtttttgtttttctttttttgttttcagcacatcacactctggctgtcattatcagttccccataaactgtgataatttttgtgtcacatagagtgtttaggttggcctctgatgaaatgaagcccaagtacttgctcttccaggcacctaacccagggcaaaaacacagagacctaaatgccttctctcagattatttttttattatatttccagtgagcagaaacattacagatgtgagacttgttctagaaatcagagtatttccccagggaagcattatcactgttcagatattactaagaagtgtaaaatgctggagggcaattgcatccacaccgtcctctgcccatcactgcaaagggagaaaggagaaggccatggggggatgcagcaagaccccaaggtctaggctcctctgccaaaggagcatggatgaccaatttggaaagaacacttgagaacctctgctctgtcctcttcacttcactagtgagaaagctaaagctcagaaaggataaatgacttgactaagctacttattggaaggtgggtgattaggatgtagcataggggtaagactgtgtaaccagctgacactgctttaaatgataaagcattgagttgttctgttttaatggtacacaagtcaaaattgttcaaggattgagagtggagccagaaagcctgggtgtaaatcctggctccttcacttacaagctgcgtgatttggggcaaatcaggtaaccccttcctacttctgtttcattgtctgtaaaatggatattataataatgtttacttcatagattgatgtaaaggtcaaattcataatatgctaaaagttcttggaacattgccttacacagatcaagtgttaaagaagaattgatattattattattgttattgttattattcttattatccttgagttcataatcagggtgtcctgaatatactacacccaggaatggaagccccaccacattgtaaagacacattcacttcccttaaacctcggcatatttgaggtggttgtagcaatagtggagggagagcagcaaggatggacacaaagcttacagtcacccagcagtgtaggaaaggggggaatcctgcacacactcccagacatggtggaggtcctcaatcactgcagagaagactgttgtgggaatgacagcaaacatgtagctcatcaagaaaatcagctgacttattagttcttctggatctggttggagtccctgaccccagagctaaattataaaggttattttgttgtaattttgatgctctaagaaactgatgtaagatatagaaaagttcttttttttttttttttttgagatggagtcttgctctagcacacaggctggaatgcagtggtgccatctcagctcactgcaacctccacctcctgggttcaagcgattctcctgcctcagcctcttgagtatctgggattacaggtgtgcgccaccatgcctggctaatatttttatttttagtagagatgggttttcaacatgttagccaggctggtcttgaactcctgacctcaagtgatccacctgcctcggcctcccaaagtgctgagattacaggcatgagccaccgtgcctggccttataaagttcctcctatattatacgtgcccatacctctatactagtttttctctcttaaagctacattgccatctcttgtattatccgtgcatttgtcacctgccacttgtcccccatgcccctcctttctagcctgtggtttataacatgctgtaagtctggaaaccaaataatcatgtttattagacttgtatgtaaatcgaacctaatgctcctttcctttgttgttgttttccttgataatgtggtcttttaaaagagtaaaatttgaactaggatttatgaaatctaggtttaagtttgagttctttttctacttatgtgatcttattcgagtctcctgacttctttggataaagcccaaaacaccattttacaggtgagaaaactgacagagtgacgtatgagtagaacagaggagaaaaggaattgaaaattcaggtctgtcaaactgtaatacccaggttctttctgtttgataacaccgttttcaaatgttgagaatgactaaagaaagatatagaaatttgtaatgattaggtatttatacattctcaataatgaattttggtataaaaacatatttttttatctaactatatttttcatgcagtcatttcagtcagtatcaccatctaggtttcctctagggaccacatatcaatgactcttaaaatcactgttgtgcaaggtgagtgggaaaggaacaggatggtagagtttggattggggaacagactttgagcactgaacagcaggcagcattgctgttggcagagtaacggagaaggcgctgaggcttacccatgccatcatggcaaaaaatagcacggaaacagctggtgagctgtcagaatgatcttaaggaggaaatgtgaaatgtttctgcttggtgcattaatcgagagttatttggacagaactgaattgccaggggaggaacaagcaaggtggtaactcacccttccctgccctttcatctctctgtaatacggttctatgtcatgggcctccttcacatacacactcccccagttgtccattactcccaccctctccgtcttacccacacctagagatatgtgtgcacacatccaaagagataacagaaaaaaaatccatttgaaatgcttacagatatttcaagacaaaatttaaagagatattggacagattagcaattatgacttttttaaacttttattttaggttcatgtgaagttttgatatataggtaaactcatgtcaccgggctttgctctacagatattttatcacctgtgtatgtaagccttgtacccaatagttatttttttctgctcctctccttcctcctaccctctaccctcaagtagacctcagtgtctgttgttcctttctttgtgttgatgagttctctagaaatctttgtgattagttgtagttgagtactaatgtggctttgttttttttttcatggagttgtttaaatatgtgtcctgattaatttttgttaactgttatactaagacttttcaccatcaatgaattcagtgaagggttgaagggaagaagtgcaggaaaggagaacacacaaatgagaatgtcagtcttgactgctgggtgaactttttttcgctgtagaagatgaaacaaattgagggccaacctcttgaatcaaattgcaaagtaactttctgctgggaacagtttgagtaacccgaagtagctaaggtcataaatatttttacaggtggctaaggaaagagcatttgcagccatggaatcaggtgttgttattttgggtgtgaccttgaatagaggctgctaacttttggcttctgtttccgataataaatctccctcctccccacccccaccatcagccccaaggaaagatgaatgactcaggtgcttcagagacttcccaagaagtggtttcagtatatgcagcaagtggacatttagaatggcacagttatccatataggaatattgttgaggcagttcatcttgttgtccctatagtgtaattctttggagtagaaagcaaagagcaataatttgtccaataaatgaaataaggaaatgaagagaaaatttacataagccagggaggccaacttaattttctaaagtagtgaattgactttttttccttggattttgaaataaatggcaataaatccagttgtggggtagagttctttgctttcagtgatagcttaggaacattctgcagattgttaggattgcttgtatgtggttttaaatgaatgaagctgtttctatacagctattttcagaaattctatgatctaaatgttttagattcaggcaaataaatacatatctatattgggagataaggtttttgctcaaacaagcaatgagtagttttcccattcctaatgtccacactatcttgaccactaccaagaaacactttttgcaccatgatgtgcaaaccatgtatttcttatcatcttgatgctgttgctcattttgcttaagttttaaagatttggcctttctctttttatgttgattaccaagagtgtctttgcaaagtcctttatgcagtactcaaagtatgtccatgccatttagctcctataaagaaaacaagtttttagccttcctaggaaattaagtttcctacaaaatatatgctcttcaaaagctctctcggcttcatttcaagcatggaaagcttgctggtgacttttgttctacttgatacggcatatccattcttgagtgaggctgagtacaaacagcattatcctgatgtaaaggaaacaaaaataattctaaccactaattaactaacagcaaagagactgatagtcttaaatggaaagaatacttccatggtctagtttctagagaacactaccaggggcttgaaggtaagtagcctctactggaggctaagggaagctaaacacttaagttttcttctatattatcagttgctgtttagaataaattataatctccacgtttttttttgagacagagtctcgctctgtctcccaggctggagtgcagtggtacaatctcggctcactgtaacctccgcctcctgggttcaagcgattctcctgcctcagcctcctgagtaactgggattacaggcgcacagcacctcgcctggctaattcttctgtatttttagtagagattgagtttcaccatgttggtcaggctaatctggaaatcctgacctcgtgatttgcccacctcagcctcccaaagtgctgggattacaggcatgagccaccgcgctcggcctcttctttactatagagtaaaagttgcatggtcgttttcttgcatttgggtcacagcttcagaaggttattaccaatcagaaaaaggttttgagtcttttatttcctaaaactgagtgtattcgttattgtctaatgacacagcataacaaaccactgaaattcagtggcttatcataccaaatatttacgcccatgtttacaggcctgcaggttgactgaaatttggcttgtctccgctgggctcagcatgttggctctcctttggactgcaggtcagctaggattggctccaggctgggattaggttcagatatgctccatgcatgtttttttctggggctcaaactgaagggacagtgtctatccagggcttagtctttcatggtacatttctgcagcacacaaaggctccctccaaatgcagcaattccttcctcagcggtagtagtccagacagaaacagttttggtggttgcttgagttctcccagttgttctcctgtcattttgcaggtcaatctgcttcattataggaacattctactggagaaaaaagtctatcattattcaaaatatccctccttatgcatacttcccactgcttagatgtctatactcagaaaagttactatgtggtttttctttatgggacaatactgcgtgatcgtggcgttcacatttctccctccaagtccttgcttttctagtttctgtaatcattcctcaggtgacataaaagtattttccgaagttttgccattttcatcacacaatattgtggacaaattaaagcctattgatgactttattaaagcagggtatttaccacaaattaggattctctgcattttgcctgactcctgcagagcacagagaccattcttgtctccaatagcaacactcttctattaatcaatcaagagctgacatgaatgtttttatagagattctgttccacttagcgatcctattgaacccctggccatgtggtatccccacagctcttcttctgaaatcccattttgaccaagccatccaaattatacacttagactgtaattgtttcttttccataaatgaatttacattcatcttaattcacattcgttgagattttttctctgtttccaagtctcttcacagcatttgtattctgtcattcaatacatttcctccaatacatcatatcacattcatatgcaatatgaatgaacttgtaacaatatctctctttttttttaattcaagccactgatacaaatattgaccaggtaggttgtaaaggacatggttctgtggccagccctgcaagatctccttatctgtttgtttagtacaccatgtatataatgtgtaagcctgcctcagttttcttcatggtggcctcagagatatcactgaagacctatctgatgctttgctgtgatttttattccctgttcacgccattctcctgatttcctgtatagtaactatattctcaagaagatgagattagtttgatgtgactattctttgtgaagctgtactagctaattgcatttcctcttagtttctaaaacccagaggtcccaaagtcaaatgctttgcagccaggcaagtaacaaatgtctgggtcagaagctgggtattattcgtcatttcatgaacagaaatatatatcctctgagtagaagactctgccagcagaacaaaattcttctgttagctaatttcactagccatcatatgatttagcttctgaagcagcttgctgctctgttattcgtgtgaactcatatcctttctcatttggaaagtcaagaccacatgggtacacctcttatcacaagcttcgtagagaccacaaagatgccactttagtcccaactcactaaatctcctctacaatgtctctaaaaattatccaatagtgttttttaaaatatatatcaaattatgctatctcaccacatcacagtatagctgctactattcctcctgtcttcctgtctcagaggaaaaatttgcttatcaccttccacagttgagtctacctaggtccttggcctcctgcccttttatcttttctgagatctcatgccatctgttacctcatctctattttatctgttataattcctctcctctgcttcttccccagctgctcagaacatactgaaatatatgtaagattttgggttttttttctggtcattttgctcaatgacttcctaataccaactgaagagagtttatatttcttaatacaacattgaaagcctaacatgatttggcctcaacctacctttttttatccagtaaaattcatttctctctaatgtatactatattccatccaaactaacccactgattagacttcatttttcttttaattactgctttttgctgtgctggtcccactgcttagaatgttatttcctcaaccttatttctgtttcctacatttgttgaaatcctagatgtccttcagaacccagcctctgagtcacctcttgcaggaagccttccttgctttccctagcagaacaacaatttctactgaaaccctgttgaattttgtctccattattgcctttaccaccttctatgttttgacagctattttgactatgtcttatctacccaattgtaaacttaatgaatacccacactgtatcctatttatctttatatctttagattgcaacacaattctttgcacatagtgtgtgccaaaaaatctctattgattgatggtgcaattctgatatttattaataatgatcaatctaagtatttatccaaatcaacccaatgccctatattttgggacaattacccttgagatttttataaaccaaattcaccccatgtaaaacagatgaaattaaccttaatttttatctgatgtgtaatggctaattggctaaatttctttcataaatattacatatgtactattttttatctctataagtattctagtttgtctagatgaagaaacagaggctaaaaatagttaaacaaaaaattacctgtttcagagcttgaaagccagatctgtccatggaaatctcctgagagaagaaggtttggggatgcatataatgagagcagagaactggataaagagatgtctggatctatttttggctgttgtttagatttactttgtgactgaaggaagtttatctgaggctttcccatttgtaaaactgagattcatatacaactgtgcaaaatatgtgtccctttacttacctccctctaagagattaatgagatgatactcaagaagcactttgattttctctgatgaaagaaatggataagtatgaaatgaagcatttactacttctatcgaaggtttttaagatggcagcctttaaaaattatcaaagtgaaagctaaaggaagaaacagccgtgtacattttaaatcaagtcaataattattgtagtgcacctaatgattctctgatatgtgttttgtgcattaaaatttaccaagcacttttacatatattatctcatttgatccacaaaactatcctgtgaagtatgtaggctaggtggtttcattaccatttttgaaataagaaaactaatactcaggccaaatgacttggtcactgctgctcgactcatgtgaaacagtccagggttaaactcaagtttcctggattccaaatcccaattcaggtatcttgcatttctgtccacttgttaacatcatagcatgcacattggaccatctcctctgtgttcacttacattctatccatgttcaggattgagtttaaatcccatttctgctcttaagacttcccttatcactttaactgaaaggcagactttcttattccatattttttttgtccttaaatatattgtttcctggaggtctttctagtgagttggatttcctgtattccattcttccttaaaataagcctttggaattcagcccagcttccacacttcttgatagctgccaccatccatttcattcctgggactgagcctcagcacaaggattatttaaaagttaaaaatagttgtattcataatcccagcattttgggaggccgaggtaggtagatcacctgaggtcaggagttcgagaccagcctggccaacatggtgaaaccccatctctactaaaaatacaaaaatcagccgggtgtggtggcagacacctgtaatcccagctactcgggaggctaaggcaggagaatcactagaattcaggaggcaggggttgcagtgagttgagatgcgccactgcactccagcttgggtgacagaatgagactctgtctcaaaaaaaaaaaaaaaagtttttttcgtgtcggtattaatgcctggtataatacctcgcacacagaaggtgttccatatatgcctgctaaagaagtggctagactaatcaacaattatggatgggagggaaggttcagaaagtttggtgacaatactgggaaaaaatgttggcacctgataatggtggacctgggataccaggctgaagagtttgaaacttgcccttttggcaacaacagatttattggcaccaaggaatagttttgctggattccacttttgaactcatcaaattccttgcttttcttttccttgtcttttcaatcctactgggacctcctcccaccagtgccactttactggaggcttgtgatatgtatgacaggcagtaaaacccaagtgaatcaaggaagcctgttaagagcactgatttctatgatgtctcagtttgttaactaaattgcaggttgtactgcttggccagagacagctgacaggcaactctgcctgaacaagtagcatctccaaaatgacatgtgcactttagtttcattagaggcagtggtatcatgattgcctgggccattgcaataaatatggtgatcatatgtatcccttgggatttggggttgacagcatagttgggctgcactaaagagtcttactctgacataaatgacggcaaagtagatctctgggcccctcagcaaggaggcagaagttcatgttgcaaagaaagttccacgggcctactgaaatattaccaatcaaaattacaatttcatttattgacaagtcatatttaacattcttctaatgttttttctcacatgccaatgtccaaaaagctaaaccatcagctgcatgatgctaaggctttcagcagtcagcagaagcagtggtagttgcgagctggttattcagaggcagctactgtgctccacataaccataaagtgaacattttgacattcccgaaaatgtaccaacctccaagtcacaaatcctctgtagatgcctgtggattggcttttcagatcctcttaaaagccaatctgtggtggcaggattgtctgaagagggtagacttgggcttctggtacgttacagaaggcatggtttctccatctacactatgctataagacaactgctcttctctgaaaagaaactactggaatcacacttcttgtaacttctctctattcccttatttagttggtgggattggatgaaggatcttcacatgtctagtgagactcctttcttctcttcttcctatccaaagggcttttcttcctgggctgagtgtatccaggcctatttcatctttgtaggaggcaaagggaaagagaagagaactagaaattggtgtaggcagactgatctgtggccaggtctaagtgttgccccaatccgttctcccatccaactccacaagcagtaaagtttgctggtcctttcatctatgtctatttctcaattggcttggatttcacaatgaagagggctatgatttattggcccacttaaacctcaacatggtagagtggcaattttgtttttctggctcttatattgcaatgaatattttttatttgacagtctgttataaacgaaaataatttttttcactatcagtttctactcaaaattaaatggtagctctagaatagtggcctgcattaaatttttctttatggttatagccatgcagatagatgcatgaactcagaggactaaaaatgtgtttccatgtaatttaaatgtacctttctatacggaacggtctgctgtcatgcaactttcaaataatgcattttattatcattatcttttccggcattgattaatcctactgtttattggctaagtgtacatttcctattggtatgtttctgagtcaaggtgaaagcagttaatacttaagagttgagaagcaagtttatttaaatctagtctttcttatgagtctgcctaacagtgatagattttgttgttgagccacagtttatgaaaagtgcattaaaacctcgagccgacccatctctctgaagcagcagttgggccattacattttggcaggcacttcagatgtgtgtatgattttatgatcaggtctgcttaattcatcccaactcttcaaagaggaagggaactaaaattccttgagcatcttctagtatgtgctagatgcctgcatatgttgttttatcctcatgacaatctctcatggtagatagtattttttcagcattgaaggtgagaaaattgaggttcagagagtttaaataatattgtcaaaaacatataggaagtgatgaagttaagctttaaggccaggcctgtctactcaaaagcctgtgattgttatattaagggttaaaaaaacaaaaaagtttgcaagagacagacaagttatttgaacggaatgaagtataagaaaacctgtgctttccttaatttttcttgaatcctgtggccttctcagtctatcctttattgaggttcagagaggttgctacttatatggtagcaaaagtatttcccttccctacttaccctactatacaaaacaaacaaacaaacaaacaaacaaaaaacagaaaacttgatgataaatgtcaatcaacactcagcctctgcatctgatgagcaacagaaattagcggggactgtggtgaattggaaaacctgtgcctttctctcccaatcagctctggctgattgtcctacagaaaatgttggctctgtgttactaaatcttaccattttttaaaagaacagtctagctgttcacgagagatctgatcttaaaatgttgaaaactaattcacatagaaaaatactatgtagtacccacccctcaaaaataaaacttatgtgagcactcgatccagcataaagtctctgaatttgtaagttctgtattacacaaggcagctaataagtaactactgggaaaaataattaacaaacaaaaatcaaatcaaaataattttcattactcttccaataattgtgccttccagatttagtactgtttgtgtattgtgcctctctgtggtagaggcatgacttctggtcctctatctgcccttcacagagtggagatgaggccagtatgcaatgactactcaagttttagatgttctgagcacttgtttctgtgctttctctggatagatctggtagtttggtgagcagagttggcgtggctcatcagcagtcaccctttggcaatggaaccagaaaagcatcatgctgtctgttaaagaatgtgtctatgcttgtagctagtttcctaagatgtttgcctctaggtatttgcctgcagaaagttttttgaagtcaatacaaagtagagtggcaagcgatgcatccatgtttgaggatttgggaagcatttttctgtattctttcaagtaaggcctggtcgataagtttagccacactcaatctaattccttgtctgtatccttattatctcccctcctcttctttaagttttcacttccttctgaccttaatcactccctcaatgaacccataagtatcactgaacatgggtgtcaccagttagcaacagtaagataaccgctaacttctgaaacatggaagctctagcattgcttggatgatgtcttccctgactgcctgtgagcctctggccaggatccggggtaagtgcctcacaaatcactgttcatctaaacagctaaagctcttctcctgatggaagagggatacctacagcagaaagcaagggagtccaccaggcacgtttggaaaataaaagattttatttatatttattttgactctatagtttctaaattccataaatgaaattttgccattatcaaggaaatatttgctagggagtataaggaaggccctttgggtaagagagaagatattctctaagctgtagcatgtttatgaaccttaaaaattacttgtctgtgtttgtatatgttcagctctgagagtcttccttaacattcaaatgtctctgtcttggcaaaaattagtgaggttttagaaagtagaaaagctggttgatagtgtaaggaatttttaggccaattttctattttttccttctatagactgaattttatttttataccaatagtttcaatcttctaaacttctcccattcctctttactttctcaactgcatccacttaaatacatcttattgtttcagtcagccttggctgctataacagaatggcatagattgggtgacttaaaaacaacaaatatttattgctccccattctggagactaggaagtccaaggtcaaggtgccagtcaatttggtttctgctgagggtccatttcccgactgacagatggccaccttcttgctgtatctttacatggaggagagagaaatcatgcctaatgtcttttctatctccgggcaggtagtgcaggaattgaacttggttggaggacatccagctggtgtctgctgcagattgcttgcttgcttgcttgcttgcttgatgtgtggggaaaaacctccacacatctagcgtcagaagcgtgttgtgagagtataggagaaactgagtttgttttttctacacagaagaatttcctatcctgaaggccaggtaatgaatcctctttctctggttacttgggcaatttatcaatgactgtctgtggatatttatttggaaatattatatgggaacgttccttcattttttatatctcaatttaggaaaccatgtgcttctttctcatttctcttttgtccccatcagcgatctatatttttttaaattgttattagaaacatctcttatttaatctccatcatcacccaacaagctcagcaatgtgactttgtcttacggatgaggaaactgggtgcagagtatttgtggctttccccaaaacctgcagtaagtgaacaactagaattatatccaagccttctgattcaaatgcagttgccctatgcaccacaccaaagtatcgtttacactcttgagggctaaagaatgccagatgtatttatctaacttctgatgtgcctcccaaaatgccctatacagaggataggatcaatacacacttgatttcaaaatttctatgacttgattctacttacacatcttattgatttggagaaataaaggtacttcttgggggaaaacatgactacatgttaaaattctgaatttggcaagtctagtgcaaactgaaatggatggtggttgaagtacagccaactcatggtggtccaaaagactgtggtgaggggatggcctcccaagaggcagggattgagccctacactgaccagaaatcactgcattacagaataatggagaaggcaagacaatgaaactgagtttctctgaaagcttggcatcttggatatttcaaagattaaagttgtatttaatgggaatcacgtggttcaattaactggtaataggatggatcagtgtccacctctaggacttcaatttgagtctaatccaaacacagaagcagagtaggttgaagcccttggtaatgaacactaagcctttcacctcccggtccacagagaaagttcctctcaggccacagaggcctgctggcaattttcctgaagacagtttggtagactatgtgaaacaagtgaacagctatggtcacctgagaggtagtggtactctacattttcaaaagttctctcccaaagcaaaaccatagcaaaaattgaaaagcagtaaatgaaccatggatggagatattgcactatgcacttgtcttgctagcagaagaatgcaaaggtgctttcaccattgtgtcagatgcttggctgaacatttattaaacttttgatatggaggaagacatagaacataaagatgcattttcttccctcacaatgctcatggtgtgacaggaaaaaaaaagaattgttccattaaaaaaacattgaaatgaatcaacacaaactgatgttattattgaatagataatggagagattgtgggataattagagaataaatctggttatcaaagatgtctctggaaggcacgtgtgtaaagttgttttcagctctgtacacctgtgcacactggccaggaaagctggaccttctgcagagaaaactgtcttctccagataggaaagtgtgcctcattgagctttgggctaggccagagctagaagatctttcctgtgtttgggtcattcctagatcagtgatccctaatgaccagttccattccctaaagctaatgttgactctagatctttctgacatttgattcatgctggaatccatagtttgttttgagtcaggtctataatagattcatattcctgagaggcttcctattgaaagtgaagactcaggattccactgactgttctgccactgtttaaggacgatattacagttggattatagatgacctccagtggacacagaggtgcttagattctactgagccaccattactttgcctaaaagaaaataagagggtcaaagggactaacttttgtgtaagttttaaggttttattcaaacacaaacacacacaatcacacacacatttacatggcaacatatctacaaataactatttctctagcattatgttcctcagcctcttgaatgacatcatttaccttcgtcatgttaatgaacaaaattgtagctcactcataaagaagagagagaagaatgtttgtgccctttaaatgtcaaaaaataaatgcttcttcatattgtgtatgagttcactataaactcatggataatttgtgtatctgaagctctgaccggcttccagagggcttacagtgcctgccatatcttaggggaacaatgacctcatgctgttccagggacatttctatttctccatttggctgaaacttactcactttatactttggtagggatactgaattcaagtaaattaaaattaggagatgtgttctctaattattctatcgaaagagcacatagctttgaaataattctcaatgctagtatggtggactcttttcaaaaggtatgagtcagctccctgtgacatgttttccagtgtctgcttggggtcacctttactaatttcatcaggactgagggaaagcactttccttttcatatttctgcttgggtgtccagatcattctcccctacagaggctttgatgctgtcatggaggtcatagggccggccttttttcgaagtactggagctttttaaatttcactttttaaaaaatttttgttgcttttattatggtggttgggggtaagtaaggacccaccttttgaattagaattactgatcttatccaagagagaatgttgtagtgggtgatagttgacgaagaagagaaccataaaatatcacctggatgaaagacctaactgcagcactatctccaggacacacacacacacaccagagtccccacgtgcagacaggcactgctgatatattacagtctgttggccattttgtttatgataactaggaaaggaaaaatgagcccttatttcagtgtgttcatcccaagatgatgacacagtagattccccttgcaggtaaaccgagagagctcagttaatcaccatttatcactcaagtgactcaagtattttgcagatgcattggagccctggagactgagatattcattgggctgcaatgctattctcttttctcattccatctaatataataaaataaactcaaatcctaacatcagagtgatgtgtgctatcttttagagtcccaagcctttaaaatgtatttgattcactcccatagaactagatacattttccaaacgaaatgtgatatcattacaattttaatgacttataactttgctccatctcctccattaccagactattcctagctactaccatcttttgccagaagcctctaatttatttctctgcatctgcagctgacctccttcaaacagtgttattttgagttgattttagtatataaaccactctcagtgggatctaagatagattagtttatgcctaattgagtgagcttttgtagatcctcttattttatataacttattagaaaatatctaagatatattgttctatttgccaaataataattgtgaatcaggttcattgtacactggttaccaatatgcctgagcctagtgagagagaacacccccacacacaagtcacatataggcagtaaaggacagcagaagctggggaatcattttgagctcattctccaaggctcaggaaagctgcctatggcaaatggaatccacctgtgcacgtactgcacctaagggaccttggaaagtaccccactctgggttttataccccaggggcaatatgactcaataagctgaagtgttgaaggacatcctgttctggtaggaagtggaacagagacttggctattccagccagttcctccttatctgagaatgttacatttctggtatattctttagttatttttgagaactacaagtgagaaaagaacacaaaccaggttggtccgaggctacctagagaactttcttccaataggtgaatgagcaggtatgttacaggttcctcatttgatcctctcaccctatttgagttattctgaccacttgtacatcaactattgattaaaatctgaaaaaagaaaatcataggtgaccttaaattaaacttaaattaaacttaaaaaaaaaaacttaaaaaaaattaaacttaaaaaaagttccacaacgaacaggggtcagcaactttttctgtaaagggccagaaagtaaatattttaggcttgtaggccacatgatctctgttgcagctactcatgtctgctgttgtagcatggaagcagccaaagataataatacatcaatgaatgagtccagccgtgtcccaataaaactttatttataaaaacagggaacaattatatttggcacacagtttgctgatctctgctctaggccaatctatctcctccaacttttgcatattcatacctcaaacatatcataaaaaactgccacaatctaaaccgtattatctgatgaccctaagtactaaatctctccattctgaaatgtgtatattaattttttttcaggtagagaatggtatagaatttagacagggaatttatctgagggattgactgaaaatgccttacttatgaaaaaagagttcttggttggtgtttattattcatgtaggtccatttaccttgaagccataatgctaatatagcctgtcatttggaagttagataaatagtaaagcactttaaagaatcactaaaagtttcctcacaaccacagaataggtcttggagggttactcacgctttgctgatctctcatttatagaggagcagctgctcatttttggcctagaatatccacctctaagagaagaaatttctcctttgcatcctgttcagagctgatcatgcatattcttggaaactgactaaaatgacctagtctgtagtaaagtaactaatttagagttgggactatcaactaatgttattttgccagaggagatgaatgaaaagacttccttagggactagcagcaatcagtcagtagggaacagggttaccaagaccagatggagaaaatggcataggacatgtgtattagacctgccactttctggctctgtgagcatgcatttcaaagtttatacctgcaaagtgggcatttgacagagtaggggacagtcggagagcttatcgatacatacttattgctctccttgtgttctgtttgctggaacacaattttagatcaaatatttaaaaattcacacgtgcgtgctcatggctgtgcactcatgtgcatgtgtgcctgttgtgtgcgtgcatatataccatacagaaaagtactgtctggagaatacattagactatgcatgtaaatgtgtgtagaatgtttttcttttttttcatgcaatacatgctctatggatatttgttaagtgactgaagttttgcactccctggtgcagtttctcaatagtggcactattgatattagagccagctatttctttgttgtgtatcattgtatatttagcagcatgcgtggcctcgacccactagattctagaagcactccacttcagttgtgacagccaaaaatgtctccagacattgccaaatgtccctggagataagcatccctgttgaaatcactgccttagtgaaccaagacattaatgtaagaaagtggttcctaaactttagcatctgaatcaatcaccttaagttcttgtgaaaatacatgttactgggcctcacactagagtttctgattcagagggtcttgcactagcactagacccaacaatttacatgtctaatgagtccgctggtgatactgctgctgggggtcttagaacctcactttgtaagcacataagtaaggtgtaagatgttctggaaaaattccagatgagttaaaatgtgtttcctcatttcaaggactgtaatgtttgttgttagtgtgagcacagggcttaaggtttctttatgaagaccgctgggtggttcctcacagctgtggttgagatttagcggggaaaccggacgtttatgggagacgttcagtctgtactggattttagtcagcactgccctgccagctgtcacctgagtcctgccaggagactgctccaggtcttggcacagggctggggcacctatggaaatgaacttgaagtttgccttgcagtcaaacttaactaccaaataaaccagcatgacattggggtctgtgaatgagaagtggatgttccgagtagatttgaaggacgtgatgactcaggatgccagttgtgactggtgacttagagccgtggtagctttgacttgcatcttatttacttgcatcggctgtcttgtccttccttgcttctcgccttttcaggtcatggttcctgatgtcctaagctgtcatccctactctctctctctcttttttttttttttttgcttggagtcagagatggagctgtctcgagctatttatcagtcttatctctctgcgccctctgttagcatttcagactgtggatctaatccactttaattgattgacctcgtgcaaccagacatcagtaaaacaccaggtgaagcacaactgcagccaggggagaggtggatgtaactttcctggttgggtgcaaagttcgctgaggcctataaagatttagaaaaggagaaatagttttcaagccatttaatatgaattttctagggacaatgtatacagatcccagagtcgatgaccttgactgggagacagtcgttgtaaatagagcagtatcctatagggagtgtgcaaatgcctctgactcacctgtcatccatattagtactatttctcagctagcatcactattatcaccatctccaaacccatcattaacatatttttacatcattgtttgtagataccttcagaatttgccaagattttatttatttctcttaataagtactatttaacacaagtattactgttgctcttgtcttcgttatcgtttttctagacaaagcttgagccatggatagttgagggacctgctcaagatcacatggaaaaaataatgtggagcctcaatcagtcccaattcttttgattctaaatctcaaattcttctagaacacaaagtagacattttcctctcccctgcttttcctgccacagccacacttcagcttctcaaggggaggggactgggtcattgtcatgaggtgatcatggactttgaaagatcttcaagctctacagccgtggtcttgtcagtttgggtgatttctgaaaggcatcttctctgatttagatttttcaacggagagacctggtctcttacctctcttgaaataccttaataatgaagtgcttactctgtgcttataaaccaacaactgtccagagtgtagaacaagaagaccataatgttgaaagagtagagactaatgatcttcactgaaagacacttaatagccacaaaaagagcgcaaattatgttctactgagttcaatgttttattctaaagaactgcagtaaaagcctctgttagtcaaagtcaaaattgatcaatcaggtaagctgtaactcatctttttgtattttacagatgcatttataaagcatagtgagatgttttgcctaagatttattgcacgaaatttgaatatggtagcaataatttattttatcctataatactgaaatcatatttggtctcttatggtacaaaaaagattcttctaatttttttaaaatcacaaccacacattctaattcatcatttattcatttccatatccattaatttaacaaacatttactgagctcatgttaggatacttacatttaaaatactcacaattaggctaagtggacagataagttaggcctacataaaatatgtaatatgtaacacatgtatttctgttatagaaataactcaattataacatgtaaaagctgtgattgtcgaaaatgcatggattttagagtcagacctggattctatttttccataagtctcttattgtgtgaattctcttgtaattaattgtaagaatttgaatatacttctattataaaaatatttactgagcacctattctgtccatttaggtagcctggtttatgttgcagtgacaaaagcctcaaacacttggtgctataaagcaaccaagctttgtttctcagccatctgcatgtccgtagcaagttggcttattgccatcctcactcaatgacccggaatgacaaagaagccgctaccaggagtttgctgggtgcagtggttgacaacaaatgagagaactctcgtgggtctcacaccagcaactaaatgcatggctcaggaatgatactcaatttatcagttaacactgttctcttggcccaacccatcacaacgagacccaaaagtcctctcttactacaaccctataatggaggagaactaggaaagtgtggtaaacagtgccgctcattattttctttactaggaaccagactttgaaatgggtatggaagaccttgctgtgcctggcccacaagaggcattatttacatattgccttccttgtgttcttgcctagcactgaactaacaaattctgtgggaagcctagcagttaagacactgagacctgcttccattgcccatatccctggcatacatttgaaaatcccagttctgtttctctcagctgcaattttctaaaatagcggatgatgcattccgtcttccccaggggcagtctggaatgaacgaagagatagccttcagtgacatctttattcctgagaattcttcttgcccctgagcatttctgctcctggagtctgaccctggtgtcggtagcatctcttaggtcagcaccaataactgcagtgtgactgattgaggatagggcagctgaagctggactaatttggggagccaggtgggcttataaacagtcattattgatgaagagtgacttactggctatttaaagacagctggtttctgtgctgttcagttttttttttttcctgaatgcacttgaggattctttggtaatgtcttctgatttaccacttgtttttgtttttaatatcaaggaagaatatagattgaagcaattgtcttggtagcaactttagtggtgatggctgtggagttattaaaatttatagtcatgctgtttttgcagctacactttgcatttcttagagaggcttataatatctggttacaaagaatgtagagagatagcaactaccaaattgggataggaaatcaaccctgcataaattgttttaatatatattctgtttgctaaaatttacatttattttcacaatatgtcttgatgacagtgcccaccaagccaactagcccttagctcatgacactactttcagttacactaatgaggagaaagaagggagaaagaagactgacattttgtgggtccaaaattatccacagtgaatgccaggtgcttcacatgtctgtgctctcctataaccctcacagcaagcttcagaggtaacaactggcccctctttccctccacacatctctttatgaaagagaaatcagaagtaaaataaccagaccagggtcatacagctttaagagccatcgctgttatttgaaccatgctaggctaaaacccacatttattctattgaaacagtttctccaaaaatcagagtgttttatatctgatcaaatgatgggtggttccttctcctgatctgttttatctcatatatttatgtaatgttttattacttataaagtaccatcatgttcatcatattatatcatccttacaacagccctatgaagtacgaaatgctgatatcctgtccttatagtgtattatcaagaagtggcttcagaaaaatcaagtaatttgcccaaggtcagtcaggtctgacaccaaagccaatgcttttgttccctcacatcttctcttttctagacacatgagccagcggagttgatttgcatggcagctgtgcatgatagtttcaagcctgggcaactctatgggtattcgccacaaggcttccgtgacttctaatgaactgaaacaaagcagttagccatggattataatgccaccgtggtcccatgacaaatgacaaggaggttgcagtaatgaaattttattactgcaaatagagaccacatctgagatctagcacggccacatttaccattgtgggaaacaaaatgaaacacctgggaaaggatctccactgactttagcagtgagctaacaggattaagaagatctcccagaaacactgattacaatggcaaatgtgtggcacctaagataaggaccaaatatttattctggcagagattaaatcttttcttttcctgaatcaaatatggatcttgcagaaaatctgcccaagaatatatcttgctgatcagcgaactcactgagccagaaccgtacttggccactgctgtcactgaaaagctacagaatgctgctttaaaggtctccatgcttcccctaaaactgttttccatccatgattaattagtgacttaggggtgaattgaatcaccagctgtcctttccatgcatccaggatttatgtactggtttctcattgaagaacagtggtgcaataaacagccctcatttgtggggtgggcagaggagtaatggtgtctgcagtcatggtttcttaactcctctagtacttccattctgctaagcaggttatggctcacattattacagcctagcttatttaggcatgagggtcgtgggcagtgacacacacacacccttagaaatgaataccagttctttaagagaaagcagaaaagtcatattaccatttctgaattccttgagaaataagaagaataaaatggacaataatattagctatgggcatgaaaagtacaaaaagaacccataatcaggttcatttatatatgcatgcatattttaaagctaggtgcttttcctagtgcagagatgtagatagcggtttcaacaaacagatttacgaaatcatgagtgtgtttagtcacaattttgggaggtacctggaactcttttcccagagaacagaacatggggattgcagacatcattttatattgcatattatgtaatcagggcacaaaggaaatactgaggtccaccctgtatctctgcatccttgaatgctcacagcctgctttggttgatcattctatattcctcgcttctaagatcaagacttctgcatgacttgtccattcttttattggatacaagatgaactgacatactaagtgataaatggaaacttgaggaaagccttcattttgggaaaagaagtgaagtgtaccaaactatatatagaaaccagtgtccctccctccagaactcttaatttgttgactttaggtgtagtaggtgcttaataaattttgtatttgtgtatttaatgaatacatgaatgaataaaacaaatgactaaatctgagatttagaaaaactcttttctatatcttgatttatatggattctggacttttctcacattcttctttttcttttcctccttctggttttcctccttctcttccttttacttcttcttgaataaaaaaataatagaagataacaaaggatcgtgaactagtactgtgactcagtcttgtagaatgtcagaattactactgatatggtttggctgtgttcccacgcaaatctcatcttgaattatagttcccataatcccaacgtgttgtgggagggagccagtgggaggtaattggctcatgtgagcagttacctccatgttgttctcatgatagtgagtgagttctcatgatatctgatggttttatgagggggttttcctcttttgcctggcacttctccttcctgctgccacgtgaagaaggatgtgtttgctttccaggcccccacagccatgctgaactgtgagtcaattaaacctcttttgttcataaattacccagtctcaggtgtgtctttactcacagaatggaaaggactaatacaactactaaattttattatccttgaatgcccaacatattgccagtaatttggaaaactaaagaaattgagcaagatgtctcccttctgtccttacacatgcctccaacaccctgcaatgctatgtctttccaagagcttaagagaggctgattatatttgaatagtaaggttacatttatttcatgtctcattgtgactactagttccaacttttagtcataaccaattattagagaagagtcagagttttaatagcattattatgtatgctttgtgttttagtgcacttcccaggaggttggtgatatcaccaccagcatcaccatttgcatcattattatctgtattagtccatcctcacattgctataaagaaatacctgagaatgagtgatttataaagaaaagagtttttaattggctcacagttctgcaggatgtataggaagcatagcagcatctgcttctggggagccctcaggaagcttccaatcatggcaaataggggaggaagagtctcacatgacaggagcaggaacaagagagacacagggaagatgccacacactttaaacaaccagatctcataagaactcactcactatcacgagaacaggaccaagggaatggtactaaaacgttcatgagaaattgtccccatgatccaatcacctcccaccaggccccatctccaacactggagattacaactgaacaggagatttgggtggggacacatccacaccatatcaccgtcttcactgccatagtgttactcttatctaattcattgcaatttcccttctgacaagtctttgatggccacagaggttctcttctgctgtgttgcataagctctggtcttgaatatatctctctttggattaatctgaggagtagggctacaagttgggaagcatggcagccatctaatcatgaaaattctaggtgagtttcattggcctctactggggttaccttttctatgtggtttggaactgcagaaccattatgtgcatgtgtgtgtgtgtacgcgtgtgtgtgtgtgtgtgtatatttatatacacacacacatatatccagcccctctgacattggctcctaaccattctgtacacctctgctttgccttgatcgcatgaaaatatgctgagaagctcatatttccactttaattgtaaatctgaattgataaatgatttaaggtccagtgtcttggtgtactctcttagtaaacaggcctaattcatctcacagaaataaactttgcattgtcattgcatagctactaggtagttccaggcctgatttgccttgaggggaattgaatgatgtaacctgtgcggtgcagcctgtgagagcaatttgggtggtttttatgccattggtttttatgctcaggatgaaagctcatggagaaatgtagaatgctattattatcttatcttcatgctgacagctccctctgggcacctacaggtttattgctggttggaggatcaagtttaaagggagagaacttcgtggttggtgataactatgccttttgtgtttctttattataggaacaggggaaaattggagttgtcttcaacattggcacagttgacatctccatcaaagaggagagaacccctgtaaatgacggcaaataccatgtggtacgcttcaccaggaacggcggcaacgccaccctgcaggtggacaactggccagtgaatgaacattatcctacaggtacatgttgttcgctcaatggtcctactctttttgactctcccattctcacttttcagtggtgatttttctcatgactgtcaccaaattccagaacactgagtgaagtacacattcatgatttttttgtatgagaagataagtcatctctttaggacttgatccagtatagggagcttctggagactttaccaactatgcactggacactttttgtcaacctttgactgatacagcctgactggctcataccaaagacaattacggtagattttgcagggcctgtagatgaggagcagtgaagggaaggatcatctctatcatgagctagtgtcgataatcataagatgctccatttgagacccagactttgtggtgccatttagtcggatgcagttgaaggtgcagatgccagagagagactctaaaaggacaattactgaacttgaagacacagatcaagtcatggtaacaatgagagaaaaactaaggtggaattttattcgtttggtggactttgctagtttttattttctcacttaccctaagcctgcctggatattcaaaggttggtcctagtagtcattttaatagcaagcatgctggtgtggcaggaaaaggggttaatcatctgtttaaattttacagtcaagaaacattcagcaacaaattcccagagccagatggctgaatcaagcacaacgggagaaaaggttgccttccttaaaagagatcattcaaataatccctcagctttccctcttgcctctcacttctcccaggaaaagtcctgaatgctgatcgtaaaagtgccaggaatggaagggacaacccttcagcaaagggccattgttccacaattgcactgtcatctgatggatgcaagagaatagtgagaatattgcacttctcactaatgtgggcatgaagtgatgtgctactctctatcctacacaccaaactcctcacaattttctcaccacttttctctaacttcctttacagtgaggtgggcacaataacaaagaagcttgaagcacattttcacatgtctaagagccattagctaataatggttatgcttgtgagaaagatacaaagtgaatttgcctatttgtaggccaagactttgaatggcttgaaggctgttgtatctccacacctaactcagcattaattttctttaaaagcctatcagaagtatctgcgctgttgggttgttccctaactgctagagtcccgctatatctgtttaagaattgtaagagcatctggaaacagcatgcaagacccccaaggtattgaggcaaaaagctccacccactattgatttgccatctcggtttccataaaacagccagctcagccattgctaggggtctcagaatttcttagattaaggcacataaatgcccttatgaggttatctttgagtatttgaagaaagccaaagctattaacagcttctaggaatttttatcattcaaattcactacacactaatagacttaatttttaaatgcttcctgcttaatccctgatggatgggggagagggtgaaaggaataaaagcagtccagtatcttaaaagctgttcataggctcatagaaaaaaatcaatctctctctccatatgtgttatcattggccttgctagtgttgctgaagggtttgttgtgtttctgttaggaatttcaaagatttctaaattgatgttaaccacttgccttgagccaatatagaatctacaagtttgctgccagcaatgagcaggctctttaatggtcatttttaaagccacagctatgtaaccaaaccggagattcttgctgtgcgcctatcttttggtgtctttctttagttccaaattatgggttgcttcctatatgttttcaaaacagattaagcctttctttaatagcattgctccctcctgaaaactattattatcattggaaactgttatttagtaacgatatgtgttattatttcaggacagggtacagtatagcatttataagtatgggccttggagtcaactggctagagttgggatcttggtttcatcacctgtgagtctaaagaccttgaaatgtcctaagcattgaaatatttggtgcctctccccacatgtaattcaaaatacagtaacactgaaccataaaataagtgtaagaatttctaagagtttttatttttctcctctgatgatttctgtaatgctttcaaaatatattagattctttcttcccaaattctcattttgtactttctctgttttgttgttctttaagaagatgttcattcttctccctgagactgtttcctagtctagacaaccagggtaatgataatacctggttaatgtgaagattaagtgagttgaccacatgtataatgctgggacaattaagtcaatcctcaataaatgttagctgtgaggattaccaatcatttggctagcattttaaattaggacatatttttgagtacagatttcttcattttgaagatgaaataccctatcaattagacaaggtagatattttttattctccatttcaaataaaaacagagacccaaggaggtgctatgcccttcctaaggtcacatagcaagtgaaggaagacctaggacaagatttttctgtttccaattgggcagttttcactattgctcccccagagaattgggggatgttctgaaaaatgcatagctagaaatgagtatttttcttcttgtgtcatcttagatttctttctttaaagaagtgtcatatctcaaaggtcactttccaatgatcacacaaaagtggttattgtgaggtgttgagttcaaaatcctcatttaaaagttttattggcaccagtgaccccaagctgctctccttacaacaatggcaatgtgctcccatgaagcagctgaaagaatagtgagtatttaaaggagctatatccccttaccttgctgcctcaattaaaaagttgttgtgtgatatactagatcgaggtttatgttccactctgccaagacttcctaggagcggttcactttttgagccttggataccttattttctctcctctctgcttccctgtgctattaaaaggatcaatttaactattaataatttaaagtatcatgagaaaaatctggcaatgtttattttaaatcataagatcaaaattccccgtgtctgggccatcaaacaaagccatcaacctggcaaggcagtcttgacagtttctacaaaaatgtgtccttttgttttctaaagtcattctattttattattttatcaataacagtaggtttagaaatcatcaagggtttagtctcactactcacttattactaatgtttaaacagtaaagacatacagagtagctcctatagaagatttatgttaagttatctcacttggagaacatgctctcggggaattgttcctgcctacaaggtctgaatgagtcagctgtgcaccgggatgaatgggtcatctccacagtcttctcatgggcatttatggggctctactgaaacatcccaccgtgaaatatttagaacccagctgggcacagggcatgtagcactggctctttctttgtgaatcagggaagaaacagaatgaaaatagttctatagcaatcggaatcttatatcactaaattctgggaggtagaactgaaaagcaacttctttctttgaacctgaaaatagaaaagctaagaaacaggagagggaaataaaagaagaatcagcccagagctatcatccaggcactgacaaatgttccttataaagtctctgattgttgtccctatacaatgcggtggtaggaacaagggagggggggtgaaaggtgacttgagtatgaggaattaattttagccacagctctaggccccctggaaggctgagctgactgggtttgttccatatcttctctctgctgtgagtgggtggccggtgatactgtcactgctgtaagatccctgagcatggtccagtaaaggcttttcaggtcctatctaggcttcctgggacatgcagactgatacacagcttcaatctttgtatgtcagggggtgctgaggagagcagggcataccaactcagttcaagtgctcttcacagaattcctcttcttcagtctttaaaatgcacacggatgacctacatttaaatcctatttgaccacccaacttagaacgtgaaaaagaggtaaaagtagctccctttcaaggatgctacattagaaaactctctttatatttgagtttgtcaaattccacagaaacttgtctttataggggttggaagagaaaacattgctatggtacttataaaacattgctatagtacttattgatgaccaaaataccttcatatcggttattacatttgagcctcactccatcctgtgaaggacagggtttggtattattactcctgccatacccattttaaggttacgttatcaaggctctgaaaggctaaataactttcccagtgtcacacagcttaaggagcagagccaacacttttctatcctgatcctcagactgcacagcctcaaactttctgctcactttcctatttctcagagccacgattttattaataatgacagtatttctttttgtaaaaacatattctcaaatggaaatctctgcctggagtagtctagttagtaaggtttttcaacctattgacatttggggctggacacatctttgctgttggtgtgtaaggaagggggcggggtactgttttgcacattgcaggatgtttagcagcatccatgacttttaccccctggatgccactctcatgtttccacaagtgccaaataccctctggtcagcaaaatcacccccatataagagccgctgacttagagaaagtttccaacatattttgtttaaatgttcatcatgtttttgtaatttagacagtatacatcggtataagaaagattttttttttgtccacatctcttcctcaattattgagactttaaaggattaaaaacaagtctatgtacttgacatgatgctgaaatttctcaggccttgggttttcattaattcctagccaggaggtttactttccttttctttatgtcttttcctgcgaacatttgagaccttgccagatttgaagcatgcattaaaacaagccccatctacctgctcattcatccgttcaggactagcgttgctttcagttcaacagggggaaaaacagagagagcagagtcctgcagagggaataagaagtataaatacaatcaagaaggaaagccatatttgaacaaggtttcaggactacagacatataagggcaaccagagaaagcctcacttaatgaatgtgtttgaacattgtgaggaacattttaaaaccatcttataaagaaggtgctccaacattcagtcacaaaatgtatcaattaatcactcaaactagtgtatcttgaatattcacactgctaactagtcatcctttccaatttgtcagaaatgaattaggattcacatgtttgtgagtttctatttccaagggaattatttccacattatgcagtttgtcttcggttaacaaaaatgttttaaaagaatgttttcaataggcacttatatatacatatttgtgtaaagcaatggtctgcaacctggctgaaattgagaatcccctgggaagtttaataaattgccagtgctcgggcactggtctcagggcatctaatttaactgaactggggtgtggtccatggatcagcagcatcagcttcccctgggagcttgttaaaaatgcagactctcaggcaccaccccgtacctgcaaaatcagatcccccagtgctatgggtacattgtaaattgagaaacactggcccaggcatttttttgtttgttttttgttgtttttaaaaaaagctcctaaggtgattctctgtgtagctaagtttgacattcactgatatgtagaagctaaaaaatgtgtctttctttcagactgactaccggtactgttcaatgtggtagccgccaaccatatgttgctattgagcagtgtggctggtatgacggagattctgaaatttttgttttattatgtacttatgtcctaggcactgaaggctttaaatacatttctcattcagtcctcactccaacactatgaggctataggttagaggctagtattagccagtgcaggactacaatatgccatcttttatttccttttatgtgttttctaccatgtaaacgatgggcatttgccttcatgtaccttctgaactcatctaatgagttttgatattatacaatcacagggataataactccaccctatccaagcagctgttggagagtcattaaagggtgatgattaagcatgagggttttggagtcagactttctaggtgtaaccaagggcccctggccctgtcacttgccagcttgcccacaaccttgagaaggttcccgctgtcgagaagtttctctatgctttgatctccatgatcatatatatgcattttctcgcattaaaaccaagtgaatgctcagattgacattactataggacacttcacaaaaaaagaaagtactggctagaggtatgtttcctaaacacacatggcaaactaccctttcttaagctatatttgtatgctctgacagcatggctatggtgcaaatctatcaacaaacttgaccctaagaagccagttacatgacctataaaatggggattgtgttcattgttctgtcttagaaagtggaaagttctttgaataccttaaagcattgcatgaataataattgtacctgcaggtgtattgtctggattatctaccacccgtatacattttaggaccattttttatcttgactttctacaatgaagtttacttatgaaaggtgagaataggggactaagagattttccatcttgctttctcatccttcatggagaattccacaatagtagaaacggttccaaagtgagggacatgtgcactgaataaacactttctcccagaggtgtaggaagtggcagatggtgccattcaccgtctctcagccaaactcacccaggtggtgatggctgccatttgccgaacatttatgacatactccccacttcatgggcagcatcctacttagtcttgaaaccacccattaggacagcgttggtcttattcccatttttttagattaggaacagtctatgggagtgtagcttagtttgggaaatgctggtattcaacccagaaccatctgacttaagagtcttaatgtttaatcacactctgctccttccttagattctcgtaaacaccctagaacagttgcatatcctagaaattctgggtttaactcaaatcttgacaatttagaatttttctctcaagttaaattatagaattcccccctcaggttaaatctctgatttctgcccagtctagaagtcagcatttccttgggcatctatacatatttggctttatctatatcatcggtgtggcctctggaagccttgtcagcctctttctttttgcgatcttgttttaccttctagtgccatatctatgcaaaaagaaagaacttttaaatgaaggtttgttttgccatttaatagtcttgcttggggagtgacagagtggcaagaaggtgcttagtatttttttaatttaatttttgttttatcaaggaaacttcctttcttctctgtgaattcccagccacagataaacaggcttgtatcttataagttaaatacaattactgctatcaaacctagagcctttttctctctcccataaatgtctctaagaagctgataagcatttcaaggcaaactggagcttggactaatgctaaaattaaacataaccacccagaagacaaagagaccagatagaaatacataaaacatttgaggtggtgggaacacatggacacagggcacatagaaacttgcccccaaaacattaggttaatacatagctcaaggttatttataaaggaattaacatacacaaaggagctttttataattataaggatttacatcagataataacaattgtagtagccaaagatattatttatctagaattcacttgtgaacagggcatgcttttggtctacagggctgttgagcaaaagaataattttgctgcaaccctctgtaggactttataggatgcacatttacattttccccatttttagtagactatcttgggatttaaagaagaagttggaattttaaaaattagaaagcacatcatatttatttagccatatgttaaatgttataaatattatagtttagggactcagtaaaatgaataattaaaaatttgagggtcacttctaggtacaatgtaaccagggatgtaagataaagaatttcttgatttccaaccataatgcatctattttaattaaataatatctttcaagattagaaatacagtgtagtcacactttatgggatttttaaaattatacttatctgaaatagtgtgacataaataaaaatattaataacatctccctctatgtgaggcatcagtaataacatacattcttctgaattaaaacaatcatcaaatattgcataatttcaaagctggttagtgaattacaagttttgttttccctattgtcacatggaagctctagtttaagtagttaatacaaattctggcctgcagaagttgtctctaattacgaaaacttagaattattatcccagccataaaatacaattaccctgtaccgtttttcctctgccccagagctgcctgaacaccaagtgtcctaccacccatacaagagcatagttttatttatgggaaaagtttccaagttccagtctcttcaatttaaattttgcacaaggttgcagagtctctctagttatttaaagtctaaaaagaacactgagcttctttgagaaaggtggtacataaatatccaataataataatatatattcacatacagtatgtcatttatacttctataaagcagagaaggtaatgaaaggtgctctatactgtaaatcactcaatcgattgtaatcatattgcagctcatctcaaagagataaagaccttccactcctctaaaatccctgtcaatatcctagcaggctgaagagaggggaaagggggtcagaagaggaaggagggaatgagtcaaggacaaagcggcactttgagtcttcagttcatggagttaacatgaatttgattggattcccagtgatatttacagttttctccataagatgcatttcttttccacacggtacttttacagcctttcagtaagtccctgatgctctgtgttggccttgatggcatagtttactaagtgccaatggtagatatatagcacagcataagaagacttagggactaagtttataagtagcaaatgtcaattcgacagaacttaaatgctgaagtgtatatcaaacaatagaagtcgattgatcatgggctagcaaaaaatttatattgcactttcaaacagcagaaacactgtaaaaacctttttactaactgctgttgcctttaatgtaatagaagtattcccctatcctcatcaccggggtagctctgagtggagccatttctttatgcacttattcattcaccttcattcactattcaacaaacatttgttccacatctactttatatgtgaattcatactaggtgatgggtatatggtgaaaaatgaaacacagctcctgacctcaaggatcctcaagtgtagttgaagagaaatacaagtacacaaggaagacatttttattgagcagttattaattgccaggtagggtactgggttcttgtatcaagtctttgcagtagccccaaggggtagatattactgttatcatttcacaaatgagaatctggagcttctcctagggtcaagctagcacatgaatacctggaactgaagcctgtatgtcttagaaggcaaacccaaagctcccgtacgctgccctatcttgaacctacaattccacaaagtgaaagaaggtgctactattgaggtgagatccaagttcagtagcgggtacacataaatgcctaatggagcctgaagatcagacaggggcgagcatggaatacaatttgggatgtgaccttgaattatctggaacaatgccaataagctctgctcccctacctagtgtgaaagatgacatgacaacttatacctttctcattgaggaaattaatgaccatggaattctttcttttacttaaattttttttttacagttttattgagggatgattgataggcaaaaaaatcctgcgcatactttgatgagtttagacatgtgcgtacacctgtgataccttcaacacagtcaaaataaacacattcatcgtaccttattttacttagtgtcatctccccagtggttccaaggtagaagtattaatctccctcatttacagatgagtaaaccaaggttcagggaggttgagcacatttgctgtggtcactgtccaccaagggtcaactctgagattccacacagatatgtttgccctcatttgccctcacaacctaatacccaggttgcccactccacttttccaatgtcttccaagagcactccagtttgcatcatctacagagctcaaattcacatggttgacagatacaaattcacatgcaaatgtactattatttcctacatcccagtgcatgcagaacactgtaatcccattattaaacatttactagaaatgtgcttctgcctgatgcacaattgccagcctcaatgtttaattaaactagatttgttttcattttaatcacattagagaaatgtgtttttctcagagttcagtggtgaaatcttcattccaaatgcctccaagtgactgaaaactgtatatcccagaggaagggatgagggtattacaacctatccttgcataaaatattttaggggaaaaatattaattaataacaggtaagactgggatacactatttgtttttgaatcatcatagcatcctggaaaggggtcctattattattattaccattttagagatgaggaaacgaagtctgagtggttaagtaacacactccagtgttgcacagctagtaggtggcagaaccaacatttggatgtagacagggaaaccctgatatctttatttagattagggatcaccaaaccttttcccccaaaggccaaataacaagtagcataggctttagaaaccaacctatcttataaatataaatatatttagatattaacttcaatattttattaatataaatatgatatgatttgcatgatctttgttgcagttattccagtctgctgttataatgcaaaatctactatagacaatacataaatgaataggcacagctgtattctaataaaacttgctttacaaaaacaagctgtgatgaaccacgtttccccattaggtttagctgggggaaccctgatttaaatcacggatagttggaagcctacagcttttactaatccatcagctttattttttgaattgtcttatctgtttggaataaagagagcaagagtatctctaagtggatgggttaaatccctagagagacagagaatagtactaccgtgtagggtgacatagacctactggtgaggttaattcaggataaagaaataaagagatacaatatgtaagaaggacaggcactccatttacgtatagttaaaaatgacaaacaacaaaatagctaaataccatttttttaattcaacaccaaagacagacacagattccattctagagcaagatttgaagatgatggacagaaagcattgtttctttacttctgttacttctacttaataagccgtggtgatttaaatacacccctctctcctaaaaaaatagtgcttacttttcttttaaattcaagaattttgattagccaccctagcctatttctcatagcccttatgcataaaggtgccagttgatgccttgcattgatctttcttttctcctacccgcaccctgattgatatgtctgtcttctaagtcttagagagcatgcccttcattatctcagcattggttgtccctgtcttgctgctgagagcttcctgcttgagcttcagttccattttcaagccattgatctgatgttctgaggatggactagcccactttagaggtggctcagcccacttcatgctattgagttttagagattttagaatcagatcccctatttattaaagcagcaagaccaggctatcagtttttatagatgtgcatatgcctaaaaccatgtagtatttaaaataaattttgacctacatcctctattccccaccacgcctggtacccaccattttactttctctttctatgtatttccttcacttttattttttgctttttggattccaaaaagtgagattgtatagtattttttttctgtgcaaagttataagggatgaataagtctagagatctaatgtacaacataaggactatatttaataatattgtattattatatattgataatttgccaagagagtagattttaggtattcatacgacaaagaagaaagaaaggaaagggagagaaacaatcactgtatgagatgatgggcatgttactttgcttgactacagtcatttcagtgtttatatgtatatcaagattacatatataccttatatgtatatataccttaaatatatactttttttaaaagccaaactaaagcacactgggtttttatttacaaaatagggacccccttcacagtttgctgacctcaattttgactccaattaagttatcaaagttctaactaccagaatagaaagcatatactgccagatttggccctatagtgcaagaaaagtggtcacagttttcttaatcctcttttaaaaaggaaagaaacaaacatagtaggtaatcagtaaatattaaactgtacaactgaggtttttggagctttctgacttcaatgactgcatatacacaacaaaaatataagttgttatacagcatccttgacaagcattaactataaatacttttataacaaaagaaaaatatcatttactacaaaacttttaagcttttgctttagaaatgtttctttattgaaacaaatatgattttattgaaatattttttatattagtacgatgactctttattggtctcaaagggtggattgccaagtataattaaacaaaatgataaataggaggaagatttcagtatccttgacagaaaaatacatataaatctaatatagatatatatgtaaaaagtaaatctaaaatcttagccaaggtttagaaatcttattacttcatttttatacctttataaaactgttgcgaggtgctgtttcaaataaaataaaaatttatgtaagtaaaatacaagctaaaatagaactgaaatgtctttaggtttacaaaatgaatagctggattagtttactgaatttttttctgtggtatgggtggcactggatctctagaatcggtaaaaataaaggcaatatattgttctcagggagcaattgagctctcctagaggaggcaaaccaagtgaaatctaatagttttgcttcattctgtgactttcccccgctatgacctcagaattttgagctacaagtaggtctataaagggaattttggaatactcttaatagatctgttcttgaaataagtcagctaaactgagtgaggtgctttgccaacacattaactgaaagtcctgaccaaccctgatcccagaccttcatggacaattctcttgttttatttccatttccagtagttgtatgtaattcttctaagagacttgttccaagccaaccttcctagtggtcttgttgaaatgagatagtggttgtaggtatcattgatgaacacataggccaaaacattattgaactattcagaaagtaaatctagcttattctgtggctgcataattatataactgtagctttctgtcaggttacagtggctttaattttctgatcaaataaaacaatcaatataattgtactttgttcctccctcttctggcttcgattctttgatttgtgccactcaccactctcattcttccaacctccccctactccactggcccctgcagctacttagaatagctagctgttgattaaagggaccaagagtttgagcagttactgtatactttcaaaccccactgccatttggaagtgaagtcccaactgacatagccaaactgtaaggacaaaagcaactctaatacctgctttcctttgtttatagcaactgctcaaattctcctctaaaagtattcattaagcatccttctctataaatctctgtggtagaaactgaataataggacttgaaccattattcaatcagaccaagtttaaacccaggttaaggaaagaggaagtctacacgtctttgctgctcactgtgtttagtatatatcctctataattcacaatcaaaagtaaatctttggacagcattcttgtttgggttagaagaaaaatttcaatccttgttcagaagtctaagcacttgtgaggattccaatatgatttttaaaggccaccatccctgatagtcagaaataaaaacattaaaccaagaagactgcaggctttcttctcacctgtccatctcttgtcctaattacaccttatacttactaatgttgtaagtgctttttgacaagacagcaatggtacatcaatagatactgcatgaacttgagtaggcaaatcaagtcactcagaggccttcttttaatctcttggatcattattgcaaagataaaagcaggtttctgaaggagtgaaattcaaaggaacctagtaattagaatggtgaaaataccaggtcacccggtccgtttccctgcttggttcagatatttctaacaatatgtactagtttaattttattcatctaatttaaaatgagagactttatctttcttccaccaagataatatatctgatttctcctctttggcttaaattttttttttcattcacatcttttattattagggttgtcagttgaaattattttgaataatttctttaaatcatggatttttttcttacatctcatatctaggagctatttcttgttgcaaggtgcaaggttctatggcacatacaaaagcatgctttcatttgggatatttataaaatctctctatacacacacacccatcaatgggcaaatataaaaagtattgcctttgtgctagcatgtagttaatattcaatgaatatctttacacgtaaaatcacctataatctttagacatgttcctcagatagccaagatttaatattacatataaagtcatatgaaatagcttaaagaaggaagaggcattgttattttatgtatatgtctcaaatgttataaaggttataagaacctttctgaacatcgaaaacttcaaagctaatagtttaatagtttgttggatacctgccatcttttgaggtggccaatagttgtcaactttttgagtatccttgagcactgaaggtatgtcaatgtttggtttcattgtgtgttaaggagggaattatagaagtagaatggagtaaaaagcttaaaaaagaaaaagcactgcttctaaggtgattctaatttcataggaaaaaaatactttaaggactaatattcaatacagagtagcggaatctgggtgccagataaatatttaacatttgtggataattttacataatcattggccactttcttaaaagtgttttttaaagccctaattttaaaaaatgctattctggccatcacatttacaatgtgaataatatttgagtcatgacgtaactataagttacttctaatgattgactgtcacttgagttgtaaatcacagcatttagcagtgctagttgtccttacttttggtaaccccttagtccctggatcttgatcattttggggtctttactctagagtctatctttgctctagagtctagctgccattcacatgctaaagaaatgccccttaaatagtacctataacatcctaaggaaatgatttctaaactcttctcaatgagtttaaaaaggctgctttttgctaatccataaactttaacaggggctgaagaggcagtgcctgctttttaaaaaccaatgttgcaggctgggcgcagtggctcacacctacagatgcatgcctatagtcgcagctatttgggcggctgaggcaggggaaggcgggaaaattgcttgagcccaggaggtgaaggttgcagggagctaagatcctgccattgtactccagcctgggcgatgagagtgaaaccctgtctcaaaacaaaacagaacaacagaaaaaaaggtaaaaccaaggttgcaaggtaggactgtttgtgtgtgtgtgtgtgtatgtgtgtgtgtgtgtctagttttgatctttaatgagagttttggtttgtttctattgttgtgtgttagtagggaatgtggtggaggagtgcctttctagtctaagtatacgtaagtgtattcatgaccagtattcaaagggtattcataccctgcagggacataaatggttttgttttggaatgttagggttaagaatgaaagtgatggccctgtttgctcagaaaaaaaagaaggtaatccttcagtgctctctgtgaaatcatgtatggaatgaaaaaattcattgatggggtgagaggtctcagtgccagcaagtcttactagtaaattcagaattcagcctgctgttcctagagatcttcctctccactcctcatccaaagagtgatagaaggaggtcagataagtaggtccttgtccctttagggagctacttaactctactcattatcgtcttggagtcaatccccacctcattccctgctcttcccctagtctgtgtctagaatcaaggatcagagaagcatcaacacatgcatcaacctttctccaattttccttccctttcccaactccctcagccttaccctctcctctcaggaactgcattattgcatctcttcttttggatttggtaattctttccttagaaagaggaacagggctaaggataggcaacaggggcccagctgtccatgtctccatccttggacccctaagacttttgccacacaaactcctttgaatctggagactgcaacggagctgcttccctcctcctgctgagccttcatggaaatcctcataggagatagtgtttcctttacccactctcggacccctgttcttcctggatctcctgaattcctggctatatcatttaggttcgctgcattgcaaaccactccaaaatttccgtggctcatgtgagtgtttttttctcttctgggttggcttggatggagctagatgatcttgatggcctcatgtacccctctggggtctcagttcagatagccgagtaggttcacatggctgggtttcttttctcatggaagttcacatggcaatctcaggtgtaggcagcaggcaagggcaagcattcatacacagatggctcttcaagcttctgcttatatcacatttgctagtgcccatatgcccaagcaagtctcacggcccacccagaaccccaagggtgaaaagatagattcaaactgttatgagaggagtaagagtctcactgccaagagacagattttgaaatgggattgtagctattttttttttttttccaatttaacacactggaaaagaagaaaggctctggttctactaatcatatttccctcgtaaattttctccttccaaccctgattcaggtctcaagctgtggttggaaatcagtgactttcactaagggattgtcctttcttttctttaggacatggctttttgaaattaatcttgattctttctgccatatcccaagccttacatttttttcctttttttctctatgtctgatcattttgctttaagtcaaattgattttttaaaaattaaatgcccattaagaaaattatccacattcatgttcccttggatgctttcaaatattttattttcctttgcttttggcagttacaatctatcagtgttatttgtaaaatgtcttatatttgtatagggtatgttctccctttcctcttttcttcttttctttttaaactaagatagatgtgttataaaacagcccccatgctgatccatacttttctctagacatttctgtgagctcagtactttgttgtttatcattatcctttgtttgtagccagatttgaggccatgttgcagttctcacaaacaaatcaatttgaattaatttgccaagtagaattaacgaggcattgtatgaattcaagacatactacaactacggcatcccctgaggttatttcttctctgggaaaattttgattcttgtaccacattttaatagtgtatatctgacctttgaatcttgcactaaatgatacatggctgccagctggtttaatttttgagaagccttaaaaattctatgcagccaaacaaataggagtgtagacaattctttaattattaactttacggggagaaagttgtcttcaagatcgatactctctgatgcttgcttgttgctaggagttctttttctaatgatgttctaagcagaagtttgagaaacatcaaaatagagaatatatatttcttagatggtctttgaggtctccacaacctaaaaatgatgggctccttctctcaaattataagctataaatcccagcaaactctactcccagaaactgtttttatttaattataaaatgggaaagcatttactctaaagagggaccatggtgattacctgaaattccttcactccctaaatggacatctacatctgtcactaatatattatttagcaaaagaatttccttcagactatgatgaccaatgcaaacaaaataaataagaaaatccagtcccctcccacccctcacacggtgaggaaatggtaatagagttcttcaaagaaactctaatttctgggtcttagatgaataacattagaagtgcttaaggaacttgaattctaagcccctttaatgttcgctcagaaataattaacaggagccagtcagaatagaaaactagtctgggaaaagtgtcctaaattttacactgtataataggatggatctcttaaactcgggactgatatataaaacttctccagtgtttcatttgaccaaaaattggcacacatttagctagatttaaaaaagaatatggtgatggctgagaactaacctgggctcattaaaaaacaaacaaacaaaaactcacgcatgctagtgtaactttctcttggatagcaatagcaaattggcaggtgaggaggatattataaataccatgcacagtgtatcttcatttccctaaagcagtatactgtaatgtacagagaactatgaagggatcttaaagagacctgcctgtgttccatcatttgaagctttctggttacactgtaaagtttgaggtaaactaaaataataaaagtaaaatttattatctcacagtttctataggtcagaatttgatagcagcttagttgagtgattctggcttaaggtgtctgatgagttgcagttggtatgaactacggctgcagtcatctcagtgctatctagacctgggagatctgattacctggaaatctttcactcacatggatgttgactggaagcatcagttactctctggctcagttccttgccttatgtatgtttccatagaacttcttaagtgtcttcatgacatgagtctagcttgctcgaaatgagtggtccgagagagagcaccttttatgactcagtctctaagtccacacactgttccttctaccgtgttttactctgtagaatcaagtcactaagtccagcccacaatcaaggttgaagaatcaaacctcacctcttacacagaggagtttcaaagtatttttagatattttatagctccatcataatcttcctattcagggactagaatgaatgcacaaaaaatatgcttattaaatttgcagataacacaaagctaagagaggtatctcctaccagaaacaaaaaatcctagagttaaacattttcttaccatgtttggatgctgttatgaaacaaaaagaatacatttaatgagatataaatacctgttggacgttcataaagtatgttgtatgaatgcaacgtggaacaatttctttgggaagccattcaactagaaactggcttgagttttagttagaaacaagcctaatatgcggtcctgttatgatgtggttgttgaagcaacggttgcaaatcagtatactagtcaggcctcctgtgggtggtgactagaacagtgattgttacttttagatattttgggaataataaattcattcttaggcaagggggttcaaggatggtctaaaatgtctacaattttataaacactggcaattctataggatgtatacagaaggattactatgtcataagtttcttgagcatcggagatattaataatagcatgactttcctgttgtcgggatgacaatgttcctgtgttgtgcagcggaattgtcctcccaaacctcctccctgtcctctgagctgtgtggggacaccacatatgtatgtttaaatgaacagaattttaaaaaatcaaatattctggcattctggcttcaaaaaccttgcgtttgatgttctctacttagaaataaataaccaaacatgagaggaatgagaggagatggggatggggagtgggaggaagagggtagatagaaataaaaggaagaacaacattacagagaagcagagatgacacagagggtggacacgtgggaaggcctggatcacaggggaaagagtgagccccaaaataacactgtggcttttgcagcaaggaggaaataagtgataagaggaaaggcacctggggaaatcttgaagggatcatatgtcaaacggctgaagagcaaacattaaagctttattttgaaaaggatatttgaaaatatttgacaccaaaaattctgtagggaagtaattcttgtggagtttgccttctttttagtttaactcttctgaatcaggtacttgttataacaaatcatatattgagggattattttgtgccacagatttgcaacatgctttatatacatttccttttaattctcaccgcaatcccatgttgcaattattattacgatccccttttaaatatgaagaaactaaaacttaaaatgcactaagacatggctaaaactaagcatggttaccagaaaggaacaagacaaaattcagacattgaaatcaactactgtagcttcagtgcatatttcagaataattgtggaaggaaaaaaaaagtgacatttgaggaaagaaagcaaattttacagtcagtttatgttttgttaatttataacatggcctttttgagaggggctcttaaataaagaattggtgccaggttaacctggcatactgaagaaagtttcatttgaagttgcttgaaaatattctcttaaattataggaatgaataaagaggttgcagtcgcctgggcctagttttattaacctaactgggattgaaagtatccttgatagaggaggagaaatgagcttcaggaagtgagttacaaatggcctcaaagtactgagaaaggataatgattggtaaaatatgttgtaattattgcatcaaagtaaatcattttagtacataatacctcagcagaaatggatttttgatttgtttaggatatgaaagagaagtctaatattaacatgtatgcacaaaacatgtatgttcaaccagcaacagacagcaaggaataggggcatgaacattcggatagctggacgtaatacaccagggttacatctccggcatggttccattcccattccatagcctataagatatttggacatgataggccaggtgtggtggctcttgcctgtaatcccagcactttgggaggtcgaggcgggtggatcacgaggtcaggagttggagaccagcctggccaacacagtgaaaccccatctctcctaaaaattagctgggcatgatggtgcatgcccatagtcccagctactcgggaggctgaggctgcagtgagccaagatcacaccactgcactccagcctgcctgtctcagagaagaaaaaaaaaaagatagttggacatgataactacatgtctacaggctcatcagagagagagcacaggcagaggctagagctcaatgcaaatatcgagactgaaaaaggttttggaaggctctcaaggcaaggatttaccctgactcccatccccctgctgttcaaggctccttactgggagaaagaactttcttttctaagccttaggtgagtgttagggaaggatcctaagaattaaaacaaatcacaggctctctcaactcccaacctcttttgattccccacaagctaagcccttgcctgagttattgcatttaatttggataaaaccatgcaatatagatattaccttttttaaaaaaacaaaaaacagatgaagacaccaagagtcatctagattaaataaattgcccaagttcacagaactgataaatgtctggacttgattcaaagtttgtctgactccatatccaatattcttttcactcatgtttgggccatctttgcttaaacagatcaactagcacagcctagagttggtaaacccatactacaactttaatttaggaaggaaatgatactgtctgctcgtatatatttgccattatcagaacatatccagaagacatgtagaggtgagctttatcagccaacttggtgtacgacagggtgatttgcacttctttccagggtctccctggctcaaggagccacttaaaaagctcccttacttaataatgcccttgtgctctgggtctattaatttacttcccacaagctgatcaattttctgttccaagacattaatttctttaccttggcacattaaaggatcaaagctcacaacatataaatagttctttttccttctgccccaaaggtgtgtagtgaggattaatgagatgatgcttataattgcattttgagctccttggtcgaaaggcactttataaatacaagatattagttttttgctgagatccatctatcacttacaagtggccaaacattctagatggcctttgggtgtgcaacacctccctctctgactctgagttggtctgggacaatgccagaaatgtggctcaagccaagttcagagtttctggagttcccttcctttagtgtcatatactttctctgaaacttaacttagaaagtgttctttgggggaagagacatggcaataacctctaaactgccctagtacttgagggcagcagtaccactacattgattttcttttgcctctgactttaatacatagcatttattctttgactgttcattagacccacagtctgattttttagtgtcaacaaagcaataaagaaaatttgttcctcctttatttcagggctcaagacaaaattcaaaaatgcctttggcattcattttgcacagacgaatgttgttaggatattcctattagcatgtccacgtgcttgacaacatttcaggtggtattaatagtctacctgcaagaaagtgctttctgccagcctggtgcaaattggcagaacctttaagccactctttctcagcttagcagcagtatatcatcattacctgtggctggaccaagaaatcacatttgtcaatgcctgaattgctcttttactttcagtggttttagaaatccactttgttttggaaatgggcttagctgagtatgttagaagatacagaaacatataaagtgatagataagggatttaagggaatattaaggatgttacattttctatggtcagttgatctttggaagatgacttttgtgggaccaaatagaatatggtcatcttttgaatgaaggactggtaagtgggaccaaatagaatatggtcatcttttgaatgaaggactgataaggtagtgagacaagggaagcataccgtggaactaatgagcttccttctgatcactagaaaagagtcgagtcatattaataatgatagtttaaatatgctgtactccctattattctatactaagtcctatggtaaattgagaaatggggaaactgaggccaagtgacttgcccacgatcacacagctaataagtgataaagttagaactcaggaccagatttgtctccagagcccatggtcttaactcctatgctgtattgattatggctttaagagtattagtataccttctaattaaataggacccatgtttggaccaataaagtgtaagcgcagtgttgtaaaagttattttccatgttatacaagagttctatttttcagttttttcacttgaaataattgtattccttggagactgttaataaatttcgagtctcaccttaaagaggaattgatgtatattgaggcctactcaagggtcagtttgctttccgtttctttcccttttacttttatcctaagtggattcacccaaagtggaaaatgtgaggttggagtgtaaaggttggaactatgaaccagttgggcttcaatactttcacctcaaagtattctgttcttcacaatattataattccacagtgcatgtgcttgttgcacacgtctccaggagttgaaatacttgatattagagccagtggtccaaatgaaaatgaccagaagaggccaaatgtataatgttctcaatcccttatcaaaaatagatgggaataaacacacatatatttaagtacaataaaatgtgactaatatgtttttttctaaaacccagtcccatataggtgtcggatccacagaagtaatttaagaatggtttatttgaagatctctttgtataatttatagatttctcagtgtgattaagaaatgaagttattacatttttttctctaattagtaatgcacgtatgcctccttttaatgatattatgatgtttactactcatagggccattctttcttgagtatagccatcactttctgttgaagaattgatttcactctttgtttaaatgtacatacttgttgctatatgaaatatatgactgaatatcattaaagatttagcaagaatgtaggtgaatttggtgaggtttgttcagcttttagagtagccctgtataagaatacttatatttagaaggttgtttgcgcttcagtcaaactagcaaatgaggcatggggcaaataactcattctcatgcacatgtttctaaaacagttcttactaatgtttgagataaattaaaataaacaccaacaagaacatgaaaagagactaagaacaatgttaatgcggcaacttaaacaaatttggttttccaaatgaccttccatctttcacaacttttaacagcatgcaagattgctatccttagtgccagatactatcaatctggtgtggaaaacttaaaacttttttctaaatgtctttaaagctgaggtggagaagaatgactctctgtcactttcagaagggtctaaggttgaatcatgaccatgctgtccttccccatgtcacttactgtttatctaacatagttatctctttttctagcctgtatcatgcccccagattattttctatggtgctttacgtttgaaagagagtagatgatgagggtggggatgcttaggagggacaagggccctgtgtatttggaggaagtaaattaatacagcttcttaattaatttggtgtatattaaattctagaaatttggaattttagttacttctgattttgccctgcattttgctaagaatatttagctttatacttgctatcgactacaccaatctattccgtagtgagtagaatgaaggtcattaatatatttaatgtgtagccaacaatggcagatacagaaaacccaaagtaatagaatacattcaaggcagatctggcgcaagccaattaccttttctcagtatagtattctgttgtgtctaaaaccctagaggatgaatgacatcctttatgatatctgtcacctgtagggtaggattatgagttatagatgtatattcgtttcaaaaaggtacacgttctttttctatgaaaacgtctaaaaagtttactcaactttattttgaatgaatagaatgttgtaccaagatctaccaaggtagaccattataatgatctctaatcgatagctatattctttcgccatgggctattgaaacaccaagaaattaacttgcctgtctctttttcctctttgcctgccctctccatttttttctatgagaaatgattccttgaggaaaattttaaattatccactgcagttcgaaactgttaattgttcctattgcattttatttttcaatacattaatatgttataccctgtaccaaccagatacagtcccaaaacataggctagaagcagattcatagttgcctcttttatgagttcttattttaaaaattcctggtagtaaagatatgagtcagcttgttagaataatttgtctgtatgagaagtgaatggggaaccttgtgaacatcctccaatattgctacccgtttcctatcctatacccccaccctcacaacacagaaggtaggtaccagtttattcccaggtggaatctcctcagccaataatgactcctatatggagatggccctgcaattgaaatgctttagcatgcccctattcatttggtctgatgctatatgcaattctaatattctttatggcttttagaattctttgtaaattgtttccaagccacctggtttgagatttttctttcatttttaatattggtagtttggaatggagttccccaagttgcaatataggcctatgaatcaaaagtaatgaattacaattcactaatttctgccagatcaatgtgaggttggttgatgagatagaacagttcccaaggcatggcttcatcattttgttatttgaagcatattcattaagggtgtatctccacagcaccactctccaagtctgtcctaattatggaaaccattcagcagtgttaataacagttacgaaggaagagggggggcatactggcagttaaaaccactatgtttgagccttgaaactaattagatatttcatgcttggaagaagtattcctaacaggctttatgaatggatgcttgttcagaaaggtcctcttacagtaaggtaagagaaagagaaagcaggagggagagaggaaaggagggaagtggagggaggctaaatatacaaaatcagtgtctattataaaatatcggtgctcaaaagtctacaaatgttgtaccactatattataattacctctatttcctttgacatttgagtttccttatttttaaaaatgtggaacaaatctggaaagatagtgatataaaagcttatctgtactgatctacctctttgacaaagataatgagatgcaaggacatcctttatgtaataagaagtctcccttggccatcaaggcttaaattgtcctctcctcctttcccctgtcggaacataaagctgttgcaaacacttgagaggagaagaaaagaaggacatggccctatgtttctgatgggaatacggtagattaatagtgcagcttgcgtgactgtggagcgagggtcccgtctcacatgtgaaactgatctggcaggtgaattagtcatgggtcaaggagatccttgtgtctcaactggcccaattaaggtgtggttgagatgagacagagagagagtgaaggtaaatccatttccgtaaacggccagacctcttaaggattcccattccatgccacttttccaaaacatgatggagtactgcatggctaagactaacctgacctttaaacctatcgaccaagggcagagtgacttcaactccacctctactaaagataaattgatatctatctctaaaaacttcataaaacaaaccaaaaaacctaggatgttttttaatgacttattgacttttcagattgttctttaagctgttttttaaactttaaaggcaacactgataatgaacgcttccaaatggtaaaacagaaaatccccttcaaatataatcggcctgtagaggagtggctgcaggaaaaaggtaaccgtcattaaaactttcattttaaaatcatttgatcctaaaccctcatttttaaagcctgcaaataaatgttccttaaatgataatcgcctgctgcataaatgactgttttaattttcattataatttgtgtcagcttccacctgccatatgttgataaatcatgctataatacattgccattaaaatacagttaaagggactaacttctagcctgctatcagcatgacaaacacaaacaagaaattccaggaacttctaaaacagaaatgtattatggcaatttaaccactgcatgacattatttattaatttgttttaaattaccttttacaccaaagctttctaaagaaattccaaaagggctttttaaacttacacctggaggctgttttggcttgtagcatgcttaacaaaacaaaaaacaaacaaaaaaacaaacaaacaaaaaaccatagattgactcttgtaacttaaactacttaaatattgtaaggggagcatttttttttaacatttgttcttaaagaaaaaaatgaaaaagatgaattttgcctttaaaacctacagaggcaaaattattttctaagagattaaggttgtgtcctagttgctgactgaaactaaaaacaaaaacaaacttattttacacttcggttgtgtgcatacacttgtgtatttgatgttttatgcaacaaaagtgtaagaagttaacataatgagttggaaaagaaaaggttcatgaaaggcaaaacagcagtctctgatttgctggagacaacaaccactgttaataaaagagggcagcggttataactgatgttagaattttcctgtatagcttctagctgttagaaaataaaccattgtttttcaatgaaaaacagtctctaagaagatacgtattctttgttgttgttgttgttgagccagtgtaagctactcttgtctcaacacctaaagggagctcttaacatttgtagagatttcattgagttatatagaagaagtaaccaggtatattacttagtatacaacttaaagagcaaaggactactacagttttaagttggaggaagacattcagacctttaaacgtggaaaatcctcacggagtgttaactgtttgccctgtttttaatgtatgtggtctaattaaaaataagaataactctaaaaagcaaataattttgtttagtaatcatcagctcataaagtccctttaacattaaagacaatgattgcctcactttaaacaggaaaagcaaactagatgcatgtctgagtctcatgtgcctgagaaacctttttgtttctttcaattttatgttaataatttttattttactccattgccttttaagtctaagtttaatagcatgccaggcattttcatttgtataaaccattataaagttattagtaggcttttagtttttcttacaatagaattgttacccgttggctttcacataaaaggtgctttcaaatatacaagttgaggggttgggatggggggaggggtggctgaggtgggactggggaagatatcctagtttcttaaatatatgtatgattatatatgcatataaatctgaaaagaattatttgcaaaccgtgagtttctcttctacattttgttctctgaaaaaaaatttttgttgtaatttgggtgagtaacatctatgcattctattgtcttacctcttcctctgcctagctaaccttcccttcaaaaggaataaaatataccaaagacttgtaaagacaatgaatataaaggataaagatagatggatgattagacagatgcatttggaagtatttggaatgcctctttggagttatttctgtcactggggtggagagctgggtcatagcattcccaagtctcttttctggctctgtctactattgactaactttctgaccttagacaatccacttaacctctctatatctcagatttcccatctgaggacgggcaaaataatactgcctattccccaagggtgttctgaggtttaattaattagtctttgtgcaacactgactggagacatgcaaagatttaatttaagcagtatgtgaacttgatgtccaaatgaggtaataattaatgacttccaagaggatgggtatctaaaacaaaaagtaacctgctacaattcctctaccagtgtttgttataaccaaattttgcattaagaaagataaaatagttctcagattaggatatatatgcataaatatgcacatatatatatatgtttttatgtacatataatggtcagttattataaaaatctgatcataagccatgagtgaaaataatgagaataatgagatctggcattgatttggggaaatcttgggcaaatgataaaaagaaactggtcagttcttcacattcttcatagggaatgaatagtgatggttttttctgttattcactaacccctgtttatctgagagataaattaatcagagtaagggatggcaggacacgaagagtgctctactgttcctttactgattgctagctttgccattaaccacctaatccaaggtacagggagctaggagagggttttactacagcagaagagcagatctagccagaaacagaccatgaaacaaacaagcaaacagaaaagcaaacactccctatggcaagatgaaaaactgaaacatagacaaccccctttactgtctcactccatcagtgtcttattctcaagaattgattagtcagatctctctgggaaagtagctgtagtcaggagtagaggggtagtttaaatcttgtagcccaggaaacctgccttgcctttcctgatgcttgggtcagtcttgaacaggcaaagagcactttgtggagtgaatgatggcaactggaatgaaggagactcatcatctctagccagtgtaattcagctttgcattttcagttttctctgatcctctttttatttgtaagcactggcataataacaccactggagagataagatgagaactattatagaggttatcattgtgaagtattttcaaggatattagaatgtaagattttctacctgtaatcaagtataactgttaacttatcaccagtgctgaactatacacaaaataaagagatggataaatattatgattcgccagcagttgtgtgcatggaaagtatctcttggcattaggctgtctaatgtaagatactgaattttttcctagaaatctcctgctaggcagctgcttctaatttctaattcattatgttaagctgcttcaaatgcctctgtggggttgagggagaatttattttccccttccatcatttcatgtcttttgtagtaagctcagggcttccagaaaaaaaaaaaaaaaaaactgtcatcaacaataaacagtaaagaggtatgaactccagcatattacttagtattattatgcattgaactttctgctgtgtcttgtgtgaagaggacagaggacaaaatacagacagtgatgcatatgcacaacacactaaatgaattgctgagaaaatgatgaaaatctatgagatctgttttgattgcatccttgggatctgggtaattctgtagtcattaaggccagcagatcccatattcaggttctggagatttttataaagtatagatcattttcactataacaaagttctctggccaattcaccatactgcagtgttgaaagcttccaaagggctattatttgtaaatcattcttgattaatgggcactatgagttgcctagtgtgcagaattaactcttgtctaaggagtatcctctgatcggatgagcattctcttctctgccacttccatttctttcattgttatacattgagaaggtatttcacattatacaccaggaattcaaggacagatcaacattgtgtagccttgaagaccatgtaatagtggtagatttttaaagcccaaacgtgacaatatccctctattcatattggaaattataaagcaaaaagctttataattttgttaaaaaccctctttttattaagtagtcataaataacaaaattgtttctagttatttctagctaaggtaattcaggtgattagattaagaatgagtggagcgttgtttgatcactaagtagagaaaacttcagaaggcgtatatttaattccattaataagtctttcttttttcctttcttcatatggaaaagcaaaatgaagtaatctggagacataacagtaaagaaggccttagcatattgctgttctgataaattgcaataaattttaaaaagctcttactttgagtttgcttgggaaaaaaatctcatacttgagagttttataagtagaaagagttgggaggaattttagttgggtttcattcttctaaactctatactggtatgttttttcattttgatacttttcagagcagtataaatggtgtcaaagtgggaactcgaaataaagtgaactattgatattcttcaactcattaacacacctctatgtcattttaaggagttttatatgttgctttcttcattaatatccatccattttaaaaaatttattaaatctgaaggacaacttccccaggactggagcattaccaatatgcttatatttcatactgagggaataatttagttgtgggaccataatccatcctcctaaaaacaaattaatagagataggaatttatctctcatgattttgttaaccagaaaatagaatattatgcccaatgaagatttataggaaatgatacgtttggtgactagaaatgatacgtttggtgactagtagttcatttttacaagtatgcaatgaatccaagtctcttaactgaaatttaatttcagctaatttaattatcagacctggtttttaaatttagttttctgagtcacctcactgagtttttttggccatatttaattcttttcattctcattattttacttcgtagctttaaacattaatgcagtaggtatccgtaatttattctggtcatcacctgatttgagtgtttctttctgtcatcctcaattatatacccaagaagaccataatacttcttatcattgaaccaagatttcttcttcctcactatgaaggaatagagacttgattgttcaagttatcaaagattttcagctagacagtggaagagataaccataatgaaatgttacttgctaacgtcagtactgaggttttgttgtctattttttcctccccttcaattgctcaaggaagcctgttatgatgcctggtccattcagaccaggtaaggcaaacaaggaaaacgtatgagaataataatgtttcctccacccaacccactaggccggcagttaaccatcttcaacactcaggcgcaaatagccattggtggaaaggacaaaggacgcctcttccaaggccaactctctgggctctattatgatggtttgaaagtactgaacatggcggctgagaacaaccccaatattaaaatcaatggaagtgttcggctggttggagaagtcccatcaattttgggaacaacacagacgacctccatgccaccagaaatgtctactactgtcatggaaaccactactacaatggcgactaccacaacccgtaagaatcgctctacagccagcattcaggtaggcctttttccaagtattaattgcgtctgtatttttatctttgcaacattgttatcatggtcattgctttatgtagctaaagagtttgaattactatgtaagaaggatgctggcagatactcatagtaatgagacccaggagaagagaaaggtgaagtcattgctaaagaagtcataaaagtctgtggcactcctgggttgttattcttattgtatttatcactgaaatggtaaagctgttattcaaaacgagcaatggactacactttcagtatgaaatactctctcctttaattttattaccttttcaaataacagaaagggcaagggagggaaggaaaatctgttatcatatgaaaagctatatcctagttcaatttcattcacattctccagatggctttgctataacatgaatctttcattattgaggtcaatgggtaccattaaatcaagggcagttaaagttagaagtgcaactactccttgtaaaatgcagtctttatgtttgttatcaaatcctgattaatcatgtgtcaggtttgtgcccattttgttttctttatatttgatcaagatactaattacagtagaaaatttgaaggtttgagtttggctataccggaagtccttgtttttgtggcagtttttttccacttgaaagtaattatatccaaactaagcttaatactttgctgactcccttggcatttcataaatctagttagtagggggtaggaggttaactgaattattagccttaaatgctctggcataccatgagacattccaattgctgctgcgacaacaattacttacccctatcctagttagtgtttatagaaaaatcagtagattagcacttgtcctgtttgcttctttgttttaagacattatccaggagctcagttgtgtctttaacatcacctttacactgactccaatggacgtggttaacttaaagtcaataatcaattataccacctatgtgttcccatttttcagaattaaatgtatgtgagctaggtaatggtaagtgtattatctgttgccttcctttttccttttccttgagcagaagtatccagacagctctttgcatggctccacagtaacaatttggagttatatatgctgacagtgtcataagggcaattttatcgttttcaaaaggcttctaaaaacctggttagcatagtactgttaccgtcacacatgctattacctgcatacctacacacatgctcacgagaaaaaaaatagctcttctctactgatattaaaccaataactcctgacaccttgctctactcactgaaaagaagataaaaggcaatatatatttctattatgactctctctagctcaagagcagatctgtttattgttggtgaaaggatagttctgtctgcacaggtcttggcagacttgttttgtttctgtcagaatgtattctgctaactctgtgggaagcagagaagcaaatggctttttcttcataggaatggctggtcctgtagttctttttaaggccaaattttcactgaccttgagatgatttaatgttacacggggattcgggaaccaagctgtagtaattattggttttttggctttccctcctgtagcacatacataaatgggaataaactgggtgagttcctgaactctttccgcaaattaagaaagtcagaactttggaagaaaagtagggtacaagatacaaaatcttgctagtgattataactctaaacgttatagaacctatggccattttagaggagatgaacaactgggaatgccttctccaatagcctctctctggcatgtgtttctttaagtccagtaattatcgaactacatctacatgcttttccttttacttccaccaagtctacaaaaatgagttataaacctgttgagactctttggttttaagggtaagtacatcctcttggaggaaagccaatagcctacaagaattgattagactgcgatgagggattttaaaagccctggattttttggaagactaactagaggaaataactttctgccaagggttttggaaatcttttttgttcttgaccactagtcatcagaactctgccctgtgctccattaaaaacttaaaagcctcatcttcaagcctagtctggtcttaaacacattctgttgatcacatcaaacctatgttaggactggggacccaacaactattggattctattcaaagtttaggacaattcccagactctagagactgcaggtaaggaaggtcagtcccagaagcattaatatgcctatgtgaccccactacttttcttagatgaggaggattcataaagttctgatctctgggagatacttcagaagtgagtggggaaaaaaaggtagggaagactggatttcatattcaccgggcccattattcacttttttatctatatgtgaaatcatacatagaacattttccaaatgataccactgttctgtcctcttttgctaaatttaataacattgtcaaagcaaagttttcctaaaatgagactcctctaggagaaagaaaataagcatgtcagtccaccagtataaaaacctgtctgttcaaaaatcctctagttctttcttaaagcataagcaaagaaaacatcctttcaagagttctttcctggtcaacctgaggtagtgttgatttcagatcaaaggaaaactgtaaggtgctttcagtgctgcttttaaccgtgtgtgaatgtgaacaagtagtttttgagttggtatgtctgtctagtgttatagcctcttagaagtaattggtgctttgatctttctgattccattttgttacaggtaagagtgtagaactatctgtgaataacctggctgatgttaatttactcatagcaatcatgcccaagcatcaggtcttgatcctacattgagaaggatagctctaggtactctattgaattttaaaaaatttaagatgtgcattgagaaagcaggtgtgtgagtgataattctcaagtaaaggcctggcacttcataggtgctcagtaaatatttactgaatacatctgaaaacaagacaggctttattacctactttagagtcatttcacaatggaaggtagcatagcttgaggaaagtgtttcctccacagtgatcagggtgctttggccaaatttgttgtatttttcagtagtaaggctatagcatagtgattcagtgcatgcacttggagctagattagctgggtttaaaactttgttcatcctcatattagcttacatgaccccagacaagtcatgtaagttctagttaactatttatatgaaacaaattttcccataacttggtggtttaaaacaattatgtcattagatttcaaaattctgtgagacagaaatttgggcacagttcagcaaggcaattcttctgtgccatctagagagatgattgtgttcactcagtggctgactttgcctggagggtctggctttatttacataccttgtgctttgctgggttaactgggaagatgggactcagcagggcccttttccctctctatgtattctctgggattctccttgtggtttctccagcaaagcagatgggctgtgtttatagaggctcagggcttccagagagagtacttccaggggcaggaagtagagggtgccagttttatatagcctgggctgggtaactggcagtgtcacttgtacaatatgctattagtctaaacagtcacagagctttcccagtttcagaggaggagacataaatatcacttctcaataggaggaggagtagcaataatttgcaaccaacctaagtctaccacattactaaggctaccatattataaagtagggagggtggtgtacttctagtggctatgttatatgattgtcataaggataactgagttgatataagtaaaatgcttaaaataagtgtaccattcaaagtaagactgcatgcgttttaaccattattattatattctgtttcccacaattggtgtattaaatcaagatcctctcaggcaaatatctgcctcagaaaatggggctgtgactaccgacagtagtggctatagtttagagtaagggctaggaagtttgggggaaatagagatttgaaggtggatccaagcagaatttaggggctgaaattagtcctggcaaatcaaaatttctatgatctcaggaacagacttctctgacacctcactacccatctttaaagttctgttttattttaaaccaacttagagttctatgagtctttgaaaatatgttctgtctatccacatgtcttttagggttgcaaagaagacaaatccagattccttaccatcgtggaatttacaatctaaatagggcaagagggtttgacatgagctatccatatgaagtagtgactcatgaatggctctttgtgctggggatggcaagtgttgcatggtgtggcttgactggatctcatgcactcattctactaggccttgttgtaaaaagagcacaattggacaggtggtgagaggaacatattcctggttggtcaaatgtcagccagaagctaagttgttaaaagcagagattataatctctgggagagatagccaagtccaagtagaacagagaatgcataagagggagtttgtgagtagcaaggggtccagaatcaaaatcttggcctgaaactttgccaagtgggagagggcccagaggggtaaactgaattgggttccctgtgtaccttactaccaggaatgccccaataattgcacaaacacttcctctacaactgactccaatattggtgggtaattattatggtgctgataggtcagcttctaaaatagaaaagttcaactcagtctacactcaaattcgttggtcttccttcaggatagaaggaaaaagtgagaaacaagtcttttaccttatgtctccatcctgagttatcagcagaaaaaaaaaaaagctcagtgtgttctgtgcaaatcaccatttggaatcatttataaactatttgcaggatactgatcatgacatactttttctgtgttgggcattggtaaagtcaccttgacattggcaactgctgcctgaaaattgccagaaaatcacaatgctcagcatggattggaactatccttataactagtcaaaatgaaagacttaagaggtttgtgagatttcattctcaagcttcacaaacttggtggttgaatgtgaaccacttttgcaaattccagaaggaagccacaatttctcatgttttgtaaaaattcttataggcaaagtactcttagcttttcagtgtcagactggagacagtaagaagcatgcttcagccttgatactgatgattacaaaacaaagaaaaaactttggattaaaatgttcatcctgcgcaacgtctgttctgggtagagtctcagtgtgttgaagagcgtgggcttttgcgtcagagtttctgagttggactccaggtttttccagttgcttagctgtatgtataagtctgttctcacactgctataaaaaactacccgagactaagtaatttataaagaaaagaggtttaattgactcacagttccgtatgcctggagaggcctcaggaaacttacaatcatgatggccggagagagaaaggagagtggggaaactgcccccctgatcccccctcccaccaggtccctccctctacatgtgcggattataatttgagatgagatttgcctagggacacagagccaaaccatattgctgtatatctctgggcaggtgattagcctctctaagcctcagttttactgtctgtaaaagtggccttacagtacctttcccgtaggctccttgtaaatagtaaagtgcaatcatgtgtgaaaagcaccccataacttttcagtaaaaattttcacataaggaaaccacttcaacctaagggactctcccagaactcacagatctccctagagcttagccttcctgtggggctggataagcccaggaacaattttgtttatactcatacaaactcacaagggcctggattgtgagttcttctaagggccccagattgaatcagagccccaagctcatcaatcaggagagattgctacggcaggctctttcatattctggagtgggaattggctttgctgaacagttacaacacatagactattctattaggttgaagtgtatgaaaccactatttttgtagatcaaaatggttaaatattagcaatatcacatggttctacgatgacacacagatttacagcatgttgttatcaatggcacttcgaggcccagactagaacctcagatattctccaggtcttcaaataatcaaactgccttgcactgggagacaagatagatccaccttatccccaaatactgtgctatagcaggatgtagatcacactgtatcaaaactggttatatttacccaaagaattatcccctctgggtccttccaccttttccctgctgccaccagcttgagagaaatgagataaggaatctacacagttttcatctccttgcttttaccactagacaacagagcctccgggggaagtttatttttaggatcagggctcaactaatattgattaacagccttacataatgtgaggctccagggtttgttcttttcctgccaagcctcataactggagaaggcgctgaagatttgtcagtctaatcagactttagctgccagccaagaaatatcttctgtcttctccttacccttacgcaggtactttctttttccctcttagagaataatttggggggagagaaattgcactctaatttacttgttgcctggtaagattctctggtgacatttactctctggaactgcacagttctaacaacaacagaaaagggagcttgatgggtttaccttcctcttaaagacttagatgttggcagtacaaataggcaagtgaaaagagtgcagtgtagtttgttttcatccttcctttaatacgtaattttggtggatggaacaggtgctttccaaaactaggtctagtcgatgaaagggtcctgagggcagacgaagtgtgaaagctcccaggagaattcatagagatgcccttccaattaggatgtaatatttacaggatggaatttccaccagaactactaataaagtgctggctcttatttctaggcatctgaacagctgggagggaagtggggtcagttcttggctacccacgggtggaggtccctgagtgtttttaaacctcagggtggtttttctaattacctaacagactctttagccgaatctaaagccaaaatccttgctgcgtggcatatggttctcctccttcctattgctctgaccatattttccaccacgttgctccaatcacacaggtcttcttgatccttcttgaacacagagcaagaagaagggtgaaaccggtgaggcaggattatgcaattgcaagcttagattttcatcttaaaattgatatttgactttttgcttttgcagatttttttcctgcattaatattgattttaaaatatttcagcaaatgaaaacaaagttttagcaaacccccgttaaatcttacaccttaagcgagtgtctcattcaatcttctcagccctgcctgaatgtgccaagcgtgcctgtgccttttcacctgccatttcctctgcctgcagcagcccttccctgctattcacagtactcactccctcacttcacccaggtttccgcttatattgcaccttccagaaaggaccttcttgaccgtctgtaaaatacaacactctatcgccttttcctgttttgttacctctcatagcacttatcactgcctgacattatagctcacatttatttgtttattgtccctatttagtagattgtgagttctaggatggcaagatctttattttaggcactaaaatagcacagtgcctagaacagtagcgagcacagagtaatacgcagtcaatgttggttgaaaggtataaatagtcaaccatccaccagtaccttctcagggagtccacaggccacacaatatttacaggctgaatccaagcccctgtttcccaggacccactccctcatgaggctcaccagtgagggtgggcaccactgggtttgctgctcttggatctttgctctaggaataaggagtcccagagatatctccttgtctctggtatgtaagattatttttgttagcttccagtcttgttgctcagccaaaagcaagggctaattctagcacgtatagttttcaaatcacttttggaaatgtaatatcacccacctttccctttccagtttcttcttcttcctttccaaataacttaatccttaattctcctaaaacccactttcaaatatatgcaaataaaaattacttggtaaggatggaaaattaacttgaggcttttttacttttttttttttttttttttggtctgttgagaaaagggcttgtagggtggtgcctgcataaactggccataaaaatatgggacaataagttgttgaaagccacaagaggcctctgaggaggaaagcctcctaaatgccatcatgttcccaggctcagagcgagatctgctctcttatctgtaaacactgtgttcaaaggagaaagactctgctttgaagcattgaaatgtggccagatatgctggctcctagtgaggcccactccccccagctgctctccgataaattaaagaataaatcagtagttaattttatgctgcttcagcacaaagaaaatttacctaaactgccattgctatagattaggtgtatgacacaccgcccccctttcaccgtttcacccctgaacatctgcttcttagagctaagtgattgtactcaacaaatagtgtggagaccagagcttggcgcctttgcagcctccattttacacttggccccctggcactccactctttatgcactcttaacctgtctattctcattcgtttgtcgccaccggacttcgggtaccctacgggtggtgctgaggctggtccccaacattggtctaatggctgagtatattgtgtgagcaccatttattcatgtctgaaaccctataatttgactagccccatatttacccatttttagtgataatttgaaaaaacattgatgattgagagaaggaacaatagctatgttgctcatcattggacatttagagcctagaatggtgcctgccacaaagcagggctcaaaaatatcagttgaagaaaaataaatgtgttaaacgaatgaaagtaagttaagcaaatgcttatcatcagagtgaagaggcagtgggggccaatataatttatttacaaagtaggcaaagggagttaggaggaagcagcctggtacggaggaaagtgcattgaagcaggcatcaggagacttagctcatgactggagaagttcttaaaaccatgactctaggcagaccttcatttctagctgtagaattttggccagggtcctttgtggagctatgtttttttattatctgaaatatggggatgatttccaacttcaagggtaggttaagataatataagtcaagggcttaaatgggtgcggctcaaagattattattgctgctgtcttaaatgggattataatctggtctcagctgataaaccagtattgcaactatattttcttttttattctgttgctagtttgtggtctctgatatggcaattagcttccttgggcctatgctctttcctcagaaaagaaagttttattttaacattatctagcatagtgtcttgggcacacacacacagggacagttaaatgtaggaaacaatgaattagaagaagtaaaagaaaggagaagaagtaaaagaaaggaaaaattgagaaggagagaaagacagcagcgatgctctgtaattattgctataagaattacgtgcccatttcatggatttgtatggcttaggttgagagagatgaataaaatatctttgatataattaaaatcataatataaataatattttttctatatctcccctctttgctgaaagctgttgggtgagacatcacaatgaccacttctatgtaaaaggtagattatagatggccctctgcatatgtgggattgcatctgcattcaaccaactaactgtgaatcaaaaatatttttaaaaaattgtgtctgtactgaacatgtacagacttttttcttactattattccctaaacaatacagtataacaactatttacctagcacttacattgtactagacattgtaagtaacctagagatgatttaaaatgcacaggaagatgtgtataggttacatgcaaatactatgccattttatattgaggacttgaggattttgccatccatgggaggtcctggaaccaatcaatcccccacagatgctgaggaatgactgtacttgataaatgtctcttgaatcatccaaaaaaaagaaaaagccaatggtttcaatttaaactgaggtaagaattgttttttttttttctgaaaatatatgatgttctatttatatataataggaaaacgacttcaagcagcaatcgtcacttgccaggcatcaaggcggatatttccattatgtctatgacaaggtggtgggaggggtgggatgtggtttcatacctttctggtgcatgtttgaatgattgtaaaaattagaaacacactgaggctgttatgacagccttgccttttgaaaccttctaattaatgccttgggttgtctagagagcttgttctgttagctaaatggtgatttgtaaggttctccttgatttcctcatcattcatggatgaaataattggggaaataaaatgattggggaaataaatgcacaccacgtctgtggtggctagcagtcactgagagaattacttgatgggaatttgattgacttgtgtgtataatgcaacctcttatatctctggccccatcttattatgtgtgtgtgtgtgtgagagagagagagagagacagggagagagggaggatgctcgtgtttgcttgcactatggagaacagtgcttcttaaactttaatgtgtgtatacagatcacctgggtaatcttattaagcacagattttaatgcacgtccggggtggtatctcagatcgtgcacttctaacaagctcccagatgatctcatgctgcagatatgtgtacctcactatagagtatagagcaaggctctaggaaatatttacggttccttgctgagtaatcatggtatctgtttacctatctcttccaaatggtcttcccaaacttagctcagttctcttcaagacaggaaattttgttaacccaaagtattaatgtaagtgaaagggtggataccccaactaaggattagaagagaaaactgtatcccatcagacaatgctgctccgggtttcagatgccccttcttcctgtcccttactttactgcatacccccaaggcagatggaaaaaaacataggtaaaatttaacttgtcataatatttatccccctttctgagaggtgacctccaatggaagcagaaggatgtgaatgattttaatccacggtaacaatggggagccagtcctgaccatcttaagcagtataaatgtataaaatgacagatttttctgctctgcctctccactttctcctcccggatactgagagagacacatattcatgcacccacaactcacactataatgcacaatgaaatttcacccagcctttatctcggggctgctgttctcatgattaatgccctactggctgggaagctattccactgaagacagacaaggagagaggaagatgcatgaaatatatctctgaggccatttctcattattattattatcattattagttccttactaccctatctatctatcctgttagaggatgcttgatctattggcaagggggaggggatgacatttgaaagcaggttttatgagggagaaatgaacaaggacaaagagagaaatagacagtttttatgaaagagaattaacctggatggggtttttgttatgattgttgtcctttatttgggggtttgtttgttttattgttgctgttgttttccatttaaagtcaaaaataatagatgcctccatctgcggcttctgatttttttccctagggatttatttttgcatgtgttcttttgtctttattgagtctctgtctgctagaatcaatatgatataacttatgcaaattatatccctgaccacttatgcaaaaaacagaataatttcgttgctctgtaacactcttaatataattacctccatatcctggttgatttcaagcttttgaaagggctactttaaaaaaaaataataaaaatctatttatgtgttgtataaaccacagtgtctgattctctcctgtttctcattcaaagaaagggtgactgctaaatgatttctggctctgtcatttaagaagactgcacagcagtggtcttagttgggaagttgggaccacaataagagtgctattgtaacacgtgtctactgataaaatggcaaattcattagcctagacaaggagtactatgatctggtttcaaaaatgctgtatacttccacagtccagtttatgagggcatgagatatataactgaggtgcccccatgttacttcaattttagtttgactttgaatttcattaaaaaatatttgagttatttgagtgcctagtatgggctaagtactgtcctgggcacttgaacaacatcagtaaacagacaaaaaccctcttttcttatggagaacattttctattccacaaacattgggtgtctcataagtgcaagactttggagaaataaagaatgaaatagaaatttttctgctttagaggaacacacagtctggtactgttcttaaatattttcagactacaagcggactcacttgcagcccagttttttacaaaaactttagcatgctgattggctagtacagttgcaaaggcagcagccatctatatttacagaggtctattccaagaatagggtctttaatttctattcaaaaaagaccaaatttcaaatgtaaacaatatatgttttgactaaaaaagacagaaaccgtaaagcaagttacaataaagtgattgaaacatatttcggtcctggagactaaatttgcaatgtttatggcaaatatcttcttgtgttggtttgagattatagttttatggaatgtttatattggaagaatctcagagattgagccccacacaaccagatgagcttcagagatgggccattctggtttcaagtactagtttcattgctcaaagctctacgtccaggggcaaattgctcaaccactttataaaaaatgtaaacaacaggtaatttcacattttaatttatttttatctaaacaatatattcacatagtttatttttagtgtatatatgtatatatatttatttcttatttatttcttatttatatatttatttatagagatgaggtcttactttatttcccaggttggtctcaaactcctgggctcaagtgatcctcctgcgttggagtgctgggattagaggtgtgagccactgtggttggcctaagtaatacagccacacaatttaaaaccttgaactgtgcctagatatcccctttggggaaaaggcatcaccttagttgctagagtgctggctgatggctgttggctaaatccttcacgaagaactgcctttgactattgaagccaccttgcccaaccaaggtcaagccccttcctgaagggtggcccatatccaattaatgatggtgaagggtggcccatatccaattaatgatggatgatggagctggggggatctatcaagactcagcccattgtctcaagactggataactgggaagggccttttagctagagagtttcctaaggccagctgaggtctctattgcatgaatgttcacctcccccttctgcccagactctgatgtcactctccccaaacttcccaaacacgataccgggcctcagactttgttttctgaaaacgcagctgaagatagatagatagcatcgtgagacttaaaataagaaaacaacaataacaaaagaaaaacagtagtatctttctaaccttgccctaaagtcctgctctatactggtaacccttttatatccttttcagacatttcccttcatagttctagcaatatgcttgcatttctatttcttgactttttcagtttgacatattaactaatgacttctgcttctggaagtaaaagttgagctttctcatgctctccctgccctacaacccacacacacttttttaccttccagtttcccagtaaaattctatcgcatttcgattaaataaatgttcagagtttgttattatgactttgtaatatcgcctattgaaaacaatgtaagatcatacatgaactgacttgttccacaactattcaccagctgcatagaatgtgccagacactgttctagagactgaggatacagcagtgaaaaacaacagactatatttctacctctgacaaaacattatactgttatgacaatttctgttttcctgtaactctttgtttgttaatgaataccctcgttatctcgttagcttatttttctagccacccatcagtgccacagccaacagctacaaaagacctcacaagataaaccgacaggactccattatttctttttctgtcttggaggtctcccttctggagtcgtctgacctcctgctttagtctgggctgggcgctcgctgagcctgcctcacagctatcatcctgcgtcttccttgctcgtcatgctggaaaatccctgggccctgctcctgtattaaatcctagtttcagctctatttatttcctcattttcaaggtgcacattgtcctgtagcctcctgagaaaggatagctaaaaagtaaaatcattgagacattgctcatctgaagaatgttttattccattctcacccttgacgataatttgcctgggaaggacttgtatcttggaaattatcttcactaataaatttaaaagcatccgtccaatgtttttgggcatccaatgttgcagctgttgacatcacagtttggtgtctaattccttgactgcactgatttttacttttttttttttttttttttttttttaccctctctctgaaatatccttatcagtggacctcaaagtagcacttacaactcaggtctcttgaaccacatgctgctgccccctatagttcttgcttttgtaaagttgtggttatttgccgattagctgccctgtgttggcatcctgactttggtatgatttgatgagctaagctattactaaactataacacacacacatacacacaaaaaatgaatagctataattaattagcataaagttttgagggtaaccaactttagtagagatctgagatatatataatgtatatatatatatatatatttgaacattttgccttgggttagagagggaattggtggtacagtaattcttactggaattgtgtagtgatagctagtttatatatacatatatatatacatacatatacatatacatatgtatgtatatataaactagctatcactacacaattccactaagaattactgtaccaccaattccctctctaacccaaggcaaaatgttcaactcttttttgtattcccttaagagcccttattttttttttcagtttcaccaatcatgttcatttcttagccacctcagaaagaatgagaattaaataatatgtataaaccctttgaattttttacatccagaaatgagcataagctcattcctctgcttcacaccagatgcttatatttttgagaggagcaaggattagaattgtcactctggaatttttatgctacaaaatgtcaatcaatatgtttgcatgtcactgggttccatcctacagtgtttggtgataaagtcttttcatttggctcccagctttatcaccataatatatttatttactttaccttacatgtgctagttggtagaagctgtagaaaaagaattactcccacatatttctttcccctaaagagaaacaatatattgtaagaacacagatggggctccacacaaaaagaatgccgaattaatgttggatggatgtacatatacaagaacttgctatcagtacacaattccaataggaattatatatacacacactgaaaatagaatttgattaaataattacactaggtacaagctacattttacttccattgaaggagagctaagtggaaactagtgtgagacaatcatgaatagaaaagtgcagaaggaatttgatgaggatgttcccagggctatttctagccagaaaacgaagctggaggctttgaagtaaatcaaaatatttgaagaagtaagaggataaatagcaaaactcacttccaacatcatactaaaagcaccatgcaaccatatagaaaacatgcataatttattttgactcaaataactatagggagattcttgttttttttaattaggagatttgaggtaactgtctagactacctatttttatgttgcattcagcaatatgtctgctaataattagagggaaataaattacataaaacaatgccagtcatgtcattgataaaaaggaaattaaagtgtgattgtgtttctctttctctctctccctcattttcagtgagctacatcctcttgttgtcctcctcacctgattaggcatttttgtaagggagtttgcctccgtcctctgttgtaaacattttccttacctcagcatcctttttaaattcaaaagacactttcctttgcaatgcactatgaaaggcgattgtgttagagaatatcagagatggctttgtcatgtctggtgctcttaaatccttttcttttttttcttttcttttcttgagacggtgtctcactccgtcacccaggctggagggcagtggcgtgatcggggctcactgcaacctctgcctcccaggttcacgccattctcctgcctcagcctcctgagtagctgggactacaggtgcccaccaccgcacctggccaattttttgtatttttagtagagatggggtttcaccgtgttagccaggatggtctcgatctcctgacctcgtgatccacccacctcagcctcccaaagagctgggattacaggcgtgagccactgtgcccagcctcttaaatcctgttgtgtcctaaagagtccactaaacgaggttgagggtatgatttgacaattgaacaaggcctcagccagctctcctagactgccccaaaactccctgagcagagagacccaggtggtgatggaagtatttttcctctaaaagactgtggagattctggcaaacctatattttgggtttagctttcaaggaagaggtggcatttgaaaagccaggggcctttgtagccattttattcactacctaatgtgaaggtggtggcagggaatggaaaagggaagattatttagtcgataaacacttaatggccactgcctgctgtgtggacagatctggatagagttaaaaagataataaagcaagtgtaggatgcctgtcttcatggtacttatatcatgggaagaaggcatgaacaaaccaattttacacataattattcaatcacaatcatgacacagtgtgataaaggaggacaggcttctaagacagcagaaaaggacctgaggtagtgttgtcatctggggaagctttcttgtagaagcagtatagaagctgtcctgtgcaggatgagatattagattgcaaaagaggacaagggccagtgttcccgccaaaggaaatagcctatgctgaggccctgctgtagggatcatactgtatcgcgttcctctggctttggactacgcattgatgctaaagtctggaagcataccatattcgaccaagtaaagtgaccagttaaggtccccacttaatgggctaaagataggtcattccaagagtgagcctcccattattatgactcatgacaaaggggtgtgggactggttggaaaagagtttccaaagctggactgcatcacatggtcatgtggaatgggctgcctgctctcccagtctgaaccctacctctgtgctatgccaaaggtgcagatccccttagtgaaaattggagacatgaatcatttaaggcaatgcctcacagacccatgtgcaaggttccatggaatgtgttaatatatcacactcatctcaattttgcacggtacatgaaactatgcttgctgatgagggaccatacacattgaacagatcatataatggttatggatgtaatgtcaataatgtcatggaacctatcatatgttgtaatatcaagaaaccttttagcatgtacatttgtctaggtttctggactttacagccttctggtatttcacttgcttgtgtctttcattgaacactaataaccagaaatcagcaacgtgaaaatttgattcttcttcctatttttctcatgccttactttggtctttctttctgcttggtggaaactgcggagttcagtggaagttttcctgcagtctaattagcccctctgtttaattttgtaataaaaacgctgaaccagaagctggagataatgtgcccaattcaattcacagatgtcaatttctttttaattgtaatccttttcttgagttcttcccactcttacttccctggcacagctgaggcttgggtgattacaaaactttcatgcctacgctggagattatgcctcctgctttaggattaaattcattcgttatcattgttgtaattattagtagtaacaatgggcatttccacccaaacctgatgaatagtagttttcacagtctttgcctccaaacttagcttatttcagttctttgcccagataagttcttcactctttaatggcagggagcattccgttttctgttgcatttaaatgctattttgagatcattcagaagacaaggctctttttcctttttagcaggttctcctgggtgtggagagatggcttctttccccagagtaggagtcaccacttagtgaatgctaatggggtcttttcttcgtgatgcgactgctgctttgaagatgcatttgaactggcaaggggcacctcttagctgcaatctcttccttagaagggtgccagctccaggccctaaaaagcacacatagctttgacttccatgctgactccaaaagaaccttttctctgcctttttgatggagtagtccctaccactaacagaacagcagtgtggcccaaccaacttgaaaatggaactggctcctcagcaacatgctaattctttcaaacttccttgtcagactcaaacctcgatgtgtcttttgttcttaaactgcatttgtagtaagatcttcaggaaaagcaatcagtgagagactgggtcaggcttttatttaattactttgcactttttttccccctctgaaccttctccaaatcaaaagaaagcaatgcagtttaattctgaatatatgaaatgtttgcactttaaattataaatgtctctcaacgataacaccttctgaaaataatgctccgtgggctctttagaagaatatttaggacagttcatctcaggtttaaggtgcccaagctactatagtgccctttcttatcttggttttatgtttttccactatggcttactgatataatttcctaatccttcttatctcaaatgtctcttagaccgttaaacctttgcctataaaatgaaggggtttgactttgaatctaaaggagtggaccatccctcaagcaccctagtctctcagcgcattcattccacaaacatttttttgggagagcagggtgattcctgctatggacccatcacccttgtagactctgaggctgcaatgaaaatacaataaaatcagtaattctagttcttatggaacatacattctgggagtgggggcagagactaccgataaataaattagcaagagaatataatatgcagggacaagtgctatcaagaaaataaacctgcgcaatgtcacacagaatgcctgatgggtgggtaggtagtttaggggaagttactctaaggaagaaacatttaacctgagattggaatgataaaacatgtcaggtctgtgaagtctgggggaagaacatttacagcagagggaacggttagtgtaaaggcctttaggctggaacatgttgagcagtgtttgaaagatgatgaatatggctgtagcagaagaaatctggtgtgaggtaagatctgagaagtggcagggactgaaacagacagggcctgtttggctgtggaaagcagtttaggttttataaaagtgcaatggcaaactattagaacgtactaagtaaaggagtgacatgatgtgacttatgttttttaaagattactctgccatgttgagaaaatattgtaaagcagcaagagaggaggcagagagacctaatacatggctattgctttaattctgatgaagtttgattgtggtttgaactagtatagcagccaggcccccactacaggcccacccagcttgatggcctcaccctgcatcttgtcctgtctctgaactgctaaatctcaaaactttaaagccctaatatcttgctgattaaccataatttccaaatcttatgcttaagtccaggcagtttttaatttttttttattttttggcttcagcaaatttttcatttgtctatatctataaagtacttctcatcatcaacccagattcctttttctctctgttgtgttcattctagatcattccaaatggtctctgttccttctgccttcaacctggtcttagaagacttctctgttttttatctctcccccattccacctccaactcttgatcagcacctatttcaaactctcaacttggtctcctttttcactttttacacacttggattttaaatgttaccttcttttagaaaacaatgctgaccagtcatgagtttctttgaattcctccatgcttatccacatcagtccttactttaggggaatcccttcgtccctttgtttgaaatcttatgctaattatctcttcactcgggtctcttcccaaggtttggacatcatttagtgttctcattttccactggtgccattaatatcatcccgtcatcatagacatatatgtgtgtgtgtgtgtgtgtgtgtgtacatatatatgtatgtatgtgtatatgtatgtgtatgtatacacgcgtgtgtatatatatgtatatatacacatatatgtgtattgtgtgtatgtgtatatatatgtgtgtgtatatatatgtgtgtatatatatatatatatacctttcccatttcaaaaacaaaatcaaaacaaaaaaggcaattatctatgaacctgatttctgtcccttctattagcacttactgtccccagatgaggacactctttcacttccccatatgctcaaatatcctgaattttatactctcactgattttactttctaaacaaggaatatatacgtattgtagaaaaaaatcactgtgaagtaaattccacccgtgatccaaccctccagagaaaatcgtgcataaaaggtcccgcagattcccacctgtctttctttccttccttatctaccaatattttttcacatgcatgcaacattctagtcataccttgttatactttcagacatgttctttctacttgagcacatacaacatacaacttgagcatgcttgtttatctataaaatgaagataatatgatcatttctgtaggagttttgagtcaaaaataaatttatgtatttcaaatgcttagaatagtgtctgttgcatagtgacctttcaataaaaattattattattattgctcttttgtccactttatctacctggaaaagtaataatccctcaagactaagttgaaatataacatccctggggagtgtattagtctgttctcacactgctaataaagacatacctgagactgggtaatttataaaggaaagaggtttaatagactcagagttccacatggctagggaggcctcacaatcatggtggaaggcaaaggggaagaaagacacgttttacatgtcagcaggcaagagtgtgtgtgcaggcgagctcccatttataaaaccatcagatctcttgagacttattcactactgtaagaacaatatgggggaaactgtccccatgattcagttatctcctccttaataatccccttgatgcatggggattattacaattccaggtgagatttgggcggggacacaaccaaaccatatcagggagttatccttctcctctgccatcctgtttcactctgccaggctccttttctcagtgcctccacaagtggtttacttgttgtgatgaacactatgcacagcagagagtttaaggaccttagtcatgtttcctaccaatcagcggttggcttcctattaaacctttctcgatgttctggacctctagagagccattctgtgctgctatgcaatctataatgactcttcaactaggtttctattcatttccaagtcttccctaccactgagatacttcaaggagatatgagtggatcatgaataaatatcctaaaactaaagacagttaagtcaattgcactctcaatattatcagactattttaactaatatgctatagacaaataattcttcagaatggtgtttgctttgtgtgtgtcataagagattcttgtctttagagaattagggaataatattaaaatgaataaatagtaaaggtgggaatatttttaatattattaaaataaataaatgattaaagtagggagcatgtttgaaggtccattttaaaaaatatatgtagacagaggaaacctaagagttaaaatactgagtgagttttgctctgcatcagtggaggctataaaatgcagtatttatctgtatatgagttctataccaatgtgatctatctctctaattagatagtcaactatttttaaagagctgcaaataagccttacaagaatgtcataaatgcattccatttagaaacatcttgcagataaattgtatttttattcttcctgcagcctcctgtagccttaaaagaataacaaaaaataaattcttactacctaattccagacacagatcattactaccagtagtatgttaatcatgcttgccattccttctccttcgatatcattatgctttaggatagaaaaggtgggtggtatgtgagcctccttggataaacaaaacgttggagtgcacaggcttctcaagaggtacaatgttattttcatgcaaaaaaatcccaagtattacaaaggggcttgaaaatgttgaaaacacattgtgaataagtagaattactaacaagagcactgtatcttttgcttcgataggctctttcaagatgtagacaaattggaggtaggccagacagaatctacgggaatgattaggggaattgaaggaatgacttcggaaaaaagattaaaagagctaaatacgtataggttggctaagtgccaactcagagaaaatgacattatgggctatagatatttgaaagtggctggctataagcaaagcaagggattacttaggtaattggattaaatcaagggggtaaacattttaaactcaatatctggatttattttgttgactataagaattattagattttagaactatcccataacctactgcttggattaaagcaagaggtagggtgtggtagcatgaagtctctaatagtttacccagttctgagcatcttgttgccaggaagcagatcttactcacttttaatccctaggatttagcacattaaaagaactccatagagagctaagtcatgtttagttcagcgagaagaaaatggtctgtggagtcagacattacagattttatatctctgctgttttattgttctataacagtcagcaagttacttaacctaagccttatccataaggtgcgtattaatatcaactttataggattgatgtgaagtttacatgagttgtcttgatctcttcttttacctatttaacagcggttaaatacacccctcctctccatcatcactgccattgtgttccttctgactttagtaatgtcttcaatggtttcctggattccaattttgcctatcttcaagtttccacaatatagtcaggaataactttttgcagcgcatgtatgagtaagcaagccctagcttaaaaactccaatggatcccattgcctgcaggataaaatcgaatatccttaggatgacaaacttcatgccatcatgcctgtctttctaattccaactcatattaccctacccttctcacataatgctctaactacattcacttgcttgagtttttcttttgtaccttgtacaaatgtataaacatgctggttcctctgctgagaacccactttccactccaatttgccatttctttgccactctttgtcttctgccttgcttcacactctttctaaaatgccaatctcagattttacctcttttgagattccaggtgcctctcccatgtgtttccacagtaaatggagcttatcattatcctgctattaattctactgtgttctaagtgtcttttcactctgcctctcctaatagatgttaggattcatttgggcagatacttagattagtgcctaccatttagtaggcattcaacatatttttagattcaaagaatgataaatggtagatggatagatggatggatgggtaggtaaaaagatatatggagtgtaacaaagtacctacaacataagaaattatcaattaatttcagttttctttccttggagttttgagattaagaaatgcacttcgttgtcccgaataagcatagtcttgagtgggctttagtcagagttatttgtgtgcatttatgtcgatactacccactccattctatcatattgggaaaataatgcaatctcgaaggaataggagtctaggaaacctaggatataagtgagcacataccggagaaaaatatgccaacatagtagcttggaggaaatacttggaaatatcttgcctttatagctagatatagaacttcattttttacaactagaagctttgtgacttctgagaccatgactgaagaaaaatggaaatgaagacaaaggggactgaaatgggagtggaagtaggaaaaggggatccatagacacaaaacaaacttttccttttacacactccatttccctctctggtgcttgcccatggcccagctatttaaccttaagacacatggccagcccccttgtctagagtttgccctaattgttgggcgcattgtagcgtcttagatgatcaattgctcatgccaaaagcagagtgttaagattcatgaaattcgagtctgtgctattaataacctgagcagggttttcatgcctccttcccctttgttttctcctttgccaagtctccattctcactcttttgtggatgtgtgtgttatggagacgaatgaaatttcagacacagcaatgaattgccacctaaaaggatacaccccagggtcttctgtgttcctttgcagctgtgtgataaattgccatctccaaaattaattgttaccttttcaggaagtgtttactcattttcatctcctcactggcatcagtgaacctctgagctagaaaaaccaactttcctttcccttctcaagcccttgatatgcagctagaacggcaatcagtggagctgacaagggcgagcagtggtacctccgtgttgttctctagcccatgaattcaatgaacatccaggctatgcctttcatctcaactgccttttaatagactaacccatttctctttacttttggctccacattaaaatgtctataaaattttactccaagctaggtcttccaggtttacggaagaaggaacatacattcagcaaaacagttttctctttttgttagatttctgctgttctcaagagctgaaaaaaagtgtgatacttcacatgtactctttaaaaaacttactaagcctgctcagcttttacacagggtacgccggcacacaagtgtgacctggtccttactccatcctcaaagataagttgtccccacagtctgccaaaaagatgtccctgatgcaatgagaatgagctggagtcctgactgtgctacatttttagtggtatcctaactctctattccacagacatcagaaaatgtcacaacatactctttgtaactagtccctttattatgtccatgaatgtaatatatacaatgattttcaaagagggtgatttttcacccctcttctctccctgccccacatacaaaggagactttgcctatgtctggaaacatttttggttgtcacaattgaaaaggaatgtatggaggtgttgctgttatccagtgagcagaggccacagatgctgctatacattttataatgcacatgaactctggaatatataaatcaagtaaatctcagtattctgccatgtactctgggagatacttaaaattataagccatgacttctattttccaagcattttggagaaaaacaaccaattttgtttttgatttctgactatatggtagagttcagctacacagtatatggtactttaacaaagctatacggtagctgcaagacaacaccatggctgggcccttcagagcctcataagtgtattggggacactgagaatctagtaatagactaacacatatgtaccaccattgagtggcatcaaacatgctttcatttagtgctgaaattgatgatataatggaggctagaaagatctaataatgaaaaaaagaggaatttaaccagtcttgaggtgatcaaatgaggaagcagaaaggtaggattgattgtaatgtgtgcacagaggagtgaagcctgattacctgtactactcattgccagaccttcaagaatcgcgtgccaagtgccaggtgcagaagttgcaaaactgtttgggagatcaaagagaaaatatcaacctggctttcaagtcttttcagggtgctttcttagaaaaactgtttttggtcttgaaacatgggcaaacattggctgcgggccaagaaatttatagttcctgaggaactttagattgatacatgtctgacaatttccattttgcaaaacaagagaaggcaaaagtgggcttggaaggcattcaatctttgatgttgtctttgcttcagctgagcagaagtgagaatttagacacactgagccattaccagagtttaagaaaacttaccatcagtgtggtttccccctttctctcagtcaagcacatgggtgtgtgtcattgtaaaaggactataggattggaagtggacacgtgaattccatttcttactctccactaactacctgagtgacattaggcaaacttgcaaatgtggaagttgggccgggctaggttatgttccgctctaaccttaaacactgatttccccattgactttcttgttccattcaaagagattaggaggaaaaaaaagtggtatatcccaggcacgttttgtgatatttcagtgaaatattgaaataagcaatgtcagcagcctcatgttctcgctaatggtctggtatactttatgaataaacaacactagctttatattactggatctcatttccagcagatttataaaattgtaactctacagtgttttctgacagagcttctggaaggggaaaaatgacagtgcagttgtttgctaacatctgggtgtactttttgcaacatggggagaattgttccaaggcagggagctaatctgattcatatctctacctagaagcacttaaagaagctgtcagatgattcccacagtgacaaatttgagtcccaaggagatgatggagtgaaatcagacacattttgggaagaaattcctactatcttttcaaaggataaactcccacagtatttgtgccaatctcttttacagcattcctatctcaaaaaccagagacttaggctaattttttttgtttctgttattctctaatatatttgtttaaaaaggaagttttaatgaaaagtcagtcatgtgacttagagaattaaatgtagggctctagcaaggatttgctttaaaatgtttctctccgatttagttgctgcacctgggtaataactaccttggaagtattagtgttgtttctctgtcataaaattgacatgcttggtgtggataagaatatttgattgtagaactgcttctacctaactgcattctgttatactaacaatttggctagcagaatttttttttaaaatcctccatttgcagctttttgtactctgatcacaatatattaaatcccccagaagaactactaccttgaatacaaagcacatagcggtgctcttttaattgatttgtaaaggttagttgctcagtactagtggaaagtttcatgattacttaattgaattacctgcttcccccagtagagtgcttactgggcaccatacagtaagctgagagttttacatgcctggtactattatttccccagtttacagattaggaaagcaagatgtagcttacaaaatatgctgaaagaccactggcataaaagccttttaattccttgctgaaaaactccctgggttttgaaatatgataaactacatttttgttgttctctgaagattcaggttcatatagtatgacagttttatttttgtgactctcaatcatatatgagataaatgatgggggaaagagaccgctttgaggtcaagcagacctatgtccaattctaacatcaaggagaagccacgtgctttggcaaagtttgtgtatttacactgttgggaaaactaaaagtaatttatataaagtacctagcatagtatctggcagggtaggtgttcagtaaatgttgctggtattatttttgctagtgataacattattcagccatataaacacatagcactaaggttaagcaaaatatgtattgacattacagcatgcctaggtatttattgcctaaaatatatttccgataagcttttcttagcatttgctgctttctactaagagttgagtgaaactacgatgaccacaatttagtctacttatttaaacctttaattggttggcttccggtaaattgcagtttgaatgactagcccaatcatgtatgagtagccgggaatattcgataggtatagaattcttcctgcctaatcaagtcagggataccgatgttaatttctgaaataaatactttctcctctcaagatctacccagtggttcgttgccccttgggatcacttctacttttcaacaaagagcaagggacagtaattgcaacttcagggtagaaggagagtttgcatgcctggcccagaatgaaataaatgtggaggaacagagcccaaatgacttgtatgtttcaggtacagctccatgtatgctgcagatgatttgggttaaaaaaaaaaattggccagcctaaactttgaggcaaagaaattgcatttcccaatgtctcatttctctttccttttactttacttcatctactgtgaatgacccttatttttttgttgttgctttatggcaataaataaacgaacccccattgtgcaaatattatgctcttctcattggcctggagggaaattgctacgagagaaatcctggacttttttcccctttttagaaggaaataccaggttacgaatggcccttctcagtctctagattgagactaggattcttctgtcacctcctcagagccctggatgcagaaagcaattcatttcacatgtgtgcaaatcagacacagaaattctgcaaggcacctcttggcagtaaaagtggactattaactctcaaattgctggcctctactgagaggcaacttctccctgaagccaggtgggagtgtccctttgaagccttacacaacccgacttctgttgctagggtagagtactttagagcaagagtagtcctgcggtatgttaactgagtaggtgtttcccagaaaattaaaagcaaaagtaactacctggaacagtctgatttttaaagcaaagcaggatctttgtacgtttaaaatttagtccagctacttgatagcctatagagcccccaactccttcttccagcccagggagagtctgcagtgagcaaggtaagaggtagctccagcattttcagcatggggttaggttggaagtcccagttgacagggacagtccttcctgctctcacctgccaaaatctctctcctcccaggagatagctcccttttctccctgattgcttcctctcatgaggagaaggtcattggcgctcaccacttccagggcaaccctttatgcaagcagtgggtgcctttgaaaggcaaaccgcagcaggaagactttgaaggcaagaagagactttttcatctttgcaggccccagccagaacattggttctcagtgcagtacaagcagtttcaaagttatctcccttgctgatatggatgtgataacatggagcggagaggtgccataatgatttcctttcaaatggctgcctcaccatttatctttgcacactgtcaaagactgatattgtcgggagttagcagtggcatggaataattaatctcgtacgggggaagtaagttcttcatttgtctcctgagaaattagcactgcattgacagcaaaagtagatgatatcatcggaaagggaaagggaggtgatctttgtaactccagatgccaaattgtaacattgattcagttctgtgaagttttgattgaacacctactatgtgccaggtgctagagatacagatacagattcctgtgctacagtagatcataatcccttgagggtcacagcttatttcaaaatccttgtcaccttgacaaaatgctcaagaccaccatggtgacatgtgtgccaccatcattattattatctaaagagttttaccaagtgtctgtatcattaatatttattgtaaaggctcaacttttataagaaagaatccttgtctcccacaccaccagtgcaaagtagattaacaaagttggcatttatttattttattttttctttaggggaaaatcaagaagttagtgatctagggctaatggggatattgtgttactcccaatatgtggttcccatatttggattcaagtttttcctattttccaatcagtgggaggagaaaaagaaaagcatgcctgcttatatcctattaaggccacacctgtctgcaaaacaggtgggatccatgtgaaccagaagcaagctattaaggatgcaagaaaatgtagtgactagttggatggccatataccttgcttaaaaccagttagggtcttttatttctgaaagaaagaagggaaactagatatttggggatgataagcaatctccccacagagattctgggtgaaatcctttttgcttctctgaatttccaataactcacctcttaaatgagagaattgaaggaggtgtgctgtgtagtccttttcaatttcaaagtcaaaataacaactctaggctcctcctccttcctcagcttctcccaggcagtaggcacagtgatgggctctgtgctgggaattttgttttgagcctgtttcttttatttggaaacatcaggtgctgaacctatcctggattcgagtgagtgcagggcatggctctaagaagcattttgtggaaagagtcaagcttgtcatcctcctcctttgaggcactaattgggctgactgggccaagcaaaacaatggtatgatccatgtgaaccaaaagcaaattattaggcttggagagtggtgggtagtcagagaagcacttctgttgtagacagaaaaacagcatcatgcttctcagaaagaaagggggctgctatctgggtggaaagcttagaatcaagggagaattatacatgtttttaatggaccgaggaagaagccagatttgtgtatgcggagtttgatagggaagggcttctcttctttttcctactaaaggaatagtgtttttgacaaggtgccaaaaatctaggccacagcatcccactttgtgccacagcatcccactttggtgagccataccaggttgcaggaaattaattgctttagactttgggctggctgagtggggcctgaagccaccgtagtccctgggcaagccccctcccactacacaggcctcctccatctccctcattttctctgtgtgctgtgatttggaaaaaattgacaagcacttgatagaggctaccaaccaattagaattggttcacacgagacacttgggaatgaactcagctggtcactatggtgatttaactaaattgtgttatccagacacattagtgaatcaagtctggcatttcaattttctctataagatgaattgtggaaagaagttcattataataattaaggaagatttatgcagtgagtacatttttatctctgtagcctgttataatgctggtattttgtgaccaaaaaaattgagttgtagatattaactatgtaattccacaaactgtgctcccgaacgagttatttatatagttagaatttaataaatggaaactttttgaatgcacctgcttaggaaaatattgaaagaaaacttactgtaagtttttcagcacagtgaacaatcatcccccagtgaacaaaatgctagccttaacccggtcagtaaattatttggccataggcagatatctcatctccctgtaaaggaaagccagtttcctccactgtaaaatgagtcttagtaggaaagggggcattagcaaagtaatccctgtgcctacccaatcgttctaatgtgatgtttcctttggaaaaaacctacaactcagaaatatattgaatgaaaatctccctattacaggaagacactgcgggttgctaaggagtgtggtttctgtggttggagtagagaaaaatagtggtgttttctgagatctcaactcaactgtgcagggtagatcgaatgaacacagcacaagccacagccactgttctgcttctgcctgatttgcttctccagaaatttcccagattacaacaatgccgaagtgcccattggctaccacggagataacttcataaattgttaaacaggcagagctcaggtttaaagaactgcctttattttgagctgtgattttacttgtgtttcagacattccctcagatattttatttaaaagatttcacaggagcatcatgcaaaatggtaaataataaaacattctataaaccacacatcccatctaggactaatcattatattttccaatttaacattcattccttccagatatgttcttactcgttctttaaaactatcataaatggaaagctaccatttaagcacaaataaaactcttaagaaagctaagaaaatctgaactcattaaatatttctaactagtgaactccttggttctccaaatgacctattttttcccttccttcttttttttttttttgtatttttagtagaaacagggtttcaacatgttagccagcctggtcttgaacacctgacctcgtgatccacctgcctcagcctctcaaagtgctgggattacaggcgtgagccactgagcccaccctccttccttccttttttaaattagaattttttattttttatttttttttttaattttttttttggttgcttttagccacctcagttaccttgaccatccgatttcacttactgtagccagatttctaaagtatgtgtttctgtggcttttccatagtttttttccccaatattttggcagtggttgaatagaatccttttattcctccctccctcacccctcccaatcagctccacctatagatatagaaatacaaagtgaacaaatgtgccatgcaacttctatttttgtgcccgttcttcctctttgtctctatttttgcctctagcacatagtatcctggtaaactggatttttttttaagagacatggagaacacagtgcagtgctcattctctctcagcctctctgtttttactgtaatgaatctattctacataccatgttctcaggatcccactgtatgtctgataaactaagtcaagctaaggtcattattaccaataagtaatcaataaactcaatgtttaccctaagtttgatacggtaacttagttattttaagaggaaattttaagttcttgtgtgtgtgagtaagaaggagcatgagaatagggaaagggccgtttcacagaagcggtcctatctggttggcctcaattgtgcctctcaggcttgtatctcatctgcttagctgtaaggccagtcctgttaggcaagaaaaaatttaatttgcaacctagtttatgaaaggataaattaagggaccttgtgggaatttaaatcatctaaggtaatagaacatgaaacttgcctagattaaaaactgggtcttttgtgaggtttcattcattatggccccataataatagctacatgtctatgcacttttgagcttgggtctgtttaaaatacttatttgttatttcacttaattcccacaataactgtacaaatatggttctcttgcctccatcttatatatgagaaaaattaggaacaaaaaaacttaagaaatttctttcactttctatagctgataaactttggagatcagtttgaacccatatactcttaaacactatttatacagtattaatgtgatttgacaaaagtggcataaagagcaatgactctttaagactcaaaagaagatgttcagatttatattttgatattaatattaatatcagcaagataagctgttaaataagcattacatgtaagaatcctgaccttggataaaattaaatctttgtcataaatctactactgtgacaaaactgcaaaatatgcagtgaataattaaatccagatgtctcttccggcaacagcagcagcaaaaactggaggtgggggtgaagggaagatggaagtgacagactccatattcataaaagctctgatgataaatttttttaaaaaaatgtgtttgttttaaataccagtcttccatgaatcctaagaattgcacagtaaaaaataaaatctgcctaccatttaacagcccgcaatacaaaaatcttactgtgtcaaatgtaatatgcatacctggcttcccaatttggttttcttaaggaggagtaatttagttgtcattaaactctttgggaaaccgttttaataatgttctttggttatcaggggtatcctttttttccttaaggcaaagaagagaaaacgtgccgctaaaacctttactgtgtgtggtaatgaagttggtccatttctgtgcaggattgcaacaattctttatcacttaacacgatcggaggtgtgagagcagacagtttctcaaactgcaggaaaatgctgaattcaccgattgctatcttgacacaatgaagggaccatacattatatgaagcccacatttggtttgctgttgttgttttttttttttttataactgtgattattttttgatggaataataatcacagaaaaaagaaaaacctgtaagagaagacaccactgtatcatctttttatggcaatatgcaagagggtagaaaaaatgagagtgtctaaatttatcttattttcctgtgggattttcagcacagacatattcctaccactacaaggaccaaggacattcacttgcctgcttgctctgataatggccagtagctggtcccaatgttgatacaattaattaaaatgataaacatgactctagctagcttcagcacagtaagagtaccacagcattttctggatcatttattcaagattcactgacttggagtcactgatggtaccaatcattttatgaaataccttccactagagacagaaaaacgttgttttgacaaattcatggtctgcacctcccccaaaccagtgcatttctaaacagacttgtttttcctctaaatagctttgccaatccggccaacaccccaatatttctttatattttgaaaagtaggtctttcacctgctgataatggaggatccaattctgtgtaaactctggaattctatttaaaattgcagattttaaatgtagggaccaagacaggatgtaggttgtgtcaacttgggaatgctgaatgactgaactgtcatgacatttacaatccagatgtcatggcaagctgggagacaagacagcttggttgataattagatggcagatgtccatgcagtctcacgtgatacacgttactttttgtatattcaagatttgggactttagccctgaaagataggtgatacatcatcttctctatacaataaaaaatagtttcaataattgtatattattttgttttgctttttttctcatttatttggaagtagcaaatacaagaaacaaaaattactcataacccctatttttggtgtatctctatgcaggcaaatatactgatgatgattattttcattttttgaaaatttagattctcacactcaattaaaaaaagaaagcctgaggaaattaaatgatttctaaaatcacccagctaattagtggcagaaatgagaccagattccagtctcttgctttcccgaataccttattctggaattcaattataagtacaaggcatcccactcttggcttcctttctgaataaatgcttgcaccaaatccccagtggcttcttgagaaagctggctacaaatcttcaaagcctcagttgaagaattcttattaagcctactaggtaccaaagcaatagcctgaagtttggaaaaattctagttggtgaagctagaattttattcaatttaaagaatacttggtaggggggaatgtaatgaattcactccctagcctttcttgaactctacctatttaacaccctatttctaatacagcagcttctcactatagaatgttaggtttatcaaatctctcttccaccctgttatacggcattttccatcccttggatgtttcaagtccaggaccttgggcttaaaggcaaaagtaaaatctattacacatttgtagctttgtacaccaatcagggaaaagtagtaaagtgggctattatgtacattattttacaatgcagtatgttagttgtcaattgttacgcaagactaattttttccacagcaaaaaataaagctattttaaaatattttggaagcaagtcatggttgaagagaagcatcccttgaaaaattagacttaaagctgcaaacttcccggggttgacattagcttgaacttgatgaaaaaggaaaaattttaggaggatttgttcagctgtcttctgagttatgaaagcaggaagaaatgagttttacatattgcctggaggtaatttgtgtacatataagtcaaaaacaattaaacttcaaacttcacacacagccactgtcctgtaaagggtggtagtgtataagcagaagaaaaatgactagaagagaacagggttataaagcatccagacatttcccatgtgaggatcttgaaaaacttctgcagccctgtgactggattctttctcctgatctaatagggctgtttggaggaagtatttctactgctcttgagttgttgctagttttcctttgaatatcctgctcagttccctgccccagttcaagcttccttccaaaatgtgtttaaaataattagctcttcctgttggtataggaaaaaattagtcacacataattggtaattcacatattgtattataaaataatgtacaaaattaccacccttacttctttttggagggcctgtggcttgtaccaatggatttatcttgttccagggcattgagaaattttgccttactgatggcatcaccacttacatttctcaacatctttgcctcccatcagaccaggatttcagttactaggtatcctaccttgttccattgatctgagaccctcattaataccctagctgacagtcttaactcagcactgtcttctattttctaccaaatagaatacaataatcagatacattttactctctcttctgaataaagatattaacaaaatttccatgagtacttataagggtgagtttccagaccaacctagatgagttaccaggatatatagtttgaaatattaactttaaacatttcttgatttttctgaccccatcaggtattttttggaaactggtattaggcttgtagaaatggacaaggagctctaccatgcttgaagatggtttaagccttcagcaaaataattgagagcttcctcttctgaatattccgaatacacaggtctatcagttagtgtatcatgttatgtgtagatgtgtgttggggtgatcagatccaacaccaggtcgtgggggtgacaaaggccggcaattcaaaggaatgagaaaaagacagtttgagagagaaagtgggaccagggggccatcgcgagtgtggaggctgtgaaggccccaagttctgggagcccatgttatttatgggtgctcaaacaggtggtgaggatgtcgagtgaatgagaaacatatggctgtttgacataatgggagtactagaagcaagaagccagcaagtctagcagacatgcaagccctgcctcagcttctctcccaacactcagcttttctccaacagatgtgtatgaataaggcttattaataacaaagcctggctccacaggtgagagggaagatgtaacttaatctactggaagtcaccaacatagccctctaaaatgagtcattattttgactcaaaaatgaacagattaaaaaatgtttcagctaatcctcttagctatttgatgtacatcaagcatccagatgttcacaacatccaagctgcaattttttgtgtgttatttaaaagttttacacttgcatatattattcctttcctcaaagacaaagtatagaacccaaactggactttttaaattcactccttaaaagtgtggtaacttaccattccagagctggtgggtccccgattattggcccatgggttgtccactttgtggttttgctgttaggaaatgttggctgatggcttccttaaccactcagcagttaaccaacaataacttggaatgtgtctaataagtgcagcctaatcttaattttattgggagttatctcagctaaataatggaaaatttgacaaacctaattaatgaattatccactgttaaatcttctgtgccactgagtcctctttttagtaaaatgattaaaaacattaactatagtggtatataattactattaacaactattatgccaatatatattgttattcctgcctaagatactatgtctcagcacggagtttatattaggtattttattttaacagttttctaattgctgccactttttcgtcagattgcatattttgacccacaacattgatttcaccttaatgtcaccagtgggaattaattatctgaagcttggcataatattaattaaatccatatgtcacatcatggtgtggcattcttttctttctttcttttttttttttaagtcagggtctccctatattgccatgctggtctcaaactcctgagctcaagcagtcctccctggttggcctctcaaagtgctgggattacaggtgtgagccaccatgcccagcccattgtgcagtgttcttacaaaagtattctaacaatccaaaatcaagactacttccaaaagtggcaggcttcatatagaatccaacattctgttgcaatgagattgggatgagtgggtttagaccaacattgatatcaaaggccagtttccctttaaatcaaaatcacctgtaaactagcatcttgacattcaagatcccaccagggggatctagctgggaatgtcaccatgcatgtcttgagagagtgcattagcccacctgcagtaggttgaaaaatatcttccaaggataatttcttaagctgtatattttaccttatttagaaaaagggtctttgtgagtgtgattaagttaaggaccttgagatgaggaaataatcctggattatctgagtgggccctaaatatcctcaaaagtgtccttataagagtgaggcagagggggcatttcccccgccacacacacacacacacacacacacacacacacacacacagaggagaaggtgatggaggcagatactggagtgaagcagccacaagccaaggaatgctgacagctgccagaacagtcaagaaacagattctcttttagggtcttcagagagaatgtggccctgctgatgtcttggtttcagctcaatgatactaatttcaaatttctggcctccagaactatgagaaaataaatgtgtttttgttttgttttgtttttttgagacagagtttcactcttgtcacccaggctggagtgcagtggtgcgatcttggctcactgcaacctccgcctcccgtcttcaagtgtttctcctgcctcagcctcccaagtagctgggattacaggtgctcaccaccacgcccagctaatttttgtatttttaatagagacagggtttcaccatgttggtcaggctgatctagaactcctgaccccaagtgatccatctgcctcggcctccccaagtgctgggattacagacatgagccactgcgcccagccaaatgtgttcattttaagtcactcactttgtgccaatttgttatagcagccacaggaaactaatacaatacttgtgccaacttaagtaacagcaccagccaaagtacataaagtggaaataaaggtatttttagaaagtctcattactataaaatatggtgtaaataaaaacagatctgaatatgcaaattgaagtttcaaaataagtctcctgccatcccatttcaaagacactggaaatcttaagctcttttctttacaaattctgaaactatcattgcctgtgggttgggttgaaatgaaggcacgtgggtgtttcaagggtatgttctgtgacaaagagacagaatagaaaaatccaaagtcatagcctggagctaatacagtaatatgaatacataaaacaggaaggacaagaatataaaagtgaatttggggacctgagaaagtcaagaaaatgattggagaaatacaatttgggagaccactttagaacccagccctcactgggcatggtggctcacgcctgtaatctcagcattttgggaggctgaggcaggtggatcacctgaggtcaggagtttgagaccagcctggccaacatggtgaaacccgtctctactaaaagtacaaaaattagccaggcatggtggtgggcatctgtaacgccagctactcaggaggctgaggcaggagaatcactggaacccaggaggcggaggttgcagtgagctgagatcatgccactgcactgcactgcagcctgggtgacagaacgagactctgcctcaaaaaaaaaaaaaaaaaaaaaaaaaaaaagaacccaggcctccaatggtgcgatcaggtgccaggtactcttgtctactgtgctgaccatatgctgttgaggtcatcaccagctacgggaaagggcattctcataggggcaagcccaactctatgtatcttacgttatttaccactatttcccaaataaacctgtttcaaagaataccatctttaatgtctttcacaggtacctatcctccactctgcatccttttccatgctatcacttgcagtgaaggtctgttcaccccttttttaacctgtcttccatcttgagttccaatttccagctgccctctgaatatgtccagaggatgctggctgctgcctcagactcactggatgaaacagtttcctgttttctttactaaaactgccaaccttccttttccttgtttgagttagtgtatcactgtcctctagcccctgagctgaaaccttggaatcatctttcactcctccctccccctttatattcagtcaactgacagtaccaatatttcttctcttctccttttatttcttttgccactgtcctactttgggcactaatctctcttctgaagtataacaatagcctcccaactggccactctgctttagctgctccatggtccaatctcccttgtcacatgtgttatctttcccaaacactgtcacaacttgtcagtctactgcaaaactttccgtgactcctggggggcctgcaggagagagtttcagatttctgagtctgccttcctggctcttcacaatgcagcctgagtccatcttttcaaccgtctctctggatacataccaacacttgccctttgtctcaatgaatgtgcctgccacttttgtatctccttacctttactcatattgtggtttaactatgtggttgtcttctccaccctgacaatagatacatctattgtccatcagcccaatttacaacttttgcatctcttctgatttctatcctctgctaatgacacttattaactactgcctttccactggactttgcatttagttttttatatatatatatatatatatatatatatatatatatatatatatatatatatataaccttacttctgcttttaaacatagatcattatttccatgtctaccttccactttctccaacactagattgcaaatttctacagggtgaagcttatgttttcatcccttaacacccagcttaaatgtcacctcacatactgactaatgctttttatctcagttctaaaacattattaatgtacatcacataatttaactccattttgaaaattagttcttgttccagtatcttatctcttaaaatagactggaaccatctcaaggttagagaggatccactatattaaattcttatatatccctcagtagatggcactttgttggatgatttaattgacgtatcttcttaaaaaataaaaatatctggctcttcaaataattagctttgtgacctgaggcaaatcatttatcctctaggacatttagtttactacatggtgaaataaatgataccttcattccttaaatatatagatccagtgacatgttgctttgaatcacagaatttggtttcgtgctaaatctaagaccaaaaacagagcacaaacaattcagaatcaacagcatgctttctggaagcaatatgaaaggtgttattaatagaattcagcattattctaatttcctcttaaaatttcaagaaatatatctgacatttgtcctgtcattgtaagttgaaatatgtgtgtgtgtgtgtgtgtgtgcatgtatatataattttttgttgttgtttttgagacagtcttgctctgtcacccaggctggagtgcagtggcatgatcttggcttactgcaacctccgtcccccaggttcaagtgactctcatgcctcagcttcccgagtagctgggattacaggtgtgcatcaccacactcagctaagtttttgtatttttagtagagatggggttttgctatgttggccaggctggtctcaaactcctggcctcaagtgatctgcccacctcagcctcccacagtgctggtattacaggtgtgagccaccatacctggccaaaatgtgtatacattacacacacacacacacacacacacacacagagtatgtatacgtatatatctgtatataggtaagtgtgcttatatgtatatacacagacatatacacacacaacatatacatatagatttgttgtctagatattataagagtattgcactaatgtttctataaaacaccagttcacaggcttctgtcttctaacaatatccttatacatatttgtcagccactatttaccttaaaatgaaacagaggggagcctgatatataattacggtcactgtgctttgttctattttgtttatccctttgcaatatagtgtggcagacagaaaaatgtatgaaattaattcttttggtttagaatgacattcctatcattgttagaacaagggattacattatacactacctctaaactcaaattttctgagcactttaactattaaatagcaataacagaaagcattgtaaatcttttggagttttgcatgataatgtacctcttgttaattgaattgagagatgattgccctatgattacctcgattcatttgctgcataatttaccataatgataattaactccttgtactgaatgaggtaagatgtgtgttagttagacaccccctccctcccttcttgcctttccttctttccctccctattttagtgtttaaccattttacacacaatttgagacttgtttcagaatctctccacctatattatcatgtcaatccaagtatttctaaataaaagtagaagttgggccatgtttttaaaatttctagctaattgcctgctacttggcttattgttgtgatctaattatgttctggtttttgaaaaaaggactattgcctggcccactgtatgacatttgatttatgtagtctcacctctccctaaatagcccatagttcacaatgcagcagagcctatattaccgcaatttcttctgcactgaaattagacaattatgaagttagtagattattaaactaacgtatgctttataaatacttcttcattctaggataagggagaaggaagtatactgtaattcccaatatgtaaatgccctcacacatttgatagttgatggttccattttttagatgaaaaaactaaagcacaaagaagataaacaatattttgttctgccctataataaaataagcaggcaaatatttatggatatgattctgggttgcctcaaaactttcagggtcagggtaggcaggcagttggagatatgagataatgttagccatgaattgtggctatttttgtggcacctgggtgatgagtccacggaggttcatcacatgattttatttacttttgtatgtttcatattttctataataaaggtattttaaaggaatatatttaggtatccacagtgtgtgacacctgtcaaggagcacatgctagaggcctggctctgccagtgacataggctacgtgactgtcggtgggtcacaacttcctagacttcatttttccctcattaaaatcaaagtattagaagagatcagtggttcccaaggaggtggagttgcttagggaactgtctaaaatttcactgacaactcagaaatctatttggatttagaagctggaggggaatgtatatttcaaaataacttctcaagtgactgtactgtgaccattccttacacacaaacttgggctaacaatgagaatgacttaaccccccaccccacaacactttaataggtttaggatgggttctgagaaataaagatttttaaaacattccccaagtgattctaataggtggtcgacatgccatactttgagaaacacttttttagctcatctcagggtcccttccaactctgacacctcatgatattacttgagcattcttggttctctgcttctatgatgtactattccatgagcaactggagatttagttacaggtgtatacaagtgtacaggagtcaagaaaatgatgctaagtttcttgcactgactgaggaagcaaggtagaagcagactctggcttaattggaattcatgtttgaggcctctgggccctcactaggaaaaatattcaatttatatgtaagcatatgtataatacacatatctcaccagcattctttttgggaaaagagaatttccaaattaaatttaacctatcaattttatactgactaagatgaacacattattttaatatattgtttcctcttgcttcctaatacttacattgtatagagtttcattctttatgctaatcctaatgcatagattggtaaattgagattaatgagattcttcctttactaccacctgtttttaaccaaatgcctacatgctgcatgagcaggaaatgaggtgactactgttgttggccacagagcttcaatatgtcgtgaacaagggttagatgtgaatgtcagaaaaaatgttatgatcaatttctgcctccaacaaggaactacaaatatgggtcacaaaagttctactagtagccccaaatacattttttgaaaggagacaatataaataaagctgaaaagcagtcacaacgctttaatgtgtcattctcttcttcacctttctatccacttagatgtttcctaccccccaaaaatgaacttatgtcacatcacacttgtgactcccactgacatctaaagtagtgtgagccacacagatagaagcacaggtaaatgcctcaaaacctagttattatatttgaaggaatttctgattcagtagtgtttctgtaattgttactaacatcaacgcttcgcttgcttctaggaagacaggatggtaaattcctaacaatggaattgcaaagttcacagtgtgctttaaggagtccctttctccataaacacagctcttgtgatggctttgcagattttgtttctgcatttagtgtagataagttgaacaatcctaattcctgagttctaactagtgatagagcacattatattgttaagaataatggatgttggagaaagtcaggacaaaagtaggtatgaggtgtccctggtatgtggccaataggaaccacggtcctgaagtatccggagcagtccggacatcctcaagtagacccaaatcagccctatcaggagccaacagaaaagcttgctagggcaaggtcagaagataaatttattagccaggaccagtttaagtcaaaagttgaatataagtcatatctttagaaaaaaaaaaaaaaagcaggtagaaaggcacattgtttttagctaactctacaaaaagttcagagcgaaaagaaaaacagtgatgcagaactaggggagaaattaaggagcaaacattccaaaaatagaatgagttgtacacttggttaatttcattgctcagtgatgcctccatagaccagattcttctctctgccatcctcagaaataggctctagggatgctcttagataggctattctgtatgcaagaccttctgtagctgttctagatgccagatcctgaaatgacaacattcagtgaacaataatagctcttcttctacgtcatttccttagatgtgaagaaaccatttccagcaaactcccctcatgtccacaacacctcattaatcaggattaaatcatatgttcatttctaaaccaataagagaaaaagaagtatcgtggctatattatactgaaatgcaattgattttggagagttaaaaacaaatccaaaccagcagcagagcctggggagaatccacgtctccttctcaatccacaagacatgatgggtctgctgcagtgtggtactaaatttggggttacaagaaatttttggcttattagtttcctagggcttctgtaattaagtaccacacactgagtgccttaaaacaactgaaatgtattatctcatagttacaaagtctagaagtctcaaaacaaggtgtcagcagagccatgctcccccctgcaatctgcaggggaataatttcctcttcctagtgtctggtggtttgcccagcaatctttggccttttttggcttgtagttgcttaactccaacctctttcttcctcatcacatggtgttctccctgtgtgcccctttcttcatatggctatcttcttgtaagacactagttatattggcttagggtctcactcaactccagtatgatctcatctaacttaacaaattacatctgcaaccttcctatattcaaataacttcacattctgaggtagcggggattagaacttcaacatatgtatttttgggtggaacaaaattcaagccataacaggcttctatagacctctctagttttactcagtctagatcccaatccatggagtttgaccaaatgagttagggtgctattccctaaacttgctgaaacataataattgctagaggcccttagtaaaatacagattcctggccctcacaacagatgtactgaatcagtctctctaggggacatgcctagaaatctgctttttgacaactgcccagttcaattttatgatgaagcaagtttggaaagcatagagtcagggtgctgagcactttttgagcatctttgagcactttttgaccatgttattcctggctgtgaaagaattctttttgtatgaaatctcatctacccataacaagtcttggaagctgctcttgtcatcctcatcacagacctgcagaaatggaggttaggtaagagtggggctggaaatggagctaggtccaatctcaaaatacatactttttcaatcatactaactcatcatgttagtagtaagttaaagaatcttgaatcatatggtccactgtagtttacttttcttgccttattcccaggagttttgtttttatttgttcttgtccttggagggaacaaaagacagctggtagctgttccctgtttggttttgcatgtattcaaaaggcatcatcttctactgctctcttactcctttactttgtggtcatttgttttgcagctatttagacagttacttcttaaagaacccctaaaactatttagacagttacttcttaaagaacccctaaaactatttagacagttacttcttaaagaactcctaaaactaccatttgttcctctagaaaggattaaagatttgctgaagcaaagttctcctgacactttacctagagcaaggctgaaacaaaagctacctacacctgtattttccttctcttatccctcaagtacacaatagggcatttggctctcagcagttgatgccaagttctgctagggaagaaatgagacttcagagctccctacaagttgaaatggagtcagaaaagctacatatataaatgtcagaaaagctacatatataagctacatacataagctacttataaagtttctgcaaaactacctcaaagggcaggtagttttgcagaaactggagggacactgttttctggagcactctgccactaggattttacttttagtgtaatgaaggatcactgaagacttttaaaccagacggtgacatgataaaatttcatttcagaaatttcatttctgaaaattatgatggctgttggaaaaaagtagattggaagaagcaagaaaatgctaggttacttcacaacttctccaggaaaatagtgcagtgggagaaccctgaactcaggaaatatggcccatttcctgcactatgtttcccaattcaaaatatcctattgtggaattctacagctcaagtcaagagccccttctgaactacaaaggacaaggactgatctactaaagccgtgtagtaaatgtgaggaatttgcctaactcagccaattgatgtgtcaaaatctaaccaatgtgtctaataatctaacatatattgttattgatttcaggttttaagaaccagttttctaaaaatgaaaaacaaaatcaaagcactctagaggaagtaatcatatgtttaatgtcataagtcactgattgtatacttaatagtaaatggtggatatgaacttgggccctggagtcaaacttaggtggctcggtcatgcccttgatgtgtgtctttgggtgggctactgaaactctgtcttagtttcatctataaaatagaatgctaacatcgactttatagggttattgtgaactctaaataagacaacaaatggaaacccaacacatgttctcactcaaaagtgggagctgaacacgtagacatggggaggggaataacacacattggggcctgtcggggagggggagggagagcatcaggataaacagctaatgcatgtggggcttaatacctaggtgatgggttgatagctgcaacaaatcaccatggcacttgtttacctacgtaacaaaccttcacgtcctgcacatgtagcctggaacttaaaattaaattaagtcaaaaaaagctaaaagcaagctttatgccaaaaaaaattttaaaaacttaaaaaaaagcgcctcttaaagttataagggagggtacacagtaagcacttagtgagtgagtgttgtggttgctgtttttcttaataaacatatttttatccaaattattaagcagaaatattggactggaaaagggtaaagtgtggattattaacggttgacattggaagagcaaagagatagagatgttccatgtggttcctttgccaagccatccagatactcacctccatccttttggtcatttcccctaatacacagtatatttatgatccccttctgacaaccccttgaagagttgcttgcctcctgcacagtgctgagttatggacgatgcatttgaagccatatattcactctgtcttccccacatgtgcctagtaactatggcagagctcaataaagaagaggccagtggcgggtttactcatttttaaaaaaatttccttgttgttcttttctgtgattgtaatggctagcactggtactctttccctctctctccccttcttttgccatagagctattgtcaaatgtacaaatacatagtgaattgcgatggtttctgggactgacagagagaaggaacctgttttccccataaatgctgtagaatgaagggtttgcaaacattgtgattgtggcagattaaaaaaaaaaagtcaagcaggctaaattgaaagggaggcatgagaaaagctggtgcaacctgtcagctcctggtccgaaagaagctgatggtattttttttaatattgtgaagagaaggaaaattttttatagtaagtctatggatctgctttaggaggcttttctcttgatctaattgagctgtttgaagtgtgcttgaaagttctcacccagcctgtgtcagccacctgcctgctacaagctgtgagaagttaatcgtcttgggcattgttaggaggagactgtctggtatctgatggctttccattctgaacaagggtgtacggatatggaaaatgtgtgtgctcacatttgtctttggggtgtggggctgcttcactatgcatgagagcacatccacacctccatccagatggtgcctgctcatagtggcagtgctagataaattcatgtcaaacaggcagataatccaaaaaagcaactgtaagtatccacattgctgttttctgcttccaagcttcagtgttgtttttttttttgtagtgacagggtattactatgttgcccaggcttgtctcaaactcctgggttcaagtgatcctccagccttggcctcccaaaaatctgggattataggagtgagccaccgtgcagtgcctggttttttaacatgctattcccttgcctgaaacaaccttgccatttgccatcaacactggcttcatcttccaatctctttgcctgttgcctcacattggatgtcaccaatctgggaagcctttgtcacccctcaccacattgaggtgaggggtacctcatattctctccctgttccttgatttcccattcaaagcacttaatgcaccaaacatttttttttattgcatgtctgaatacattccttagtagttcaacattctttgaggttatatcatgttcatcacagaatttaaagcaatctcctgtgtatagcagattgacaataaattagctatgaaaacaaatgaataactatggtttgggaagaaagacattgtctgagcacacagaattctaactcatgacttgtgcactgtcaagaatcacttgctttcagataattttgatgagtctgattttacgcttttcagtttgtatgtctcatgatttgtccttaatagactgaagaagtcctagcccttataattgaccagtgcctggtaggggaagggcagcagagaaggactggattagaaccatctcaaatgcttctattctgattagtacttagggttggttggagagtaagaatagggactcagcctagttgaaggaaagcctgtatagtggtgagtctgagtgacaaaccagggagaagtaataagacaatttatttctatttttttatcctacacctgaaatgtaaacaaggacacattaaatttttactggttagcattttttaagtaattatgtgctcaactatgtccttatatttgcattcttaccaatgtagactctgttatggaagtaacccatgctgctgctgcctttggacctgaatctctttttgcccttgtcccatttgtgaatttagactttcagcaagttgtctttatgattctctattctatgacatactttgtgaattcatctgtaatcaaatctgtttgatgaaggtcacaaaagctaagtcaacatgagacctgaaagtagaacctgggggtactgattttcctacccattaggaaacagcctccccacccaatcagggcaggttatagtattcaatgccatcttgtcttattgactgagtcatacatctctcattccgcaaagtcagggtcctaaaatacttctgtggagtcgcaaggactcttcctcattagccatctttgactttgtcattgatactattttctacctgtttctgataattaaaaccccccaaaaagtaaaatgtcagggtgaccagagagaaccttagataggacagctaatctcttgcttctagagaaaggtatgaaaatatactgtgcttattatggggatgatggtatgctctctgaattgaaccttaccttttaacatgaaatttctaattgaaacaaagctgtgatgcctccagctttgttcttttggcttaggattgacttggcgatgcaggctcttttttggttccatatgaactttaaagtagttttttccaattctgtgaagaaagtcattggtagcttgatggggatggcattgaatctgtaaattaccttgggcagtgtggccattttcacgatattgattcttcctacccatgagcatggaatgttcttccatttgtttgtatcctcttttatttcattgagcagtggtttgtagttctccttgaagaggtccttcacatcccttgtaagttggattcctaagtattttattctctttgaagcaattgtgactgggagttcactcatgatttggctctctgtttgtctgttgttggtgtataagaatgcttgtgatttttgtacattgattttgtatcctgagactttgctgaagttgcttatcagctgaaggagattttgggctgagacaatggggttttctagatatacaatcatgtcatctgcaaacagggacaatttgacttcctcttttcctaattgaataccctttatttccttctcctgcctaattgccctggctagaacttccaacactatgttgaataggagtggtgagagagggcatccctgtcttgtgccagttttcaaagggaatgcttccagtttttgcccattcagtatgatattggctgtgggtttgtcatagatagctcttattattttgagatacgtcccatcaatacctaatttattgagagtttttagcatgaagggctgttgaattttgtcaaaggccttttctgcatctattgagataatcatgtggtttttgtctttggttctgtttatatgctggattacattgattgatttgcatatattgaaccagccttgcatcccagggatgaagcccactcgatcatggtggataagctttttgatgcgctgctggattcggtttgccagtattttattgaggatttttgcatcaatgttcatcaaggatattggtctaaaattctcttttttggttgtgtctctgtccagctttggtatcaggatgatgctggcctcataaaacgagttagggaggatttcctctttttctattgattggaatagtttcagaaggaatggtaccagttccgccttgtacctctggtagaattcggctgtgaatccatctggtcctggactctttttgcttggtaagctattgattattgccacaatttcagatcctgttattggtctattcagagattcaaattcttcctggtttagtctgttttggttactgcagcctatactacaaggctacagtaaccaaaacagcatggtactggtaccaaaacagagatatagatcaatggaacagaacagagccctcagaaataacgctgcatatctacaactatctgatctttgacaaacctgagaaagacaagcaatggggaaaggattccctatttaataaatggtgctgggaaaactggctagccatatgcagaaagcagaaactggatcccttccttacaccttatacaaaaattaattcaagatggattaaagacttaaatgttagacctaaaaccataaaaaccctagaagaaaaccaaggcattaccattcaggacataggcatgggcaaggacttcatgtctaaaacaccaaaagcaatggcaacaaaagccaaaattgacaaatgggatctaattaaactaaagagcttctgcacagcagaagaaactaccatcagagtgaacaggcaacctacaaaatgggagaaaattttcacaacctactcatctgacaaagggctaatatccagaatctacaatgaactcaaacaaatttacaggaaaaaaaacaaacaaccccatggaaaagtgggcaaaggatatgaacagacacttctcaaaagaagacatttatgcaaccaaaagacacatgaaaaaatgctcatcatcactggccatcagagaaatgcaaatcaaaaccacaatgagataccatctcacaccagttagaatggcaatcattaaaaagtcaggaaacaacaggtgctggagaggatgtggagaaataggaacacttttacactgttggtgggactgtaaactagttcaaccattgtggaagtcagtgtggcgattcctcagggaccaagaactagaaataccatttgacccagccatcccattactgggtatatacccaaaggactataaatcatgctgctataaagacacatgcacacgtatgtttattgcggcactattcacaatagcaaagacttggaactaacccaaatgtccaacaatgatagacaggattaagaaaatgtggcacatatataccatggaatactatgcagccataaaaaatgatgagttcatgtcctttgtagggacatggatgaaattggaaatcatctttctcagcaaactatcgcaaggacaaaaaacaaaacaccgcatgttctcactcatagatgggaattgaacaatgaaaacacatggacacaggaaggggaacatcacactctggggactgttgtggggtggggggaggggggagggatagcattaggaaatataactaatgctaaatgacgagttaatgggtgcagcacaccagcatggcacatgtatacatatataactaacctgcacattgtgcatatgtaccctaaaacttaaagtataataataataataataataaaaagaaatttctaattgagttgcctaagcctgcccacctgtcattctcatatgcctaacacgatgtgagattttatatatacagtcctctgtatatatattcacaggttccccatccacagattcaaccacccatggattcaaaaagcaaagcaaacaaacaaaataacaacaacaaaaatacaaattttaaaacacagtataacagccatttacacagcagttatattgttttaggtattatacctaatttagagatgatttaaagtacatgggagagtactttaaaaaaaaagtacacaggcatgggggcagtggctcatgcctgtaatcccagcactttgggaggccgaggcaggtggatcacgtaaggttgggagttcaagaccagcctggccaacatggtgaaacccctgtctctactaaaagaagaaaaaacaaaaacaaaaacaaaaattattcaggtgtggtggcacatggctgtaatcccagctgctcgggaggctgaggcataagaatcacttaaaccagggagaggcagaatttgcagtgagttgagattgcatcacttcactctggcctggacgacagagcgagactccatctcaaaaacataaataaataaagtacagggaggatgtgtatagattatatgcaaatactgtgccattagggacttgaacatctccagattttgtatccacaggggtcctggaatcaatccccttgatggatacagagggaagactcactctcactctctcttgatatatatatatatatatatatatatatatatatatatatatatatatatatatatatatgcacacatacacacacacacacacacatatatatacacacacatacacacacacgtatgtatatttacatgtatttataaactgatattttattcaaatgtttcaactggcccctaggaagaaagatccactctgatgtgttctggctctgtgtgcccacccaaatctcatcttgaattatcatctgaattgtaatccctgtttgttgtgggagggacctctcgggaggtgattggattatggaacggtttccgcatgctgttcttgtggtagtgggtgagttctcacaagatctgatggtttcataagaggctcttcccccttcgctctgctcttcccttctttaagctgccatgcgaagaaggtctttgctttcccttcatcttctgccataattgtaagtttcctgaggccttcccagccatgcagaactgtgagtcaattatgcctttttcctttataaattactcagtctcaggtatatctttatagaagtgtgagaatggtttaatacactctgtaaaagcaaaataatcactcttcagaagcagaaaaaaactttttataagtgactcaaagtcaagatgacccatttctcatttatatgatataaacctatacatatcctctcacgtactttaaatcatctctagattagttataatacctaaaacaatgtaaatgctatgtaaatgcctgttatactatgttttaaaatttgtatattttgttgtattatttatatttttgttttttgaatctacggtttatatgaatatcattctctctccctctgcatctatctgtatctacatatgtatatttgtttttttcttagaacataacctagattcctctacagtgtaaatcccttgctttctggttttctgcctaataaaaggctctcatttctatcttggtctggaaatacccccacttccattttttatgaagtaaaaataccgaagatttttttttttttttgctagaagtagtttactgtctttctctacaactcattctaatatttttcttttcaactccctaccattcttattgtcttccagcaatgtctctatgatcatagagagacaaactgcagccacacttagccaggatcatttacatttacttgcatggctctgtgtagcttgctttttatgctaggcaggttcctgaatagtcagataggaattgaattcttggaaatcatgccattgtttaaggatgaggaagaacttactattttaatgaactttattataaaccttttttctaagcaaataatcaccccttactttatcttatctcctatgcaaatcctgattttcacatttaagctttacttaacagtgtcaatttgtatagttatctttaaacaatggtcagtccccactcttataattgaaaagtaagtaattttcatttactttctggcttctacctccagaaaatctcttacctctatctttattttggtaattctcttgtagggactttaatagcccctggaaaatcatcatagctctgcttcaatctgaaaacataactggcaggcatgagtctggaacacatacgagggaacgaagtacccagagccaagttaaatgaactgttgatgacttttctgaaaatcatagtaaaccatgatttcctcacaaaatatagaagtgtctgatttttggcatttaattctcaaacatactcagatacactttccttcttcctctcccactctgggttcatatcatcatataaatcagaaatgggtcatcttgcctttgagtcatttataaaaagtttttcttttctagctctgaagcgtgattattttgcttttagagaggatctttctttctggggccagttgaaacatctgaacaaaataaaaatcaattgaatatggatatgaaacttaacttgtctttttaccattaaatatatatttgaaaaatgtgctcttcttttatagcttttgtcacatcagcatgtaccaattccaaccagagaacgaaatattaatattctgccccaaagtgctgttttccagcctgtgccaaagcagataatgccagtaacagggagttttccaatctaactttcttataccagtcaaattatccatttcaaaaaagcatccagtcaaagtgctcccaataagtgaatattttgcctagagaattttgggcttgagttatccatccctctgaccaaaatctataagcccactcacccaggagatctgagaatgaaactaaatataaaaactggctttactactgggaacccgaaagttcagctagtgagggaaggaaaacaaagaatagaatgttttccgacaatccttgcttttgtgagtggtcagcagatgttttgtgcctctgctgtattccttagctaagggttcacatgaaatgtaccctctgaaggctgtggccttgttggaacgccaaattagtagttattcctcatgctctgaggtctagcttcaccttcagaaccaggtgagcttggtccccacaaagccctactggtacttaagcttcccatttcaagaggacatttgggttcactacacctctccaagccgtctgattaattgcagctgtgtgcaaattagttttcttcaggggctctctcctgctctcagattagcaacaacgtattcagatggaaagcaaataaagatagttgtaaaatgaggacacaaaagagatgcaacatgtttgctcttgatgggtgcattgatgtcagaacaactagggggaaataagaccaccttggtactgttatcatcgtcctgatgatggtcccgtcttgcagaaaagcccaaacagaagcagggcgttgtctaatcactgatgggtttcctgatattattgagaagaccaagcaaaattaatggtgatattatatctggtgaaattattataaattctccctgcagttttaattagctctgctctttttctcctcctgttttaatccaaagcatatgtgtatgtttgtatcagcaatttcaaaattctgtgaagcatttggtgtcatccatctagtttcaaaataggtacagcatgatgcagtgggaagaatgctagcctagaagttaggactcctgagttcctgcctaggtctgccgctaagctgtagtatgaccttggacatgacctttcaggaccttgatttcttcttatgtgagatgaaggattaaaatccaacagtttgttaaatcactctcaactttttagatactattaagtttaggatcccgtggagaggcctatcatccgagagaccatcctatcatcaaaaggtgaatatcaggtcaaagcaaaagaaaccacattaatttttttctgttgtcagctcacaaagctattttaagcctttggacaataagaaatatactttttttcccctccaataaatatacattatccattaaagtagagtgtgttgtgaactgaccttaagggaatttgctagtttttttgtttatttttgttttttacaggaaactaagtcctgtggaacaaaatagaattaccttcatggagcaagtttaacaaattgtcttcatttttggtcagcaggttgatttctaattccctcttattccctttatatgtatttttggcttcctgtctttgttttgcgttgctataaagaaacatgtgagactgagtaatttacaaagaaaagaggtttattagggctcatagttttgcagcctgtgcaagaagcatggcaccagcatctccttctggtgctgcccctaggaagctttcactcatggcagaaggggaaggagagctatgtgtagagatctcatggagagagagggagagcaagagagaggataggaggttcaggcagtttttaacaatcagatttcatgaaaataaaagaactcactcattacctcgaggaaggcaccaagccattcatgcgggatctgccccatgaccaaacacctcctactaggccctacctccaacattggggatcacatttcaacatgggatctggaggggacaaatatccaaactattaaattcctaaaggacataaaagggtgaactgcacaaggatactatatctccaaacaaatgcccagttaggtccaggacgtgttcaacagtgtccaaaatccaaagagaaccagagatagtgtggcttagtagaaggtaaactgattatacacactcagcattgcaagaaaccttaacgggactgttgtccaaccacacaagcattattcaaaaacctttttacctctcaaggtttggttttctagcatgggttgccaagctacaactgcccagagaagtcatttaaactgcaagagactcagctttctcatccttggaagagagaaattggacaaaattatctttaattttttgtttgccttaatatcctcttattctactaaacattttcagtattacagaaatcagctcttggaggaaaagacattgcagggggtgggagacaaagttggtgataccatgtaataagatttttttagatagtggcaagataaaatgttttgaggtttggcaaaaccatctagtagtttcagttctccctgacagtaagaagttaaggaggccaatttctctttcaagtcagaacttcttgttataactgggtagtaaacatactttttaataagaagtggctaaggcttaagaagaccaactgctgatacccagaaatagccaaagaatacttcattactgacagtgcacactttgatagacctgtcttttactattgacagtattctttctctgctgtttttacaagaaaaaaagcccaatgaaatgtaaaccttgttttcttcagttattggtcctaggagtattcagagtaaataaaaaaaaaataccttacgtatacttctataaaatcttttatttgagcaattaaaaaaagctatcttctttcagtcttatcaaggagagcaaattcctcctagaagtcttatttctacttctaatgacaattgctttattatgtgacattcaaaggaaaaacttgaagtcatatttctagtaaagtatttaatttcagaaataatttaaactgttacttcaaagcaaatatctgctattcctgacataaagtttttacccaagcttggtaataaagttatcataagaataatatggattattctcaggatggaatagaatgtcttgattaggaagaaacacacataagaaattcatttttttggaagaaagaaaatctgtgctgtttatctggcaatggaagtcagatcaaaatatatctatatgacatttgaatggggtcacgtgggaagacaagatctgtctgtatgaatatttttagcttctgaatttgacataagaataggatcaggaaaatgaattctgtgttacatgactaagatgcatattagaactcaggcaagatgattcctgtagttggtctactgggaaattaccctctgcctacagctttcaaatacatatatatactatgtgtgtgcatgtgtgtaaatttccaactgagtacatcagcacataaaatacacttgtccaaggtaaaaaagacaaacagttattaatagggcaaaaataaaatggggttatatccaaccatggcataatacttctcattagaaaaaagtgtggcgagctaattaagacccagtgatagttagaaagtctgagaacatttatctttaaaaatggagtggtaactaactaaaagaaggacccagaacctcctaatacaaatatcagttatattccctgagatttaaaaatataataattcttatttctaattcaaaggcctagagtgtaagtagggataacttaacctttttttttttttttaagcctctgtgagaaataacgcagctgtttggcccgtggtattctctttaaaggaaagaagttacaaagacaagaagaaaaaagtggaagagaaaaataaggagaaaaaatattcaaacagtacataactaaaaaaaaaatttttcacaaacagcaaggggaatcttgaaacaaaatagatttgttttaaaatgcaaagaaagagccttacccgggatgaattgctcagttctcttttgttggttgagttcacttccttccatttctgctaactttgaccagctgctaacaagcaaaagagcttcatagaggccatctacacgtgttctcttctgggttatcgcgatgctgacaaagtgcacctaccgcaaattagaagagcacaaagatttctgtgggtatgcctgcaaaactctggctgcgaggcatcacctcagctcagtagccttggatttacatgtgcctgcccccctgcccatggttactgagggtggcctgaggatggattcacttcataacccttttccataattatgtgaataacaaatgagctctatccaatagagaaaaagaacacattttaatactttgtgaagtgatcatgaggaaggggacagaggagttgagatggccaagagagatcccgccctctggagatgtaatagaacagtgacagataatgcaaaaaaagatttaatatatttttatatatttaatatttgtcttctgttgttgaccttagcttttgagtcaacagtaactaagaagcattttgtcatccgacggctcctcttcctttggccttctgtattgtattatctgataaggaagcagcgaacttaaagctcagttcaacgcaatgatccttcatcatagctgggtgtgaagaatgttgttccctcaaatatgacacaaattgtttggtcaatagagaagagaactgcattctatttttttccaaacatctgttatactccaaaacctttctccttaggccatggctgtctgaccaacagtaggtggatttctttgaaatcttatcttctgtagaactggatctcatcctggccaacatggtgaacccagtatctactaaaaatacaaaaattagctgggcgtggtggcaggcgcctgtagtctcagctactcgggaggctgaggcaggagaatggcgtgaacccgggaggcggagcttgccaagatggcaccactgcactccagcctggcaacaaagcgagactctgtctcaaaaaaaaaaaaaaaaaaaaaaaaatagatctcactagaagtattctcaattcagcagtagtgtccagttttgaatcaaataatttatattttgattatgtgtattaagaagctaaatctactcatatacaaaaggaaaatctttagcttttcatgtgttctggctaaaggccagaattaaaaggaagaggatgtcttatctatcagacatttttgtgcctttgaagccataaacttgagagaaacattagcttgttcctgaccctgcactcagcataagcatttgcttgtagcagtcactcttgggtgactataaattcacaaagtcaagaatttgcatcctgaattgatttgtgtaagatgtctaggggaatgctgattttatattggaaacaaggttagggggaagcctcaaaactgcctttatggagttctgtatctcagcatattataattcttacttctaccatactccagaggaatcagtctgggtgacttcataaaacagtattagaaaaattgctagcactacgaaatcaagcaggttatggcagtatattccttgtaagaaaattagtgcattaactctttccaataagtgattgaattagttttgcacataatctgatttatgaaatgctgcactcgcatgctcaagtagttagaaagtgtgtcgaagcagatgttgaactgaagaaagaaggttgcttgaaatgtaaaggtattataaaatggctaatctgtgggtatgacccaaagctttcagagatttcctggcttcactttttttttttcaatttaataaattttttttcttaaaaggtaaaattgccaatgagttaaatgttgatgctctgatgttagcaagactgagttcatatgtccatcgcttattaactccattttcttatcaatatgtttggcttctgtaagtcttattttcttgtttgtgaaaggaagatctaataatagaactggccttatagaattgttgtgaggattaaatgtggcaacccatggttattggtttcgtgcgatgcctgtcacaaagaaaaaacccaataagttgtagtggctatttttcatcttctcattatcaccattacttaagagagaggcaaagtgatagtatcatacaaacattttcatggagagttaaatgaacatctgttttttcttttcttcaattttttaaaaattatactttaagtcctgggggacatgtgcagaatatgcaggtttgttacataggtatacacgtgccatggtagtttgctgcactcaccaacctgtcatctacattaggtatttttcctaatgctatccctcccctagcctcccaccccctgacaggccctggtatgtgatgttcccccctccctgtgtccatgcgttctcattgttcaactcccacttatgagtgagaacatacggtgtttggttttctgttcctgtgttagtttgctgaaaatgatggtttccagcttcatccatgtccctgcaaaggatatgaactcatccttttttatggttgcatagtattccatggtgtatacgtgccacattttctttatccagtctatcactgattggcatttggattggttccaagtctttgctgttgtgaatagtgctgcaatagacatacatgtgcatgtgtctttatagcagaatgatttatacatacgtgtgcatgtgtctttatagtagaatgatttataatcctttgggtatacacccagtaatgggattgctggatcaattgtttttaaggacaggttgcataaaactgactaatgccattcatgacagtgagtttcaaaggcagatagctatcttagtccatttagggtgctctaacaaaatgccacaaagttaggtacattataaacaacagaaatgtatttgtcacggatctggaggctggggagtctgagatcaagaccctggcagatgtgatgtctggtgagagcttcttcctggttcatagatggcgacttccagttatgtccttacatggtggaaaggacaaggggtctttctgcgaccagtttttcaagagaattaatcccacttatgaggtctctgccatcatgacctaatcacttccccaaaactccacctcctgataccattacactggtgattagctttcaatatataaatttgggtggcggggtggggcacacacattcagatcatagcaatggcagctaggaggaagtaaattttgaatcctcatttccatgtaaagacttcatttgctttaaacaatttatttaacttttattgtgctttttctgaaaatgaaataacatttagctacacacagggagggtatgttgtttctaaagtaaaaattaactcttttgtaaatgtggcattgtttaataatagttcaccctgtccaatgatacttagcttttttatatatgtaaataaattattaggttactggtttttctttttcttttggtgggtggggggggtgttaagatcttattctcagtcctcaaaactctgttgaacagggaacatctgccctcattttcaaccttatttctttagtaccaattgcagccatgttataatctttgttttcatccaggtaaagctgagggaagggaaggagaatccactgagaaaaagattttccccaaagagtgactcagcctttgaaaagaaaatcagctatatgaaaagggaagagtatttaatcattcggagcaataattgcattgtaaatattagctcagctgataaggagtagagaaccaagagaatgagggagccgttacattgttttatcttgtttgatgcctttactcagtgctctagcatgggggccatgtctagggagggaatccactgcagctacatttaaggtcacctaataaaccgtgctgttttctttcttttcttctagactctattccttcattttttttttctgaactttaagcaaggaaactgccagtcatagagcatttccttatacacttccatgttactgttatgcagagaaatctgactggcaggctgatggccaggctgctctggaggaaagtaattagctatgtgactttatctaggccaaaaaaatgggataaaaaacatgcaaaaccattcacctatacagacctgttctcaaggcagtgtttaccctagtgcatctgctaattcctttcaagtctggaaaactgttttgtttgacatttttggaatgctgtgatctgaaccattagactatttttttctcctttaaggtactaatattctgatttttaaacaattaaatatgctctaaatttgtctcgcccacttctacatcttcttccaacatttacatagacatccatgcacattcatgcacaccacacaactacaagtcatttcagacaaatggtcttatctaattctttttagtgtttccattttattatttgtcaaattgaatggaacttccatgttttgccctgctgacatttaggcagacttgcataaaatacaagattatttctagctggataagaagctcagctatcagatagtgttgctgatttatacagtaggaggaaggagaaaagaccaatgggtgagtataataaatagaaacgtcctgaagcaattcacttgtagcctatccaaatcttgcaaactctgcataaaacatcctcccagttctctttcaatggaacaatttttcttttctttttctactcttcactgaacatttcctgtattctacatgcaacagtgcaccttttacattcgtttggcttatgtgctcttgcaataaccctttgctgtgtggtaatatctcatttgtgggaacttctgtgacactattaggggacagatacaatggctatgtgcctagcaatgccttcaccgtgctctatttaaatagattgctcatttatttgctactttgctcatcaccctgtctctcattcactataatatctttagcaaatcacatagtgccaggtaaataaatggtactcattcaatattgaccatatggatgaatctctgcttatgaaatatgagagccccgtgcagggtcattctgtccaggaactcatcttctctggcggtgtgagaccatatgtttaacatgaccagtaaggaagtagaaggaatcttccactactttttacattcttttttctttcaaaaagttttgtaaacttcaagtatgtaaaaaaacagttcttatatgttcatacagtttgctttcaacaataactccacacatgtgcattgacatgtaaagatgtttccagtataaagtagaaaaaaatgggttttaaacatcatatataaaattaatcaattttttaacatatagcatacctgtattcaggaacatgttctttggttattctcatttaaacagtcccctattgttgaatacttgatctgtttctattgtttcattttatatataatatatcctataccaaatatcctaatataacttctctgtgtgcttgtctaattattttgtttagataaaaggtttcatatggtgtccacttcatgccattatgtgatatgatttgcctctcagcctctaggaatgggtttttctctaaggatagtggctgccactctatctagtggctgaagtaatatggcttcatgtcatgtggctaacgattcatgccaaaggttgtccgcatcttatgtatcagtgagttatctgacacccctaatagacgcttatttcttttttcaaaaagcttgttcctgagctgaatttccatgatcagatggtggcaagagccaagtcttctcacataaagagaaatcacattgaatctgctacctacgaccactggccaaggggtcttgtcatcattgcattctggggaattggattcaatttaaaaagttgaagctgcttgctggcttccttcctggtagttttgaatgtgtaatctcacaaagatcttcttagctctggcaaagctgagcctgtctaaaacatttatgttagaatttacatgagttcatttgtgctggcgtcaaacatttcttgagtatttaccatgttattggctgatcttaaagccaagctacaaaggactagtaggggttagcaggcaggcaggaagaagaagggcatggttggcagagattgccacatgcacagaatatagtggtgaacctacatggtgcatttggaattgcaagtagtctggctttgctggaagtgggtttgcaagctgaggagtaacaagaaataaggccgaatagcataccaggaagtggtagatggcagagacccctggatcaccgtgatacttatgacactacttgctcacttgttttttggtttatttcctgataagctttgagccagaacattaatgcaaattcttgttcttgtgtaaaaattactgcaatgacttcccattgctcttggagaagacaaaatccttaatatggcctacaaggtccagtacaatctgtctcctgcctctgtagtcttattcttcactaggtctgccttcttcctcccagccctactggggcccattctctgggcttcaatattacagaccttactttaatttcactaatgggaaatgttgctgccttccaacaaagggcttttgcatgtgctgtttatatgaaatcctcttttcttcctgccactcttgcctattaatgttcttatttctcagcactcacgttatttttttactcagagaaatcttccctgagttccctgaccatgtcagatttttcacttatatgctgtcataacctcatgcatttctcttttacagtgctataaattgtcagtgacacatttgtgtaattaagtgatgaatgttcctttcttcctaataagtaacatcatctataccatcattattaaatcagccagcatcagctggggtacttatcatatgtcctatactgttctaaacacattatatgtattaattcacttaattctcataacagtccctattaaatggataacactgaggaataaaaaaagtaagtcacccaaagttacacagctgataggtgatgaagttagaattagaaatcaggggggaggagccaagatggctgaacaggaacagctctggtctacagctcccagcgggagcaacgcagaagatgggtgatttctgcatttccatctgaggtaccgagttcatctcactagggagtgcaagacagtgggcgcaggtcactgggtgcatgcaccgtgcgcgagccaaagcagggtgaggaattgcctcactcgggaagcgcaaggggtcagggagttccctttcctagtcaaagaaagtggtgacagacggcacctggaaaattgggtcactcccacctgaatactgtgcttttccgacgggcttaaaaaatggcgcaccaggagattatatccctcacctggctcggagggtcctacgcccacggagtctccctgattgctagcacagcagtctgagatcaaactgcaaggcagcagccagactgggggaggggcgcctgccattgcccaggcttgcttaggtaaacaaagcagccaggaagctccaactgggtggagcccaccacagctcaaggaggcctgcctgcctctgtaggctccacctctgggggcagggcacacacaaacaaaaagacagcagtaacctctgcagacttaagtatccctgtctgacagctttgaagagagcagtggttctcccagcacgcagctggagatctgagaacgggcagactgcctcctcaagtgggtccctgacccctgacccccgagcagcctaactgggaggcaccccccagcaggggcagactgacacctcacatggcagggtactccaacggacctgccgctgagggtcctgtctgttagatggaaaactaacaaacagaaaggacatccacaccaaaaacccatctgtacatcaccatcatcaaagaccaaaagtagataaaaccacaaagatggggaaaatacagagcagaaaaactggaaactcttaaaagcagagcgcctctcctcctccaaaggaatgcagttcctcaccagcaacggaacaaagctggacagagaatgactttgacgagctgagagaagaaagcttcagacaatcaaattactctgagctacgggaggacattcaaaccaaaggcaaagaagttgaaaactttgaaaaaaatttagaagaatgtataactagaataaccaatacagagaagtgcttaaaggagctgatggagctgaaaaccaaggctcgagaactacgtgaagaacgcagaagcctcaggagccgatgcgatcaactggaagaaagggtatcagcaatggaagatgaaatgaatgaaatgaagtgagaagggaagtttagagaaaaaagaataaaaggaaacgagcaaagcctccaagaaatatgggactatgtgaaaagaccaaatctacgtctgattggtgtacctgaaagtgaccgggagaatggaaccaagttggaaaacactctgcaggatattatccaggagaacttccccaatctagcaaggcaggccaacgttcagattcaggaaatacagagaacgccacaaagatactcctcgagaagagcaactccaagacacataattgtcagattcaccaaagttgaaatgaaggaaaaaatgttaagggcagccagagagaaaggtcgggttaccctcaaagggaagcccatcagactaacagcagatctctcagcagaaactctacaagccagaagagagtgggggccaatattcaacattcttaaagaaaagaactttcaacccagaatctcatatccagccaaactaagcttcataagtgaattagaaataaaatactttacagacaagcaaatgctgagagattttgtcaccaccaggcctgccctataagagctcctgaaggaagcgcttaacatggaaaggaacaaccgataccagccgctgcaaaatcatgccaaaaggtaaagaccatcgagactaggaagaaactgcatcaactaacgagcaaaataaccagctaacatcataacgacaggatcacattcacacataacaatattaactttaaatgtaaatggattaaattctccaattaaaagacacagactggcaaattggttaaagagtcaagacccatcagtgtgctgtattcaggaaacccatctcacatgcagagacacacataggctcaaaataaaaggatggaggaagatctaccaagcaaatggaaaacaaaaaaaggcaagggttgcaatcctagtctctgataaaagagactttaaaccaacaaagatcaaaagagacaaagaaggccattacataatggtaaagggatcaattcaacaagaagagctaactatcctaaatatatatgcacccaatacaggagcacccagattcataaagcaagtcctgagtgacctacaaagagacttagactcccacacattaataatgggagattttaacaccccactgttaacattagacagatcaatgagacagaaagtcaacaaggatacccaggaattgaactcagctctgcaccaagcggacctaatagacatctccagaactctccaccccaaatcaacagactatacatttttttcagcaccacaccacacctattccaaaattgaccacatacttggaagtaaagctctcctcagcaaatgtaaaagaacagaaattataacaaactatctctcagaccacagtgcaatcaaactagaactcaggattaagaatctcactcaaagccgctcaactacatggaaactgaacaacctgctcctgaatgactactgggtacataacgaaatgaaggcagaaataaagatgttctttgaaaccaacgagaacaaagacacaacatactagaatctctgggacacattcaaagcagtgtgtagagggaaatttatagcactaaatgcccacaagagaaagcaggaaagatccaaaattgacaccctaacatcacaattaaaagaactagaaaagcaagagcaaacacattcaaaagctaccagaaggcaagaaataactaaaatcagagcagaactgaaggaaatagagacacaaaaaacccttcaaaaaattaatgaatccaggagctggttttttgaaaggatcaacaaaattgatagaccactagcaagactaataaagagaaaaagagagaagaatcaaatagatgcaataaaaaatgataaagaagatatcaccaccgatcccacagaaatacaaactaccatcagagaatactacaaacacctctactcaaataaactagaaaatctagaagaaatggataaattccttgaaacatacactctcccaagactaaaccaggaagaaattgagtctctgaatagacgaataagaggagctgaaattgtggcaataatcaatagcttgccaaccaaaaagagtccaggaccagatggattcacagccgaattctaccagaggtacaaggaggaactggtaccattccttctgaaactattccaatcaatagaaaaagagggaatcctccctaactcattatatgaggacagcatcatcctgataccaaagccgggcagagacacaaccaaaaaagagaattttagaccagtatccttgatgaacattgatgcaagaatcctcagtaaaatactggcaaaccgactccagcagcacatcaaaaagcttatccaccatgatcaagtgggcttcatccctgggatgcaaggctggttcaatatacgcaaatcaatcaatgtaatccagcatataaacagaaccaaagacaaaaaccacatgattatctcaatagatgcagaaaaggcctttgacaaaattcaacagcccttcatgctaaaaactctcaataaattaggtattgatgggacgtatctcaaaataataagagctatctatgacaaacccacagccaatatcatactgaatgggcaaaaactggaagcattccctttgaaaactggcacaagacagggatgccctctctcaccactcctattcaacatagtgttggaagttctggccagggcaattaggcaggagaaggaaataaagggtattcaattaggaaaagaggaagtcaaattgtccctgtttgcagatgacatgattgtatatctagaaaaccccattgtctcagcccaaaatctccttcagctgataagcaacttcagcaaagtctcaggatacaaaatcaatgtacaaaaatcacaagcattcttatacaccaacaacagacaaacagagagccaaatcatgagtgaactcccagtcacaattgcttcaaagagaataaaatacctaggaatccaccttacaagggatgtgaaggacctcttcaaggagaactacaaaccactgctcaagggaataaaagaggatacaaacaaatggaagaacattccatgctcatgggtaggaagaatcaatatcatgaaaatggccatactgcccaaggtaatttacagattcaatgccatccccatcaagttaccaatgactttcttcacagaattggaaaaaactactttaaagttcatatggaaccaaaaaagagcccgcatcaccaagtcaatcctaagccaaaagaacaaagctggaggcatcacactacctgacttcaaactatactacaaggctacagtaagcaaaacagcatggtactggtaccaaaacagagatatagatcaatggaacagaacagagccctcagaaataatgccgcatatctacaactacctgatctttgacaaacctgagaaaaacaagtaatggggaaaggattccctatttaataaatggtgctgggaaaactggctagccatatgtagaaagctcaaactggatcccttccttacaccttatacaaaaatcaattcaatatggattagagtcttaaacgttagacctaaaaccataaaaaccctggaagaaaacctaggcattaccattcaggacataggcatgggcaaggacttcatgtctaaaacaccaaaagcaatggcaaccaaagccaaaattgacaaatgggatctaattaaactaaagagcttctgcacagcagaagaaactaccatcagagtgaacaggcaacctacaaaatgggagaaaattttcacaacctacttatctgacaaagggctaatatccagaatctacaatgaactcaaacaaatttacaagaaaaaaacatacaaccccatcaaaaagtgggcaaaggatatgaacagacacttctcaaaagaagacatttatgcagccaaaaaacacatgaaaaaatgctcaccatcactggccatcagagaaatgcaaatcaaaaccacaatgagataccatctcataccagttagaatggcaatcattaaaaagtcaggaaacaacaggtgctggagaagatgtggagaaataggaacacttttacactgttggtgggactgtaaactagttcaaccattgtggaagtcagtgtggcgattcctcagggatcaagaactagaaataccatttgacccagccatcccattactgggtatatacccaaaggactataaatcatgctgctataaagacacatgcacacgtatgtttattgcggcattattcacaacagcaaagacttggaaccaacccaaatgtccaccaatgatcgaccagattaagaaaatgtggcacatatacaccatggaatactatgcagccataaaaaaggatgagttcatgtcctttgtaggcacatggatgaaattggaaatcatcattctcagtaaactatcgcaagaacaaacaaccaaacaccgcatattctcactcataggtgggaattgaacaatgagaacacatggacacaggaaggggaacatcacactctggggactgttttggggtggggggaggggggagggatagcattgggatatatacctaatgctagacgatgagttagtgggcacagcacaccagcatggcacatgtatacatacgtaactaacctgcacaatgtgcacatgtaccctaaaacttagagtataataatgataaataaaataaaaataaataaaaataaaaaataaaaataaaaatacaaaaaaaaaaaaagaaatcaggcagactggatctggaatctgttctcttaacctctctctctgctcaccggtaggttatagacctaacataaagtagttgctcaataaatatttgttgaaagtataaatgaataaactaattaataaatactttatatgtgtcccactcttaactggggaaaattgggtgggtagatacaaaagaaccctagtagactgttcgctggcaggaatgtgttctagaggattggggaaagagaaacccccgaataactgtacgtgatttatgatgaaaatctttcaagtagtggaaagttataaaatgctaaccaaaagattagttatttggtttatatgttgatcactgtgatctttcccaatattgactggggtttgttgagtgtctgtaatcccacaggtggatgttcatgatctgaagtgacaatggtatatttgctcagcatttcctgtacctgaaacaacccttgaaaactgaaatagaaagagcaagtcaatggtaatatcatccagcactctgccaggcttatggcgaccttgcttacccgaaagcaaattacttccctctcatttctatataataagtactttacggctttgtgttttcatgcattgagatttccctaggagtctgagaagatgtccaggaataaaagagggaagaacaatgattaaactatttctaggactttagacattggattatattcagaaacccataatcagaccgttaatgaatgtcttcgcattcattatcagactctgaaaaagcatatccagtctctccatggactggccttcacatatgctttgctatctggtagaaatatctgcccaaaagattattttttatggaaataatagtgcacatgcagattctagatattattttctatttatcaactgcattcaggcagtgctaagtagatgactgatgctgaaattttactagatgatctttgctctctattttgttatatgacacatggggcaaatacgtgagatgagcaattagtgaaattctggaagggacagatttatgtcatactattgaaagggacaggaagtggattaagtatgatatatatatagtatgtgtgtgtgtgtaggtgtgtgtgtgtacgtataacaagttagtttccttttcctaccactgaaattgttaaatggaatggtgacgtagacactttacttctctactcctggacttactagtaaagaagaaatatataaaagagcaagatagtattgatctggggtggtactatggtatgtattaataccataccgtaattctatgatctattaatgtcacaaccagctacatttagctggcttttatatacgaatgtgcatagtactgttttgtattaaatatcaccagaagatatttgtcacataaaaacagtgagattaatgtttatatattttggcactcatgctagagttgaatgaggttctgtctgtggggataattctaggtatcctggaaaacctccacatatacaccaaacccagaatcaattcagataggcattactgttcgcagtcatctaatttcaagttagggtagtaggatatggattggggggcgtgattcttagtgccagagaaagattaaattattcatagggaaagatattcagcctaagatggataagactgaaatcaggtgcctggactctagaggattgggctctaaccgaaaaaaaaaaaaaaaaaaaaggagaatccagtaggaattcattgagtaagccaaggttacaatctgctggacttcagaggtagagttctagatgcccattttaccaccctaggtcagaagtggggagcagagagacagaaggctataagtgaggagacagtactgagacactaagtagacattctagccaactctgtagaggattctcatgttatgagctgaagtagaaaggctatgtttgaagattctgtctgattttgggcatcttggttctagatctatcataggtgcagattaaattgtttccaggctgtacttgatagttggtaaggatcaaacaataccctcacataacttgtcctagaactggttgtgctatggcatcattgtagtcccacatcctagcatggagcctaaaaaaaagtaggttcttcataaatagccaaggaatgaattaatgagtgatgggatgagtgtgagtggagaaataagcaaaattcctagaaatatggggtgggagtatggcagacaaacgttggcatcatccttcaaggaccagatcaaaatgccacatttccactacagctttctctgagttaattacttctctccactgttactatggtgatgtatttattctgctttaatagcatttatcaatcattttgtggttatattttatgatttctctcttcctcctagactatgaaatccttgactgtagaattgttggtttgtacctacattactgcagatagtatctggcaagggctgggctctcaataaatattgaccaaattgaggctgtaaagattccaatggaccaatatggcttgtgacccatgcttcatttacctaaatgaggccacaaggctctgtgatcacgtggcagtcaaataacaaaactctccaaaatcaggatttcttcttccattccttcaggttccctcccccatgggcatggttatctcatcctttacctcctggaaattatatattggaggttgtcagtgtgtgctgttctgtattgccctatagttaatgcacttctctgacgtagaggactgagctctctatagaactatgcagtgtcaaggaccctctgccttgacatagatgcttggaccacactgttaggtaactgagaagacaaagaatgtggctagaggctaaaagggacagagcaggaaaagcatgaagggcatgaaggaaggagcttgaatttttttcccaatgtactggggagcccaggagtggcatcactttgtactccagcagtgacattttaatttacaagccaagaatgcactgatcgccaactgcaaaaattgatttggttgttcatctgattcaacccatgtcagagtttgaaagtaattatgatagtggggctgataggcaggcaattacatttttgttctcttgctttctggctccttctccctctctttcccttcccacacctccacctgcaaggttgttcttgtcaggaaggcaatgtaagcaggagacgagagagtaatctttggagatgtggtatatggactcttgtggcagaggctataataaataatagtatggctggttctttatcctaatttttgttagcctcttatgaactctaaccagataaaagatgcaaactattttgtctccttctttaaagtacaaaatagaaaaagcacatgtactgtaaggcagtttctgtttctgatttaaatttgagttgtctttgcaacatctatagattcggtgtctttctaaaaaggtttgctccaaatcataatacaaaaggaacctgggatagggagagatttaggcaaagctaaaatccatctgagttggggagcagattccatgggagactgaaaatgtgtttcaaactgtagtgcaagaaattgaacaaagtattggaatttttctaaaaaaaaaaaaaggttcctttgctgaaagtagtacctggcatgtaaacctaaagtaatatagaagatgaagtggaaaagtatatcacaaggcaaaaattactttttagactgatgaagagatggatggatggatgtgaattttttttatctatttcttattttgaaggttatttatttattcacaaacactggaaaattcagtgtttttcactgagcaaaatagcttgtctggtccaaagccagtaaaataagaattttgtgggtggggtatctactccattagtatagcaaatgttgagatatataaattattttaatatatttattttattgacaatataaaaaaaaatttaacaggctccacaccaaggtcaatagaattcagaagcacatctgtcctcccaggaaacttgtggtttaactatttactatagctacctcaagattttacagaaaaaaaaaaaaatgagaccttctcttgaaaactaccatatcccagatctaggcttttctatgcactgtaacttctctataaacctcctttctactgactgccccacttcaatttggcacatacaccctttaaccagtaagcatgtgcatgtagtcagtgtgtcagacaggtttggctgaattgatataagactggtagcataggctgggcgtggtggctcacgcctgtaatcccaacactttgggaggccgaggcaggtggatcacgaggtcaggagtttgagaccagcccggccagcatggtgaaaccctgtctctactaaaaatacaaaaaattcactgggcatggtggtgcgcgcctgtaatcccaactactcaggaggctgaggcaggagaatcacttgaacccaggaggcggaggttgcagtgagctgagatcatgccactgcactccagcctgggcaatagagtgagactctgtctcaaaacaaaaaaacaaaacaaaacaaaacaaaaaaagatgagcagcatggaacatgatgttggcatgaggccctactacccggcagcagactatcagggaataaactagataaacctggaaaatgttttaacttcagtttattttattcacattaagtaatggagtagcatgttgtttgtttgtttgtttgttttacctctaaacctcctgtatagcccccttttaaaagaagggcaggggaagaggcttaaaatatggtagtattgactcccaggcctgttcagtctatacgaattttcaggctgtatagtttaaaaaaaacattgttcaatttcttatacgtttttactagtgatattactttagaaatgggcctcgaaagactcaggttacttttagatttgttcagggtttaaagcttcttttaggcacttcttgggcttcttctacctttcactgtaatatagtggtgaagagaaagactttggaatctgatagatttgggtcagaattgtagttttgccactcattacctttgggtaaccaagctctgtgaacctcagtctcttctgcaaaacagaaatggtgacatatttcctaagtctcttggcaggattaaatggaatacagtgcacaaaatactcagcacagtgcttggcacatagtaaatgccgaattaatggcaatgaattgttgttgttgttgttttctttttgagacagagttttgcttttgttgcccaggctagagtgcaatggctcaatcttggctcaccgcaacctctacctcctgggttcaagtgattctcctgcctcagcctctcgagtagctgggattacaaacatgggccacccatgcccggcttttttgtatttttagtagagacagggtttctccatgttggtcaggctggtctcgaactcccgacctcaggtgatccgcccacctcggcctcccaaagtgctgggattacaggcgtgagccaccatgcccggccaatcaattgttattgatttattactgagattgctttaaataaattcatccttatttctgttgtagtctttaccttgtctccagatctttggaagtctcaggttcatttgtctggactttgggggttttgtttaaaactgcctagtctctgcagccacatcctccaccactgtagcacatgatcaaaaaacttttctctgaggatactgagtatttcttagacctatgtcactagctccctgggaactctctctacccccatcccatcaactctctgaccacaagttttcaaggaatcttcctcattatactcatctatcattcttgcagttttctgtctcatcttgagctgttggtcaagagtagaccagagtatccatttctcaactcatttcttaataaggcaacaccatgttcaatgggcattcattgggccagttgaggctcctctgtaattttattttattttttgagacagagtcttgctctgttgtccaggctggagtgcagtggtgcaatctcagcttacagcaacttccgcctcctaggctcaagcaattctcctgcctcagcctcccaaagttctgggattacatgtgtgagccaccacgcccacccttctctataatttaaatgttatctctctttataacattttcataagaggatccacaattctattttcccattcacttataaagaacaaaaatatatccctaaggttccacaagtacctctggcctttggggaaaaaaaaaaaattcacagatgcttttttgaggaggtaattatttgtttgttgtgtccttgctattcattttgagatagatactcaagctctacacctcttagcttatataccagtttcaaatttatgtctttattatttattataaaatcttttaccagctgggcatggtggctcatgcctgtaatcccagcactttgagaggccgaggcaggcagatcacaaggtcaggagatcgagaccatcctggctaacacagtgaaacccggtctctactaaaaatacaaaaaaaaaacaaaattagccaggcgtggtggtgggtgcctgtaatcccagctacttaggaggctgaggcaggagaatggtgtgaacccgggaggcggagcttgcagtgagtcgagactgcgccactgcactccagcctgggcgacagagcgagactctgtccctaaataaataaataaataatctttaccttgaatattgagatgggttcaatacaatctcaatttagaatacttaaaagatgaaaagttccataaaataaattttctaatcaacagaaaacattttgttaagatgttgctgatgcaaataattctagcatgtatcactgttagttttctatctttgaaaactatcattcaactaccatcgtagttactagacttccattcaggatcttgcatgcctaagagtcatttcactgccaaaaatgaggaaatatagaaaactgagctgtgtttttatcatctaccatttcaaaaaaccctgtggaaaaaatatttcttttagcaaatctcagacattatcttgacttatatgtaagatgtacctctctctttaaatccaagtgcattgaaacttctggctcataaggtaatttttttttttaaataattaactaaacccttaaaactacatagaagtctactttgttttataaattaaccccattattttaggaattaatatagctttgtcttgtgagatgctgaagttatttttcctggttcttaatattcagtctttccgcttatctatttaattcctgatcactagccaaactatatactacagtttggttcatccaatttaaatagctggcctgtaactaagaaaagaaaaatatattttgtgaagaataggtatgaggtagagaaattagtggtagtatgatacgggaaaagagtaatgtcaaaatgcatggtaatttatgtgatatgccgaggactgcaagaagtcaagaaagaaacataacaagctaacagctgtcaccaacaaatagcaattaatttcagcattcattcccttgctcatgcttcatgaaagtatataggtaaacaggattcgtatcatgttctattttcttctctgggcctcaggcttccagccctctgagctactgtcttataacattctgaggatgtaagaaagaacttgatcctgttttctttttcagtctggagcagagacacggtgaagttcagtaaggtctgacacccattagcattttgtgtgactcaggatacgaatcaaacctactgttgtggaagcagctttccatataaatctaattcccaccaactcctgccaccaccaaagctaatagtcaagtgcttgtattgctgatagcaaaggtccaagattattcttattgttttactggggctacttatcaaaatctatttacttgtctattctatggatggggaggtggtaaagaaaaggcttaagtgtcctacagagattcattctatgctgcctcaaatgctttgaagcagtacaatttctcttttaactgcctcgatgtaggtgaagagtcttgcaggatatgttcactgctgaagagcaagcctgcctcattcataaccactagtagctgacaacctttggattctttccacagcttgaaaattcctccattccttgaaagcaccctgcactaatgctcgaagtattaagtgtgtttttatttcctagaaggatgcattttacacaagtcacttaaaagcttctggaagctttaattacaggttgactaatatttagaagaattgaaatacccctctctctcctctgtggtatgcatgagccagattctggttcattaaccagaagtctattacttttcccctatagtttcatggagtaaaatggtagatgcaaaccaagagaggtcaagggacctgagcttggttctgtctttgtcacaactaagagtctgaccttggatgagtcatggtaagactctgtgtcatatataaagagtattctgagagtaaaacacgcatacaaatgaaaagtatggttattatggtctcttgaatattcttagatcaatttcacccattggatggggctagtatatggttgatggatggtatttgtttcatttatctggcatgcatttaaatcttcaggtgcattaaacgaacaacacaaatttggtatatgattttcatgctctcttgcatgatagatataaaatcttaatcagtgattgtctggaaaccacagtctccaaaatgctgcctaggagtgctaaagagctgtcagatctaacttatatgagttgacaacatagagaagagaaagaagttgaattcagttaaacctggaaggagaaacccatagggtggaattatctgaatttgaatttttctgagttttattcccccctacattatgacacactaataagtggtctaccttgacccagagatacgaattttggcctcatttgtagaatagcacctggattcaggaataactccttgaagtgtcccccttaaatctctatgtggcattcaatgttcacttactcatagaccaaggagataaggacatttatcttctcaggtaaggtccctctgttgaacactgaaacaaaggggttacattaccactgcctatctttcagaaaaatgactgctgtgatagcataaatgtcccgagagctttgctttgatagaagtgtgtttttaatgatatgattttggtgtctggccctctgtggatagcttggcatgtgtcttgttctatttaaacagcactgactgataaagtggacgttaattggcagttagtgacgaggctgcaggtctttgttacccagcctttcagctaactgatcattaactaggaggaaatgtgtgacccagaaggtcattactgttattacgtgggaaaatacatttaaatgttacagattgcttttttatgaatcaggtgagcatttttagaaaagagagagcttgatttacaatggagtctgttttcagtcctgctcttttcctgtccctttgaagactaaacggtatatttctagattcccattgctgtattgcctagaacctcacaatgttgatattgactaaaaaacagaaatttcttcaactccattaagagcttttccaaaatcttaaaatttccaaataaaatcctttcgtctggatgccactcactttaacaagctttgagtaactttttttaatgaaaatgtgatagaaagtaatgtaactgcatatgttttattatgtaaaattctgatagtatcatgtatgtctttagaatttccgttgtcacacattgtctgtgctttgtaggattttgcagattaagccttagcactcattttgtgaggacagtgaatcctaattcctcttcttcattctttctgtgacctttttgattttgcctctttagtaatctcctcactgcccttgtaatgcaaaaaataagaataaaaatggtctgtttgggtgctgtgagtcttggcaattaaaacttcacatgaaatttgtctcctgagagaaaatattattctcccttttaataaaaggatacaattaaatactccctgaaacctctctccttcaaatatattgtcttatgtaaaagatggaaatggagccttgtttagctgaaaaactgaagagccaaaaacatttctaactataaattagtttatgcatattaaatatcccagccttagctctaataaaaacaaaaaaaatgtgaagcatggtgtgctctgtggttattaacctgttgttgaaaccctgacttcagttctaggcccttagcatgattacttctttccttctttgggttgcatgatgcttcaaggtctagaaatgccaatgtctttcccaaggggttttaccttttacctctgaagattgaagaaagcaactgagttgttcagaaatctctttaaattagatttaaaaggtactgggtttatttttgcatgtcttctttattttttcctccaaagattaagattgtattttagaaggctcttttggctcctttaaaaagaaagtttatccttgtatcatataggactgaaggagataggctgcagtttgaaggcaagagcatctgatctccaaagaatcagaaaatctcttcttttgttgcatttgtaggtactttttgttgtgttgcttttttttttttttttttttttttaatacaggtaaagttcaaacgagcacagcatggtccaaatggtgtttaaagctgtctaagtttcctttatgtaactttcacttcaacaagtatgttccagctgggagtctatcgggctgttaaaattaactttattcttcttttgttattctcatgcacacacacatacacacatgcctacatgcacatgtgcacacagacacacaggtgtgaacatgaccatttaatcacatccagcagggctgaatgtcactctgcggggctttattgactgttgtacaggctaaacatttcattcagttgcaagacagaaaaactctgcaggatgaatttcaaaacagagagcagaattgttacccacagataagaattctttgtaaggctttcaccttctcataaaagtgttagttaagaagaggtgaaaacaggtattccattcatctctgaagtgtatgcagtaatggcctcattcggctgagatttcccagcagcaaaaaatgtgcttggcagaacagttgctctaaatacctgggacatacattctttctaggattaaacaaataatacttgctgccctttgtataaaaagatcacttttctggtgcaccattagtgtacatttgatttgatttgtttgttaagcagcaaaggtgggtttccctggagccacttacacctcctctcggtcctctttgcctctggctgtatatgcatgttcattctaccacctgatgacttcatgcttactctgtgttctaactaaatcgaatgagtctcttattcccattccttcctttttactttcctgcctctaggcattaatttgtgccatttacctggactatctgctcccacctttgactattaatatcctatttattattctatcaaagccaaagaccatcatccccatgaattcctctgacatcccactcagaatctatctctctttcctcagagcacagttttttttctttttactatcatttaaggacagttaggccaaacacttacctacttaattataagcttcttgaggatttgggccacttcatatggcttttggttttccccaaagcattagctccaaaaagaaaggttgaatgaatgattggtgagtcatcaaccttggcatagttgggactaccctttgagaccactaaccagaatttttctcaatgaaatgaaatttattccccgacaaattgactgcaccatgttagtctccttaacatcatctgctgaaccatctcttaagaaacactttgatactagatggtaaataaccactgtgtcaagacctccaagtgccctttacctccaggtcacctgtgttcctgcagcaagacacacctctgtccccaccatgaggcagaatgaggcttgggacagataagacttccagaacccagctccagcactgtggccactgtctgattaatcagttcttcttctgcactgataattaaatactcactgttaaattttatattacccttgctagtatcattgttataaccaatgtgacagccacaaaagagaattaaagctatagactgtttatggactgtcttcacttcagcacagcagggaagaaaccagggatctgaataagtactagggatccttgctcattttcccaatttggctacaaaagttaatgaaattggggccaacgcttaaaatgcagatattgttatggatacattttatgatataaatagagatacacttgtttcatggaggggtaactagggacttagatttcatttggacctatgtgtgccgagcaattggaagcatattaaaactgttttatgtgtaagcatttattgcttttgcctataagatgttgcttatgtgggaaattaagagtccagtccaatgtattcctgggtatacagcttatgaaggcatttaaaacctaaagcatatttattctgcatttaaaagtgtttagagactgccttgtgtgttaatgtgtgctgtgcgactagcactatttaaatcctatccccctgcatgcattaatgtgtgcgtcgaagggaagaagagcaagggatgataaactctgttaactgcccaatgttcaactaagatttatgtaagaaagaacagtctagtgcattaatgtgaatattctaagatagatgtttatcttaatggactcagaggtacttacaaacagcataattgctgaagtcattttacagggcatttattcagagtgattacactactcttacttttctttacataaagaattccacttaagggtttaagtgagacaggctagtgtggccaaagaatcataggttcctcctatctgctgctcagcgctaaggctatttgaaaggaggagaagcaaaaccccaaatctccattttggcactttgcaagaaattggtccaaatgttcaatcactccagttttcagatctacatgatatttgacttactttaaacctatagtcctgcaaataagaaatttatctctctggtacatggttgtagaattcaaacattagttgtttatggacttttatggaccactgaggcattttctgtcttgaaagcaaatgtactcttccagagaaactcctgttctttttttaaagttttatttttaactgacaaattaataattgtatatataggtacgacgtgatgtttcaatgtctatattcattgtggaatgatcaacccaggataattaacatactcatcacctcaaattctttgtagcaagaacatttacaatttattcttttacatgaatgaattttaaaatatataattttgaaataggcaattcattattaactctagtcaccatgctgtgtaatagatcagaatctacttctcctgtctgaaactttgtagtcttcaaccaacatctcctcattccccattgacctttcctttctcagcctctgataaccaccactctactctctatttctgtgagtttgactttttagatttctacatacaggtgagatcatacgggatttgtctctctgtgcctggcttatttcacttagcataatgtcctttagctccatccacattgttccaagtagcagaatttcctgctttttaaaggctgaatattattccattgtgtgtgtgtatatatatatcacatttaaaaaattttattcatccattaatggaaaaccttcattcttgaaaaaatagcttataaagctatttatgtccctgatacctccaaagatcagaatgagtaataatctcacaaggatgggaaatacttcctctcttccaccttttgcatgtccatcctttgaacatgactcctggtgtgttagtctagtctgttctcatgctgctaataaagacatacctgagactggctaatttataaaggaaagaggtttaatggacttcacagctccacatgactgggggggcctcacaatcatggtggaagacagaagaagagcaaaggcacatcttacatggtggcaggcaagggagcatgttcaggggaactcccctttataaaaccatccgatctcatgaaacttattcactaccacaagaacagcatgggaaaaacccacccccatgattcaattacttcccaccgggttccctcccatgacacgtggggattatcgcaattcaaggtgagatttgggcaggacacagagccaaaccatatcacccgtcttacccaattctgttgaaataaacagacatttcctgagtacctgctatccattcaagttttttctatgagctaggctctggtccaggagtatagtaaccctacgggtgatttcagaccaataataagtaacactattaagaacacatcacagaagagtaacatctctgactcgctgatatccatttcaaaccacataacaatagcatgaagtagatgtcactgactcaaattaacagaagagaaaactagggtgcagtgtttgtgattaccttggactctcaccataatagactgagctcatgttttctgactcaaaacacaaaacttttcccttgatatagttgcctctagaagaagtcccttgtctccctcaaatagcaatcaagtagaagggaaaatagtgtaagtcaatatatattaagtactttcagtgtgattccaagaaactattgagttgcgatgctaaagggagcattttatttttcagccttgggatcagaaaaacattacataaagaagtgtttgggttggaccttaaaaaaaggtataccatttcagcaggtataaatggaatgaaatgcaaatagagttgggtaaggagcagtataagccaaaacataaagttatgaacttaatacccttgttcagagaattgaaaacatttaatagtcagtatgtggaggcatttatagggacaaatggtaatggaagatgatactacaaaattacactggagtccagaggtggaggatcttgaattttaattttttttaagtctagacttttgatagtgagataaatttgaaccaacagagtgaaacatgaaaactatatttttatcctggaagtactttctagagttcattaacaggaggaggtaagggtagacagggagtctgggtagggaattttaggattcatccacataagcaaccagggaagtaggaatgaaaactggagtaacattttagagatggctttgcaggacttggtgcctggaggtgtgacggggagcaggaaggatttgttacaggaaagaggtcccgacttagaccccaagagagggttcttggatctcacgcaagaaagaattcagggtgagttcacagggtacagtgaaagcaagtttcttaagaaagtaaaggaataaaagattggctacttcatagacagagcatccccaagggctgctagttgctcatttgtatggttcttgatgatatgctaaacaaggggtggattactcatgcctcccctttttagaccttatagggtaactactcttgtcccttgatgatatgctaaacaggccatggcatttgtgaactgttatgtcgctaatgagagtgtagcagtgaggatgaccagaggtcactctcatcgccatcttggttttgatagattttggctagcttctttactgcaacccgctttatcagcagggtctttatgacctgcatcttgtgctgacctcctatctcatcctgtgactcagaataccttaactatctgggaatgcagcccagtaggtctcagcctcattttacccagctcctattcaagatggagttgctctggttcaagcacctctgacagatttaaagatgaccctgagagtttgggcttgttcctagagagtaaggacaccatagacagaggccaggaaggcagcagagggaggagttaatcaattcagtctgggatatgctgactgctcatgtttccaagatatttaatcaaaaatattgtcccttatgtgttagtctatgttctattactataaaataaacttctgagactaaataatttatagagaaaagaggtttatttggctcacagtctgtaggctgtacaagcagtgccagcatctgcttggcttctggtaaggcctcaagaagctttcactcatggtgaatggcaaacagggagcaggcatgtcacatggtgagagagggagagagggagcaagggagacaggaggaggaggcgccacccttttttttattatttaattttttgagagggtggcacgatcatggctcactggagcctcaacctcccatgctcgagcaatcctgctgccttagcttcctgagtggctgggactacgggcctgcaccaccacacctaatgtttaatttttttttaattttttgttgagatgggatttcattattttccccaggctggtctcaaacttctgagttcaagtaatcctccctccttcatccccaaaagttctgtaattacaggcgtgggccactgtgtctggcccaggctctttttttttttttttttttttttgagacagagtctcgctctgtcacctaggctagagtgcagtggtgtgatctcagctcactgcaacctccgcctcccaggttcaagcgattctcctgcctcagccacccgagtatctgggattatagatgcatgccaccacacctggctaatttttgtgtttttagtagaggcagggtttcaccatcttggccaggtgggtcttgaactcctgacctcatgatccacccgccttggcctcccgatcttgtgatccacccgccttgacctcccaaagtgctgggattacaggcatgagccacctcacccggtccagctcagactcttttaaacaaccagatctcatgtgaactcattactatggggagggcaccaagccattcatgagggatccacccctctgagccaaacacctcccaccagccccacctccaacattagggattatatttcaatatgagatttggaggggacacacatccaagctgtggtgggcattgtaatcacggtggagctttcctcatcaggctgatacccaagtcccacccctgggtattgctagaatgtcacctggtgactaatgagtgccaaaggaggagaccaatcccgtggcgcccttgcatcctctctgcttgtggttgctctctctgtattgttctctctgttatgattggctctaacttccattaagagaaaacttgacctgcagtgactgaagacaggatacattttcttaaacaagaattccgaagtttagagaacataaaactgcttaatttggctcctataataggagccaaatttttattttataataaataattataataataattatatattgtaataattataattaattatatattgtaattataattaattatatattataataattataattaattatatataataaattattttattctaatttattttataattgtcaagtttaatatttgacaatatctgagtcagcttcccagttcttttcttggctttccccccaacttgccaccttatgggcacaagctgattgctgcagctccacatgtcccgtgcaaacccaaggaagaagggaaagcagtcagaccagccaagtctttttcgttttatcaagaatagaacaagcatttctagagcctctagaggatttccttgtttagctctttgtccagagctaccacatggccacttttagttgcaaaggaggcttggttaggccggtcacattgccagctctcgcaaggaggaagaggggaatggatattgacaatgtctgcaatagtcatcttccctgctacgctgaaagcactttaaaggcaaggaccaagctccgtcaggccatacttatgtccgtgctatgccacacttctcacctggcactttgctggacatatgaagacctgagatgagaagggtttgaggagacacttcctgcccactgtgctaagcactttcttgtgtcttttgggttctctgagcagctgtaggagtatagaagcctccagatatacgttaaactctttttcagcacctctcaaaacagaaaaaaaaagcaagaaaaagactacaagctgggaggaaatctatgctgctgtaaaaatagaatagggctggagtgcattcttcagtaatgaatgcatgaaaagcagcctcttcaattataaatgtggcttctcttgtttgttgcccagtaattctgttttattgatttctgtttacttccaatcacctcaaatgagactgtgttgcttagagatcttgatccctaaaagtttgtcattaaagctactctgctgtatttagttattttttgctcaaagcatttgaatcaatatgtatacaaacgaaacactttttcctttgctccctagaagactacaagaaaaaagaatctagaaaaactaaataaagatgcttagatttttttaaaaaaagtcccagcaaatgacatattgatttctttcaaagaggcagagtgtaaattaaaaatatttttctgacacagtttttaaagatgccactgactcagcagagtttgtgcttattgactttctcttcctagagggccagggtggaaaggccgcccacttttcctaagatcagctggctttcaaaatcctttgagggaagttagccttaaagccaatgcgagcaaaggttcttgattccctgtgatcaggtctgagttccggttttgtcatctaccacatcacttctgtgtataaaaaggtgttgtaatttttttttccagaaaattatatggtcatcattctttttcaaagtggttgcattaaaacccagaattctcagaggtggaaataaacaaaagctgcgcccttattagagaatactctctggaatgttattaaatgggtctgggcagatagagaggggagttagagtgggagcatgtgcattaaaagagccacaccaatacaggaatactagtgctgtttcctcctggtacctttgagagaataaagctagtttagacccacagtcggccgggcgcggtggctcaagcctgtaatcccagcactttgggaggccgaggcgggcggatcacgaggtcaggagatcgagaccatcctggctaacccggtgaaacaccatctctactaaaaatacaaaaaaaaatcagccgggcgccccagctattcgggagcctgaggcaggagaatggcgtgaacccgggaggcggagcttgcagtgagccgagatcaagccactgctctccagcctgggcgacagagcgagactccgtctcaaaaaaacaaaaacaaaaacaaaaacaaagacccacagtcatgaggctaggagggaagcacgagggacctggtttcaggaacataatctatttgtcataatttgagtttctgaaaccatgtcacactcctttggcctgttcaaaatcatttttcagaactgttctcagggttagctatataatttgtggaaaccaatgcaaaataaaactaagggcccccttgcccaaaaatccagaaaaaaaagtgttaaaagtgctagaatagaatttcttttctctttcttcaatagtctatttgttatgttttttatttgctattgaatgacatttaagtaaataaaaatgtaaattagcatgaatattaccattcgtccttatattgtgtgcaatgccagttttaaatccagatataagagcattcagctcaaatgcagaatcattgaaataacacaatttgtatgtcatagcccatatatgcatgtgtcttttgttcttattggaagagtggaaatgccatccaaaagtaacttactgctttttgtttcacttcttgatgcatgcacattctaccaacgctttttaacttcagcctaccgatgcatcaggtagaaccaaaaacaagaggtctcttgccctgtgcaagccaagcctttctgattagcaatcctagagagaacaggtggctcacgcctgtaatcccagcactttgggaggatgaggcaggtgaattacgaggtcaggagtttgagaccagcctagccaacatggtgaaaccccgtctctacaaaaaatacaaaaaattagcagggcgtggtggcaggcacctgtaatcccagctacttgggaggctgaggcagaagaattgcttgaacctgggaggcggaggttgcagtgagccaagatggtaccgctgcactccagcctgggcgacagagtgagactctgtctcaaaaacaaaaacaaacaaacaaacaaaaaaacaaaaaaaaaacaagaagaggtctccgggttgccctatctttccctttcatgtcatcgtctttactgtaaatggttggttgatacagagacttaagaaaggatgtgataggttctcctgaatgccattgccttctctctgtcttctaagcaacttctggttcaaagggagagcatgagctcctggggatgtcagtgttcctactcagcctgtagatataacatccttacctattatacagaggacacgatatagaatccggagagaggaaaagcaaaggaggccagctttggcctgagaacttaccctagtcactcttgcctagaagacagtaccaacctcccaaggagaaacattgggggataaattcaaataaagctgtttgattcagattactcctatatgtaagtgaatccacaggatcctgtgccattggggcatcaggaacactatatgaggatgagcagcaaggaatggaagtggacacacacattgcatgtatctcctctgcttgctttcatgccgcactgttccactgaacttcacttacaaaacacaagtgcaaagataaatgattaggaatttcaagatggtaagagcagagcatacaacctaacaaagggtctttgtgagcaaaaaaccctgtggatgacctcatggatctcatgcctgtgattacacctgctacatttccaacacccattttgacagcaaatgagtgttgctgtttatgaactggaacggggaaaattattagcctcactgtctatcagaaatgagaaacaattcatctcatctctttccacatagaagttctgttgtgtttgcttttgtaaattattttgaatcaatatctaagatgggtttatctatttactactaattgcagcctgggaataaggatgtgacttctggggttgagtgggcccatctgggtttctgaacttctcaatttaatagcacctgaagacattccctacctagagattttttatataaatcatagagctttatgggaacccatcctcccacatttctctgtgggaggttggtatttccttctaggcatgaatagggataaattctcaatcgaaagctgacctcctctgcatttttcctctactgggacttcataccatgttctcaaattgactctcatttttccttcatagttctgtctcaaacttactggccacagatcacttgtaactccctattttattaagtccagtttcaaataccaaaacttgctttaacttctgctattgctgtaacacctgtctctgacttttctaacattatattacatggctgagtgggatatactttttttttcacagtgtaataaggaaaagatagccttgtatttctagaagttgtattttatattcacttcattgcatttgattgttctggataagttttctgtgccacatactaagttttgggatgtactaacatgcactcttttcttgtgtttacatcttcttgagcttgcatctctttcttagagggaaggcatgagggaggaaaataagaagaaagaaagggaaaaagggagggaaaaaagtagatttggtctttggagcttcagttaaatttcccttataatggttagaccctaaatactcaaaatgagtatttgtggtgaaaacaaaagagctgacagtggaaacacagccaagcctttctaattagcaatcctagagaggacagcaccaataagaaagaagagcagccatcaaagccaggcctttatatgtatgtaatcaacaggcatctgatctagattcttaaagatggtgtggtttgggtgggtgattttatttattttatttttctgtctcctaaataatatgtaatttcttcaggccaagaaataaattgaaaggatttagagggatttgcttatcagtggaacaccacgtagcattacattcctcctgcttttgggaaggtacattgaagtttggttaatcttctgtggttcaatactcctcttccctctgtcagcctgccttgaacaacagattaatcccttttccacccactctcttctccttcctccctcccctctctcttgatctacccttccctttttgagcaaatagaagaaaaatcttaaaagtggggggaaaaaaaaattaaactgctgcactacatttatttatataatcctagaagacctcaagggtagaaataaaggatcccaatcctcggcacaaaatttggccaagcttagcttggtttttctactgttaattaaatcttgagtctgcaaagggatttccttaaagactaattcattagcaaaagttattataagtcacgtcattctttatcctgctctagtatatgcattgtggaaaagaagaaaaagaatatgctggctattgaggatgggtagaggttttagggagtgggtgatacgatttgcttgaattcctatgtagtctgctgtctttagtgacaatgaataattactgttgggtgacgcttatgagcccaacactaattttaagattttatagctaatgatttggcaactaatcagtgttttctggtttgacttggcttaaatctcagtagtctataaagtccatgaggacaaggaccaggtcagcctggtcccaagcacagtgattgactggcacatcataggcaattaataaacacttgtcaaggaaattagtgagtgaatgagtcaatgcaaatgtcagtacaaatgtaaataaaatcatatattcagaatatttttttaattcagttttagagagctctgttccaataacctaattttggtcagacagaatgcaatatctttagctcagggtgattctctttaaagctatctcatttcatggctatatgagcaagtaagttatgcatgtagtcatatcttggcaagtgattatcttcaggagtaggtagagggaagaggggaaagtaatagctggaagaacccatggcataaaccttgtaagacagttttaaaattcacagggtgttgttccaatcgaaatacttaagctcatagacataggatacaagggtcaccttagatagtatcttaacaagactagaattctgtcccttcacctccaacattcaggacctgcttcatgagatgcccccatctttcacacctgagtatgacaagttagagtcatttatgtttcatttgatcataacaatgtcagtggctttcaaaggtaactataaatgggatgtttaatcagaataaaataagagtataggtatgacagtcatacaatcttaccacactgtgaggttgtttctgtattgggcttaaattgagtgagtgagagggatgggggagagagggagataatggcttctaacaagcttgcccaagctctatgttttttctagttttgattacatataaaaatcattggcaagacatagtggctcatgcctgtagtcccagcactttgggagcccaaggtgggtgactcgcttcagcccaggggttagagaccagcctcggcaacatggcaaaaccctgtctctacaaaaaaataaaaataaataaattattcaggtgtggtggcgtgtacctatagtcctagatacctaggaggctgaggcaagaggatcacttaagcccaaggaggtcaaggctgcagtgagccatgattacgcccctgcactccagcctaggtgactgagagagaccctgtctcaaggaaaaaaaaaaaaaatcatccagttgtatgtgtgggtattagcactgatcaaagatgagactgtgatggccacaatttagtaaagaaaatcttaatagatacatttaaaaaaaaggtcaaacttttcaaatctcattaaaggttataggtttacttagagtcaataggtattaggtaattgaaaaactcaggcagcttgtatttaaatagagaatgaacattcataatgaagctagatgggtcctctctcatctgagatattcagagctccaactccatctcagaatgaaggtatagaggggaaagaactaaaacagcaaacatttaaaggaatttaattctttttagcgtggagcagctgcagagatgtatggctgttttctgtggggcttcagaatatttatgggcctttcccttttcctttttcaccggaagaaaggagatcatcattcttgagtgtgttatttataatttcataaagctgttctgtggcaggacttattttatctcatactaaatctcaaataactgtgcttccaaggagatgggtggggaaaattgattatccctcaaaatgattagcctattaccagtgtaagataaagagctgaagggtggaatttgaagttacaaaaggcagttgggcagtaaggaggggacagagtgaaacggtcttgagcagttctgatcacagctcacagcagtagacacttttctcatgcccaataatggattaataacgaagaacagtgtagaaccattgccaagaaagggtaaaacccttctgagtacataattagaagccaatgattatagaagcaataactcactggaggaaaatacgtcagatttgtgaaacttagggaattggaaggtaaatatacccataaatttacttgggtggacagagttctgagctttcttctgtcccagctttattctaaggtaatttcaataaacaatgttaggaggaaaaaaagaacataaatgcaataaaaaatcttccaggaaaggaatacatagggctcctgccagacagatattttattgaaagttattataatacctatctttagttttatgagtcctaacacagaacaaagtaatttcaacacgtggattaaaaatatgaaatacatattttaacatgtagtagtatgaattattgttttaaatataggacttggctaatatataggggcagaggaatatttttctccccttgagaaagcaagttaaggtgcttaatatgcattgtgaaactgcattgcagtcatactcatgcactatgttctataaaccatgtgtagtagcttccaaccaaatgggacagatgacactggtgagatgcagggagtggagaaaggagagaagtctgatagggcaggacatgaaattcatgctcagtatctaagttttcaagaacaacatagctcaagtagtggtcacactgtcattctagtccatcccttccctccagtcatcctctactactagtgggtgtataaataaaccgtgttttagacctctaagcctttgcaaatactatttcacctgaaatgcccttctccttctccagcccacccgtcctcacttccttcccctgtctcaccactgcctgtccctgagggctcatttcccacatgctctctgccttcttgctatttccttccttcacacattaatgcttcctcttgtcagagcattcggtttactacatcaagtttgcctgtttacttgcctgtctcatcagactgtgaattcccagagcagaggaactgtgtcttatctatagctttatcccttataactgttaaagtgcttgacatataggtgtttgaaaaagattcattaaagtaatgaatgaatgaaaaaagcaccttgatgacatataccactgacagtaaatctaacagcccagccactgtgaaaattatttggtgggtggtcatagagtttttaaaaaatgcttccttgaataacttatagagaatattggtatttgacataggggaaccatcatacgtcagcactttaagcatagccattgaaagttatgagagctttagacaatcattgtgaggggaaaaaatgtgaagatgacattgaacgcaacttgataaacattcccaacgtaactatgaatagaagagtttcctaaagcaacactgtttcctggaggagcgtggatggtggacagttaaaaataacaattcactacaagtgtttatacccttggttacagtgaatactaaattaatgtgaattaacagctcagcacaaagcctaaatgtagccagtgtttattaagtggtaaatgttattagtaggcatgagtctagatagtctagatatccatttctttgcaggcatactaactgctctttcttctaagtaattaaaagtaattacagacaatggttgtgattataggaaaatacacagacatgcagcctaaggctaccacattttattaaaaggcagagatccaccaatttgttctacttatagcaattctattctgagtctgagtctatctgcaacatgaaacctgttttacaagccatggaaagcaatcaaagaagtgtgccttttctttcaaggttcaacatcagatcctgcatttgcttacatctgaaaaagaacacagactgaaaaagccaaaacaacaacaacaacaaaaaactgctaaaagaaagccctgggttttctgaaagtatctttgaatccaattgccattaatttaggatatgatcttaagccgctcatatcatccaaaagccttggtttgtaatgtttggattttctagatgttagggacaaaagtagtttcaaaaaagtctaagtgtagcattcctaattctaagcctttttgcaaattaaggcctctggcagaggaagtctttccatactacacagtgttctgtggcaggtgtggccaatgttgcatgccaggttcttgaggaaaacattggttaccaaaacaggcaaagagggactgagatgtttgtaactgctttgggagtttcagttggctgtacctctaagtggtaacgatgaggtctgaaagacacaaaggaaggaactgaattcatataagacccacacagattgtctagattcacagccactgagaacagatcacctttgaatgattgtttaagctctttatgagtacatttttctttatcactcctcatggcaggtgcaaccagaaatagtatgtgtaccataaaatggaagtaatgaattgtcagcaacaaagaacacttctaatgtggggtaaatcgtaacaaatagagcacataggcagataccaaatttatttaaattaggagtggctatcaggcttggaattactttgattgagaggctgatgttgattaattgtgaagttaaactatgatgttgattaatagtgaagtaactaagtgacgtgtgtgcacgcacacacacacatcccaggtcactttctgaatctacgtagaggagttgggattcacagttgtgctatgtctagggccaggcccattcttacgacacactgctggatcatttccccttcaaactcctttgagtctgggcaccattgctaggagctactggtaaaatgtggttctgttgcctgggaagaacactgtattcacatgtactcatatagaagatcaacagaaaacaaatctttgggcaaagtggagcgcagagagggttaaaggtggaaaaagggggtcagaaggtgaaagatgatgtgtggggtctgcaatggggattaggggcccattcatgggatggaattggaggtagagaaggggtgggagagtggggctggggatggtgtcacctaaaccacaggggagagaaacttagtagtatgagaggaagccaaggaagctgagaggaagacagtatcttttcaacctcagagtctactcctttttctgaaaaaaaaaaaaaaaattacatttcttcttttggcccatgcaaatgaagaagtctcctctgagttaaagattcaactaatattatgttaatgtatgttttggtttctactgaagttatgcattgttttttaaacatttgttcaatggcctttaaactttattgccaggctttcagttcttgaaaggagctcattagattttcattaactcaccagctttcactcaatactagggaccaaagtcctaccgggccattctgcaaggcccttacagtcaaatcattaataatttccagttgaacacacttcagcagtgtattctcagcctctttattaccaccatcctaaggagttttttcagataagttttccccctaattgcccttttcccacaacatttcaattccaaagatatactacatattcatttatgtaactgtggccttttggagggtcacaaaccattgtaatatttaagattgtccctcagcccaaaccaaactttcctgcctttggtgggagacattgcccctataaagaatgcatgcttaaaaactactaaacaatgattgtggtccttccaaaatagtgttttcctcttataattgccgtatttatttcaacagttaactcttttcccacttaccagctcctttccctaagtaactagaagtagagctattatagggccccctctcagcaggaaacaccaagggaatatgcttaccatgtctctaacacaaataacagccccccaggatgtaactaccagtttcagttgctggaactgaaatgaacaattcagtagtgtgtgttttttttaagtatgtttaaaaattcttttttcggtgtggagaaggagagcatcaggataaacagctgatacacgcggggcttaatacctaggtgatgggctgataggcgcagcaaaccaccatcgcacccatttacctatgtaacaaacctgcacgttttgcacatgtatcctggaactttaataaaattaaaaaaataaaaattctttttttctgctagccttgaggagcaaggtttgaattatacccctttcagatgtagaataaagatcaatattgttgtgtagggcacttctctgccattgttaattaaatcaatgaattatctaatgtggtttttccagttctttgctgtgtccagtaattccatacctaggatgtctatttaaaaaaaggatgttttctggaactcctaagtagaaaggctgtcatatatattcatttattagggttgtcataacaaaatatcccagaccaggtggcttagacaatagaaatttatttcctcgaaattctggaggctagaagcctgaaatcaaggtgtcagcagaattagtgtcttctgagaactctccccttggcttgcagatgactatctgccagcgtctttatatggccttcctcccactgggtatgtctgcgtcctactgtcctctttttagagggacacaagtcatattggattagggctcatcctaatgcttcattttaacttcattacctctttaaggctttgtatcaaatacagtcacattctgaggggctggggagtaggacttcaacatatgaattttgaggggacataattctgtccataatgtaagaccaggtataaagaagcctattgcaagccacaaacacagaatttgactaagatgtatttattcaaattcccactatgtgttttactagctgtatgtctttcagcagctcacttaacctaactgcaattctaattagtcatgtaatagtcatccctgtcccaaaagacggttgtgagaatcacgtctaattaataactgtaactaaaaagtgtgtgtgtatatatatatatgtatatatatatatgtgtgtgtatatatatatgtatatatatatacatatatatgtatgtatgtatgtgtatatatatatgtatgtatgtatgtatatgtatgtctaggacagcatctggcttgtagtaattgctcaatagaaggggagtggtttattacctcttcctcttgaatttggatccagactttagtacatttgggaattggaagatcaacaagtcagtaaatattggtcacatgaagaaggggaaataaatgagcattattgaactataatatattgagtcttcttatgcacatagtaggccaaaagttttgttttttgcataagatctgtagattcattcattcaatatttattgtgcatgcaatatgtaccaaatacagaaagcagtcatctcacctactgtatggagggctcttctcacagctgatactcagtctcctatatttcttgtaatagattccctgggactggggagtttctgcgagactcagaatttaaaaggtgcctcaagtcgaactactattattgcagtcagaactgtttttgctctcttcaggaacagccttacctgtgttcagggactattgtgtggtatcatgctactggtctacattaccaattcagctattgcagcaattacatgaaggaattcttgctaatgataaaagccattatgcagttcctaaagagaatgcattccacagcattcattaattatgccagcctgtagatgcacaactaccacggcatacacttgagaccacacaccataaggattgaaactctctcaaagccacaatgtatgtctgtgttgctttgcactcttacattgcccatcctttacaacagcccttctcctgtccttctgattcctaaaactcaaaaccagaatgaagtaaggctacaaaatgtcatttatggggatgggtgaggcttaagtctcctggaaccatcttgggtcactcagctctacggaagacccccctaagacggtctagacccagagtcattctcagtcacacagtagttaagaattcttcatcctacggtatgccctctctagaaaaataatcgtaatgatgggagatgggacacagtgataaatctttgatgtctttgttcattagtttccttatctctctctcttctctctcttcccctaccccattattttctctttgacataaacagccaacatcagatgatcttgtttcatctgctgaatgttcaagtgatgatgaagactttgttgaatgtgagccgagtacaggtaggtcaggtcagtcttattttgcttgctttcttttttcttttgcaaaaaacaatacatacatatatgtgattatacatgtgttttatatatagattatagtgtgttaatgtgtgtatatttttatatctatatatgtataagtatacatatataaatattatatcaatgaaagcatcaaatcccatggaaagagcaataagatcctacaaaaattaagtcagtctcttgatagctaacaaaaaatcatggtatatgacttaacattgggcaagcagatgcccagacttaccactggagcagcaaatgtgtaggagccagtggcagctatgaaattcacagagggtgggaacatgaggaaatatatgttggaatgacatcaagaaaggatgaacccatggaggagcttaaagattggtaagtggagccataaagattggtaaatgacttaaaactcatgaattattctgagctaagagaaccaaaaatatatgtatatatatattttccatgggatttcaacagcagttaacatggtattatctttgtactaattttgttaactgtgtgtctagaaaacttgtgcaacaatatagtaaacacaaaattagtgctgtaccatgccgtgtcaacagctgtgatgcttcaaaatgtatctactgtgctgaagttgagaagactttagcaatcagaagcttcaatgtgttccccatttggacccagatacattttgatgttttatggtctttctttatagtgagctacatatgacctaatgtccagcaggcaattgcagtccctgattatttcctatcaacttttcccagttgtctgttttgagacttactataagttaaacgtttatatgtatataatagagaacagatatcatcgaatttctgtgtatgtttaatagaattaatagctggagttgggccaggatcttatttctgtgaagactaaaataaatagaattttctagttattttttgcattgctttcagatttttttccttttaagaaaaggaaagccattaaaaattctcttttgctaattctagaaaatttaagcttcatgaaaaaataatctaataaaaataaaaaccttccatttctgacccctaaatgatttacaagatttcaaatctgttgaagcctgactgctttggtttcttgcaagtggaattggatccaggaagttctgtgggttcatacccttagtatgacacagggacacatcattaatatgatagggcttccattctggagtgtaatctgttccattgggagctcagctgtgtggagggaaagtaaatgtgatctggtcagggctttctttttcatatttttaggtaataatctgtatgtgctatgtgaggttttaaccctaaaagggcagatacatccgaactataccagaacttgggtgccatgttttcattaatttattcattcattcattcaataaatatttttgagcactcaggcaggatacaatatatctctagatttgagtccttcctattctgttttttttttttaagaaattagctgtcagagaatagaatagttttgctatctaactcctcgcgtaattcaattcaacagatatttttgagagtcaactgtatatgttaagcatgtgctagatattaagggttcatatattaataggtcacaatcctcaatacgtacattaaattagcttgttttgtggcaaaccctttaagaaatctaggctttaattttatatatatatatatatatatatatttttttttttttttttttttttttttttttttgagatagggtctcactctgtcacctaggctggagtgcagtggcgtgtttatagctcgctgcagccttaaactcccgggctcaagtggtcctcctgcctgagcttcccaagtagctagaactacatgcaccactatgccagctaatttgttttattttgtgtacaaatgcggttctcaccatgttgctcaggctggtctcgagttccaggcctcaagaaatcctctcgctttgacctcccaaatgtttttcttcctttcttagcagtgatatctctatatgcagcaatgtttatcaaatctgtagattttaaggcttatcaaaattgaggcttggtcattctgaaatattatcaccatctttcctcaactactcaccctgcctcagaaagtcatctccacagcaacattcataataaggcagtgggcttttccagatctcagcttcagattctctagctctgtagctccccagtttatgggtatatattgctatttgttatgagacttgaatagcgtaaacctgaatggccccaaactaaatccatttgttttctagaggccacgcaggtattttctctgattcagaagcagaggacagaaattcaacaccaacatttcttgaataacatggggtgggtggggagatacagtttttagaacaatctgttgtgttctgtaagggagcatgagaggagataaagtgagtgacagaacccctacctttaaagagtgaacatgtagctctaggaggctgatattgatttcctccacctgtgattattcaactcatcacatttgaagaatgagcattgcatttttctaattttatttactccataaagtattcctggtgagtgatttggatatacagggaaatacgtcagtggtatatttaatacaagaagtaggtagatattcctagtaatgcagagagagaagaggtttgcccagaggacctgatttccactaatggggattacctgcttagagctatcaagccctctttttcattacataagaaatatctcctcagaagttcaagaccagcctggccaagagggtgaaaccccgtctctactaataatacaaaaaattagccaggcgtggtggcaggcgcctgtagtcccagctactcgggaggctgaggtagagaagtgcttgaacccgggaggcagaggttgcagggagccaagatcatgccactgctctccagcttgggcaacagagtgagactctctctcaattaaaaaaaaaaaaaaaatatatatatatatatatatgtatgtatgtatgtatgtatctcaggcttcacattttccaaaaacaatacagattaaaatcagaaatcagtttcttgggcaagatttgcactgcctaaagagaagggacctactgcccatgcagcaacagataatggtgacatttacacatctttgacataaattgccaatcttgcaattctacattaccactaagattaaaattctggttttgaacaccctaattcactgcctccatttctaaaacatttttccaggccttttgcttgatggaaatacactaaatttggctaacttccttggccttgttctatcatacttactactttatcttctttcactttgccagcgagtttattattttctagctgtctccgtttatgaggcatttaacttctacaggttatttcctgattaatttacatccatttgaagctctcacttttcataaatttgggtagtttagtgtgtgctataattcaatttttattttcatatgagcatcaaattttaaatgaaataatttattttttcttcaaatcacattggatttttaaactgctggttttgagttagttataagcaatcgcctttcactctcagaacttacttttgtgcttaagggtcaccacggtttggtatagcttaatcttattatatttaggaacaaggtaaatatttttggagtttggtcaataggagtctagaaaccttgcaaatccaatggaagtcaagttttcacggtatatttttgctggtaaatatgtagagaaatttaaagaaatcccaaatcatgagagcaaggcataaagtaaaagctcaattaggatttgtcgactaaattagtttgaaacagaactttatatctctaacttcatttcccctttaacagctaaaattaaacctattgactcatttaaaatttatgatttcatataatagggctgccctgacaaaatctatatttttaacaaatttgttttagaatttttatttctttattttgagactgggtaacaagactggctaacttttgtatttttggtagagacagggtttcgccatgttggccaggctggtctcaaactcctgggctcaagtgatccatccacttcagtctcccaaagtgctgggattacaagcataagccactgtgcctggccaaaacctacatttttttttaacaaagttattctctgctttttcctatccctacctttttctgggaactagattattttataagtcacagatacaatcacattttctgaatatttgcttcaagaacccagaattgaacctttaaacaataaagttataataaaaccatctgcatcaaatgaagatattcagaagtgtatctgaatagctatctagaggcgagggtctggattttaactcgatttgtaaatgttaattgtgttcttcacaaaacaaatcagtatctaatactttagattcgttctttgcatataaactgtttcattcccaactgcacttctattaatcttaaattgtgcagtaaattcatatttcattgtcctttttctctttgaatccaagaagaaaaacggatgagctggagagcattcaaataacccctaggaaaaggataccctcatgagattatggaagccaaatagcaattaagatcattagtaaattcacatttgtaatctaaaatgtgggaatgaattctgaaattcagagaaaataatacaattcacttcccatttcttctctttcccttacccctgctgctatccctagaattcccatctttggaaatagagtaatagtgaaaacaaatgtattcttggatgagcttttgtataattagatatgatcaacttcctggattttacatttttatagtttcaagattctaaaagtcttgggggcaggaggccacagagcagagcgaaaaaaaaaagtaatacttttatacctaataagtgggcatggcaatacttaaccacattgattcatccagtcgttatccaggggtatatttttcagtttgtcaagtagctagtttttctgccttcacttttcttaaatgtcctttgatcaaatctcaagggacagcacttccaccagagggcagacagtaaaaggaagtgaagatgaaacacatccatccatcaataagactgtgctaagcagctttcataatggttgggaaggagatgtttaaactaatggcagtaatatgagatgacaaaataattgctattcccagagtggttctcaggtatatttttactcctcaaatctacaatattcacatttgcatttcggtgttactgctacttagttcctctttgttagccctactataatatacaacccaagctgagtgaaatttaaatttggcataacaccaagatcacatctagtattttccaggtggaactggattcttaatctttatcagtctgagatgcctcgggaaagtatcatctgaaaatctggcactgagttactaaaagctcaccaaatcattttactttttatttgctggaacatggtagaaaatgcagctgaaatgttaatagataataataattttccagtgaaggatcaagagaagtttataccagaatttatagataacaagtaaatgtgctgattgttggccttaaatatgatgtttgaaatcttatagagatacgttttgtcatttgtgtctttgtcaagtttgaagttagcaacctgtatgtttttattacaaataagtcaattttatttaactatttattcactttagatttttctatatgaaaactcattagcaaatagaatcatgttaaaatttcattagtcaatggctattcagaatatagtacaaaaataaatgtccaagtaaaatctcataggaatgttggagtatgacagatctataaattcaatggtctgtaaatgctataaattctgataaaaggctcagatccacttaaacactttgaccaaagagataatggaaataatctaagataagcattttagctttggaaagagaactgtatatcgatagaaaattacttaatttaattcattattattggctgtggacatcagtcattttaaaatttgagttacaatacatgtctaatgctcacaaaagcaaatagttgttcacatacttaggtctaggctaaatcatatccatttttcaaccgccttcattgatctataaatgaatatagtatgttcatgggagtataatgttccagattaatgatacagtttttgtctttgttaacccaccaagttatttcactttcttttcttttttcttttttcttttttttttttttttttgagatggagtgtcactctgtcgcccaggctggagtgcaatggcatgatctcggctcactgcaagctccgcctcgtgggttcacgccattgtcctgcctcagtctcctgagtagctgggactacagacgcccgccaccacgcccggctaatttttttctatttttagtagagacgggttttcaccatgttagccaggatggtctcaatctcctgacctcgtgatccacccacctcagcctcccacagtgctgggattacagccgtgagccaccgcgcccggccagttatgtcacttttttataacagccccaacccaacccaagttattttttaaaccattgcagtaactatgtgcttttaaaatccttaatggtgaaatgctttgaaaattagggtaagaacagaaatataagaataggaaagatctactaattagctcttgcactttaggctgaggaatagtgtgcataatatatgtggcccatagatcgactattgtggatttcataacaaatatatttaataataaaaaaatgaaaaaaattctatccaactccattacccaagattttttagtaggttggagagcgaggcaggggaatccataaaatcaatgtatgagtgtatatacttctatctgaaagtttgataaatctcttctatatgtaacacttttgagtaactattacatgtaggcactagaataggtgctgggaaaacaaaagtattttgcttcagaaatatcgcttccagaagttcagtttattaggaaaggcagatataataagaggaataaaaggaagggaagaaacaatgaggacaatgaatggaaatgcccacgatattatcagcaccctaaggatgttggagcactccaattcagtgaacagcataccttatcagggatatgcaagaaaaaaaaaatcacacaagatgatgccaagcagtgacagattcaactaaccccaaggagcattcttctgtattttagtttggtgacacagaattctcatttattacgattgaagaattagtacagttcagtaaagtaaaaaagcaacactcttttggaattagtacagctcagtaaagaaaaaaagcaacactcttttggggacttcacatatacagtatggtcaaaggccacaccgtttttaggtaatagggtaaaggatggacatgttgaagggagaatttcaatctgaactcatgagaacttcctgattccaaatgccaatgcaagtggtacataaggagtgagcttaatgacatcattaagcaagtcccccaaaaataaataaagagggattgggttttaaaagagaagtttttatgggatttattctttttattctacatttttcttccataagccccaagtatatgtactgtgtgtatatatatatatatgatatgcacatatgcaaataatatactgcctgtcactccatatatatgtagacacagtataagtgatattagactaatgtaaccagagattaacagcccctaccatcagtcatgtgtttacacagaaattcacaccatcattcttaaccagcatcagccaacatagacatgcatgatactgttttaacttggcaaacaaagcatgttgatttttctttaagatttctttatcataattataatgctgactccataattcagttatccttgggaggggtggaaagaaaaaattatacagatatatctatccgtatatgcacattcctgtgtatatatataaatagatatataccttgtatatatttgaagaacattttgttgtttcacctcatcttgtgccgcatgaatttttggtggttcaatttattttgttttcatatttactattttgatcattatggctatttttaactcattgctatacttttatgagtaactataatcattattttcaaatactgagagatatatagatatacaaatcaaacaaggcaaaaaaatcttttcttgccatcctaatctcaaattcctcccctttcagcatatccctccagtatttatctcaaaacaaaacaaaccccaacgaaatccaagaaagttgtgtacaaaagaatgaatactgtgttttcctcttcctccttctatgcatatttttccttttaatttccgtttctttccttttgatttacccccatatctgcatggaccacttgcctttactttcccctttatgacaatgtaattaattgaaaagataagagtcagaaaaaaataaaagaaaaacacatagaaatgacagagaaacacacccctctccacaaatttcagatggcataaaaagaattttattgcagatatagaatatttgttgtatcttttatttctgtctggacaagcccaggatcattgtgtggcatgccgtgacaagttttgtagcgcatcaactaaccatggcctccatcacaagtgcatgacaccatcttgtgtttcatccaagtgacacatctaggctaacccagcaagtccagtgtatgagttgtgggaattacattcttttgtagttataatttcatgggtccttgtttttattattatttccattggatcatgacagccctaagagctgctctcgcagcatctctgtatggttttgttcttgtgttttcttttcttggcacagcagtcaagcatgtgtctcttgtttggcacatctgtcttgccatcttgtcttgtccactgtcgtggtgttgttctgtgattctgttctctgtaagatgtgatttgaaatcctctgcctttatttctcactctcctattgtctctacttttaaccttacccctagggaacttcacaaagaagcaaaacaaactttcagtcacattataaggctgatcactggtttgcatctggaagtcataagttgtactttttacctgacttaaggaggaaaaacttacagtgggaaactactgataattatactcaaacagcaaactgatcaacgacaataagaaacccttgttgattatttttggtatgattaaatgggcttactgttaaagggacttcatgtaagatcttatttccaaagagtttttttcataaattatcagtcttctagtcagaaacttttcttcaggagcagatcaacggaagatgtttttcgggaattgttagtgagggagcatcatttctgctgtgtagaacagtgcctgttcctgaattggggaggaactttatggaaatctgcaaatgttttattacaaaatgcatttatgtttatgtattaaaatataaatgtgttcagcaaggcatctgaggatgggaaaaaaaaactttttaactcactggttccacctcatgcatattttgaggtaagattatcttttgatctttctgagtcaactgatatacattttacttttttattttttaattcatggaagcattagagagccaacacttcaactttgacctaaattcattcttttcccattccagagaacacgacatacataatagctttagttctgagaatagagtctgaatttgagacaaacgtagaaggaagtgcccagttaattatccaaatgttggactctacctgtgattatccaggcgatttgatgctttacttggaaggatttgattagttggatacgaacagcatgaaaatgacactttgtaacaactttccctctttaagggttgagcacgagaatatcaaataggtataaaaatgagtaataggtgatatattaatagattaaagattattcaataggcctaaagatttcagatgaaaaatctgtatttgtaatctgaaaaagagaaagcatatccagacctgtggttttctgatgagatctttcagtcaggccagggtagctattggtttttcttaagggtaaggggaaaaaggccaaggatgaggaactggatggctctgtggactaagaacaactttctgatgaaagaaggaagggaaacaagaaaggcgaagaaagaggaggagggaaatgtaaaagaaaggaaggaggaaaggaagagatattgattatgagccaggtaaagctgcttgctgataaatattttaaaaccagcacacacacagagctctaatttgcagttttccagtttctgtatggtgtaaaatattcccaccatggctgatttctagctaccaatatgacagccctaaactcagaattgggaagtgtccttgctcgtacacaattatatggctttttcatcatacgtacactatagacgtcaagaacctcatagataatagtaaaatttagtaaaataattaggaagtaccgagttttaagtttttaattacctgtttttaatatacttgtaactttatatatatattaacttttgaaaatggccatgttttaacaaccagcttacaaatttcctagaaattttgcaatcagttgtcataaactggctcaagcacaccactagcccaggtactatactgggtacatgaaaacatagtattttatttaaatctcattttaagttattgtgagataaaaactagcttggtcatcttacagttgagaaaattgggattttaagtttgcttgttcaaggtcacatacctgcacataaatggtagaggtaatattcaagtccaaatctgtttgaaaatagacattttctttatattacagtgtgccagtcattctttcaacacttctcaaagtactaagttatcgaattttgacacgctcctttgtggagcttagcatgactcgggtttccctattgcctcaaggaggtccttggctttaactgtcttagataaaatggagtttaaatgtattatggttgtgtcaatggcaaaatgaagacagtgaagcaaaattagaactcctgattactctgtttgtaaatgccaccaaagttatgaccatgtcttcatgagaatgtccactttgactaattttgtttcctccaaatattcctcttttactaacattgacaatgaacaggatatttcttaggttttcatattctgtcccttgagctttggaaagactatcccagatacattttctgagcacatagaatctatagcatgatcccattacatagttaggttttataacttttaaactctaatgaattttatttagttacagtatgtaatgcatgttaattaaccaactgcacagtgaaatatgtcaatgtcctttgcttccacattttctaatagagtaagctagtatattaacatttaaaacagcatgagaaccatagtactgcagaaagcaactgcagtttttaaaaagatgattttattgtaagatacttaatcattgctctgtaaaagagtttgagaggcctgggaattaaaaaggaaagtgttgcagctttttagtccttctaatttgacaagatagataatttgattgggtttctgatagtgcagtattttgctttaatttggtgtgaagtttagttgcccccataattattattatttttttttggtcactctgtcacccatgctggaatttagtggcatgatctcagctcactacaacctccacctcccggattcaagcaattctcctgcctcagcctcctgagtatctgggactacaggcgtgtgccaccatacccagctaatttttgtatttttagtagagacggggttttaccatgttggccaggctggtcttgaactcctggcctcaagtgatctgcctgccttggcctcccgaagttctgggattacaggtatgagccaccgttccgggcctccctatatagtaaactttcgatggcagcatacacaacattgaataaagtcctttgaagtgacttctaggctttctcctataggtttgccactgctacaactttgtttcatcattcagtgaatattagcacttcctttagtgaaatatagtcttaagtacttcacattgttaactactttaatcctcacagcaatcatgtgagagtctattcttattatctccattttaaagataagtaaatggaggcacagaggagctaagcaaattatcaaggtcacacagcaaggaagtagaagaaatgggatctgaacccaagccaactgcccccagcgtggacacccatcactatgctatcctgtctcttacgtagcgcttattttccattaacctaaatatacgaaatagctgccggcctccttgataataaaagaaagtctgtgtattgaatgtattacatggttgggaagtagttgataaatgggttagttattatgtatcaaaaaggctttaacaatcttggttgatgggggttataaaattgttccattatgatttattcaaataaccgtggttaaaacaagttaccctggtttcccataaggaggaatgactccaatattggagagaaataccaacacttatgtgaggtgagtctcccttgatgtcacctatgcaataatatgtgcacttgggtttttttttttttttttttttttttttgagacggagtctcgctgtcacccaggctggagtgcagtggcgcgatctcggctcactgcaagctccgcctcccgggttcacgccattctcctgcctcagcctcccgagtagctgggactacaggtgcccgccaccacgcctggctaattttttgtgtttttagtagagacggggtttcaccgtggtagccaggatggtcatgatctcctgacctcgtgatccgcccgcctcggcctcccaaagtgctgggattacaggcgtgagccaccgcgcccggccgcacttggggtttctagctcattattcatgatcaattctgttcaaaacatatgcccagacaacagccacctttaactgatgttaggaatctaaggatagaggctcttagcgagagcttgggttaagatactgcattttctttatttcagaaataaatatgttccttagaacacagtgatttaggtgttacagctaaaagaaagcaaaaaacaacaacaacaacaaaacgaacttgtatttcttatcttagaccctttctgacacccacatgctcttgacatctcttaaagttgtaactatttgtttatcctccctttttcctcacttccttgcattatgcatccaaaactattttaaaagccaaaacacacacacactttttgtgggtctttgagtttcctatgcaagaaaagaatcttaaaatgagttataaagaactaaaaatcacaattaaaaaggaaacataattttaaaactgtgtttgcttgtattataatccttattccaaggcaagtatggcctgcacaaacatctgaggattccattacaaattatatcagtctcaacccatcccgaatccagatcataaactcataaactggaaaatgtgtatagttgaaaatgtttgcataccctctgtcctagagcagtgcttccatcttagctttgaagcacagagacctcctcttactaaaagatcatgaaaactggcaatactgtattgcccagtgttaaaatttgtcagattaattacccagagccaaagttagcaaactttttttctgtaagggctggggtgtaagtattttacactttgagcgtcttacagtccctgccctatctcctcaatcagctcttataatgacacatagcagccatggaaacaaataaatgagcagggctgtgttttcatgaaagttgatttccaaaagcagagatggagctggatttggctcagaggtcatagtttaccccaatctagagaagtcccataggttaaaaatgtgtagtctttttttttgtttttaatagataagaccttcttgcccattttatagtcgttcccaacatttgttgagttctccactaagtacatgagaccacataggatacaacaggacattaaaagcttttttttttttttttttttgagacggagtctttttctgtcacccaagctggagggcagtggcacaatctcggctcactacaacctccgcctcccaggttcaggcaattctcctgcctcaaccgcctgagtagctgggactaaaggcgtgagccaccacgcccagctaatttttgtgtttttagtagagacggggtttcaccatgttggccagactggtctcgaactcctgacctcgtgatttgcccccctcggcctcccaaagtgctgggattacaggcatcagccaccgcacccggccctaaaagttcatctttaaggacatttcccacctttgttttagatatgccactatctcagacatgaaacacaataacaaactaaaccagggtcatctccacccagcttgtacactacatatttgggtaggagcttaacgtcttgcccttcgctttgccagtgtgtcttctgagctccccacctctgctaggtgtgggctgcattcacccccaattttagacctctttggcagtagcttccttgatctcccgcccacatactgtgtcatatcccagtaattcttccccaaaccttggctatgggttattgagctgacaaatgtctaaatgactgagatacgatttcacaacctgctgagagcctcttctttccctgtactctttgatttgtagctttgtaagttttgtgaggaaagtgggaaaaacattcttggtgacacaggcagtgaatgaggaggacacaatggagtgggcaccatatctaggactcctgcctgcattgcgagcaaaagcatgtatttatatcttagccctctgaatgttagaggtagcagattatacagtatggtgcaggaaggagcatcctatgtcctgaggtgaataacgtgttctaccacctggcagcagattagaccagatcaggctatgagaatacaggttcacagccagatttagtactaccagccagatttagtactactgcaaaaatggcttttccttaagaagtttttgtttctaacttttattttaggtttatgggtacatgtgaaggtttgttacctatgtaaacatatcatgcggttttgttgtacatatcatttgatcatctaggtattaagcccagtatcaaaaaattatcttttctgctccctccatcctctcaccctccctgctcaagtagactccattgtctgtcgtttccttgtgttcctaagtcatcatttagctccaacttgttgagaacatgcagtataagttaatgcttactctctttaacatctttcacattagaaatctatggagaagaaatatgaaagactcatatataaacatggggcaaaccatgaagctaaatcttaatgtatcccaaaccccagagggagcataaggttaactttgggtggccagggtgcttagtgataacattatgagctttctacattagcagggccccctggtgtggttttgtgcctggagatgtaaggttctgaactacaaaggaagcaaacaaaatgaagagatgatgcaaggaggcaaaaaagatggaggcattaggaaaggctttgagggcaggaggcacggggtcatcttctaaaataacctattggaatgcatgttttaataagctttgaagatcaaagagattaacaagaacaagaggaaaacaagggtaaattaggcactattgatggcctgacaaggacttttttctccctttctgcttacaataacctctcattttaccatgtggctagttggtttgtttacttgtttgtttacacttactcattactagctttccctataaagcaagggaaaacactctgtccccaggggccagctgcataacatgaatagatgaaatagaccagaccagatgcaatctgcagtcatgggaactctgaactgaagagaacatgccctcatttaaaggcatccaaatgaaacattttaaaaacactaaaataaagagaccccatgaaggtcaaacaaggcataatgagacacacagtgttttttattcttttgtttcttaaattcctttaaatatagccctttcataaatttggcaggatgtgctctcagtaaaatttctggtttagtaaactcttggtgacattatcaaattaaacagcaatcccttccaaattcccctaaagctaagacctttttttttttttttttgcatgtctttttttctctgataatcccagagtttatataacctcaaactataagcttgatgaattttagagttcattgtaatgcttttggtttaggtgacaaaactgatgcctacaaagataaactgatttgctgaaggtcatggacctagtctttattggagttgtaattcaatcccaggtgtcctaaatctttaatccatgccattttattgatattatatattaagattttttttattgtatatccaaagatttctattttaaactgagataacatccaacagagaattcagaagtagtatgaaattgattatcttccctctactggacattgttgccatacaagacgatatcattgacccacttagggctcaaatatacaactctgtattattttagtcacaaagggaactaagagattatagacaagttgtgaagcagttagtggggactggaagtctcctgtggcacagactcaaatatatgctctagtgatgtgttctcagtcatgttatctgcccacacagaggacagattaagcaacctagagtactggttcccaagctcgaatttaaaactagtaccagtctatgccaaagctttcagtgacccatagtgaaatgagaaaagcaaggacaatatggtgagtctgcacaaagtcaaacttacagaactgccctatatttggatactgtatcatgtttttttggatggctaaaatcaatgtcttttacaaaagcagcattttgttactatgtatagcattcttaatcagcaaaataaaggttggcaatggtatgtcagtccttccctacagtttttctttgaagtttttttctcaggcattgaaaacaaacatccgaaaaagcaaaaaaacaagagttttaaagttttaaagtgttctctatgttgccacattagattgagtagatttcaaagactgaaggcctttttacatgtaaagttttattgtgaactaataatgatgatgttaagacccatctattttattgaggtcccaggaagttactagtttaagcatccgtcacttagataacaagcattaaggtaatttttaatttcagttaaaaaaatagattaaaggcacaaaatagatttccaaacaaacaaacaaacaaacaaacaaaaaaaccaaaaaagccaccctaggataaatataactagaaggccaagatcagtttagaagtctacttaaagaaagacagaaacttctaaggactgtgtggaaagataattcatgcctataaaaaagtctctgtgctaactctagatttttttcactgtaagccttgtaacaaaggagagagagctattttggaaagctgaattagcctacatttgagctaacatgatccatctttgtgtcaagagaaagtcaaatattatagtccccagccaaaataaggcatgtgatctacatcaaaggcaattcctgaatgtgtatctacgtcctcatcccctctcctcttttttgtctcttgggtaatctataccaataacctcctgattcatgaaatttattatctaaatattgaaaatattacactaaatttagcctaataaaaattcatgccaaatttactgagtatttattggaaatcagagacttaaggtcctgaatcaggtgtaagaattgtattatcaataacagacttaacagtgattatctctaggtggtgaccgatattttgataatcatactccaaaacatctatgtagaaattgggcatggtggcgcatgcctatagttccagctacttgggatgctgaggtgggaggattgcttgagcctgggaggtcaagggtgcagtgagccatgatcacaccactgcactccagcctgggcaacagagcaagaccctgtctcaaaaaatgaaacagaacaacaacaaaaatcgatgcagagcatgtattacatttgtaatcagagagaagggatatctgttatttcttaaaatatagaagagtatactaggagaccagcaagggaaatgttttaatatttagatacggaagcttcgccagacccgtaattttttaaaaatagtgaatcctttttcctgggttgaattatgatgtatggccctgcaaggaaagctgctggaggaattcaaagatgatgatgatgatgatatgcagggctctatatagcttaacacattagttccataaggtcagttctgttcatcaagtgacaaattgtccatggatacaccaggtggtaatgcagcagcagtgggcacaagctatcctgtaaatgacccattaccagaaagtttaaaatttctgcttggaacccaggaacacagatggaacacgaagtggctttcaccagagtcttgggaatatgcttgatcctttaaccccagcttcaggtgttgtgtacatacttaatgcctgaacagttctcatctgtacatctgctggttagatgaaaagatgcagttgcagacaagtaatttaaaactttacattcatgtctctctacctccctcttcctcttctgtctctccctcgataggatgtccagaaaattaaatcagctgcagattaattgagactctcttccatgtagggaacatctgtcactgcagctacaaagattatattaatgaattaaaacatttgattacctttaatccaagagaatgcagcagtctctttagtcatttagtttatcagggttttttgatggtttttttttccacgtgcatcttacgactatagtccacccctgaagctgtgagatctttcagcagatgttgttttccatatctttaccctttccgttgtggaagggggaaaaagccctcagaaaagcaattttggaggaggcagaaaaggtttccatcatgaacatacttttagaaacagctggtaaaacaaatggtccaagtgcaatgcctggagcatatctattcaaacaaggttgtttaaagataaaagcacccacttctaaatatcagcattagtagtgatttcctcacgtatatttaagagatggaagagcttgtgaagactttttgatttctattttgttttctgagacttctttaactcttttggttttgttagtatttgaatttatcagaagctgctcaaattgttaaaactgtatcatcatatgtaaaatatataaatttacatataacggatgcataaagatttgctttcttattctaagaatgttcttatttgataacatctatgcatagtccagaagattgacatgaaaaactgataatgtacttaggtattaccaatcctataacccaatttgtgaaaaggtcaggcactcctactaaagaacaaacgtttgtatttgtagcatttaaaaatctgattttattttgtatttgctacatttggagtcaaccttatcccttcccttctaatgacttcatttgtttaccaggctgttttgttctgcatcctctgccaaatgccattacgtaacttcctttgtcagaccaattggtgaaataattctttgtgtgcttttttttttttttttttttacggccgtccaattttcaaattatatgtggattttctgagtcaggcattgcacaaatgctgatttgttagcttgaactcgataaatgtgtgttcaccctatcagttgtcattcatgctgacttcttcctctactctcttcactctgattctgttttcatttaagaaaatttcagaagtagtgaagctaggagagttaatgagtagccacgttgaccctagtaggatcttacccattggagaaaagccctgttttaaaacgatgcacaaagaataagcttcaatgtcttcctctcctcaaccccagcatggagcacaatgcttatgtgatacacggaagtgagaaatttaagaagtgcttcactttaacttttctcaataagtaaataaaactgtcttttctagagtccaacacatcccaaagtgtgtgactttgctattttaccttaaactgactactctctgaatagattttcatgttatatagtctgagacttttctttccatcctgctggtgctggaagacatgatcataactactcacaacccagatcttaaaatatatatattgttacacttttatatacttgtattaaagcatcagttagtaagtttcatggttgtttcttctgatgtaaaagtaactgtagttatagatcctccagcacatgtcacactgaaaacctaatcacaaagtcaaaatatgtgcataaatattagcttgattatgtgtcacatgtaccccaaattacacatatatataccttcctcaaagattttttttttgtggggggacagtctcactctgtaatccaggctagagtgcagtggtgcgatctcggctcactgcaacctctgcctcctgggttcaagcaattttcctgcctcaggctcctgagtagctgagattacaggcacctgctaccatgcccagctagtttttatatttttagtagaggggtttcgccatagtggccaggctggtctcaaactcctggcctcaggtgatctgcctgccttgacctcccaaagtgctgagattacaggcatgagccgctgtgcccaacctgagattttttttttaaaccttggattttcaaataactttatagttggagaaaagttgcaagaatagtatatggaattcgttatgtccttactcaggttcaccagttgttaacatttgccacatttgctttaccattctctatatgtgtgagtgtacatgcacacatgagccatttgagagtatgcatacaaaacatatttatgtagatatgtatttcccctgaaccatttgaaactcagttgtagtcatcattccttttttaaataattcagtgtgtatttcctaacaaggactttctcttacaaaatcagagtacagtgatcaaaatcagtaaatgtaatcttgacacaaaatctcacctagagtacatattcacattgcaccagcgtctgcataatgggctttgggattatttttttcccagtctgtgatccaatccaagatcacacattgcatttagttgtcaagctcaccaacttttgaagcatcttcctgatacgttattttatttccccatttgtttactggtcacagaccagtaagagcaagtaaacttcttaaagtcctgccaggtgtgttggtgtagaagcgggaagatagagcctgtgcttcagcacaggaggaagatttcaatttttagaattaaaattatggcaaggaaggacctgtgtttcatctagtattcattccttagagagcacggatataatagtctgacaatgctttttattagtgttttcacttagctgcagattgagcatttactgtgtgctaagcactgaggatgcaagagtaagcaagaacagagatggcccttgtgggcctagtgggggacactgtcatgtaattaagtgacctccaaataaatgtgtgatgacaaacgttgatgaaggctatgaagcaaaggcacttggtgccatgagcataccatggtaggacaggtaacaaggcaggggtgggtgctaggaatgtagagaaggatgaggaaaccttctctgaaaaaaatgatatttgagcagaagagtgtgaaataagtgacagctaagaggaagaaaaaatgcattagagcttgcaaaaaattctgaacattagaaaaagtcagccatttctgggagagagttatctgggagcagcaactgtctcacaggattttgtccaaagtataaaataaggaagtgtgttaggctattcttgcattgctataaagaaatacccgagactgggtaatttataaagaaaagacgtttaattcgctcagagttctgcaggctatataagaagcatggtgctagcatctggggagcctcggggaaactacaatcatggcaaaaggtgaagggggaacaggtatgtcatatggccagagcaggaacaagcaggggtggagatgccacaaacttttttttttttttttttttgagatggattctcactcttgtcgcccaggctggagtgcaaagtcgtgatctcggctcactgcaacttccacctcctgggttccagcaattctcctgcctcagcctccccagtagctgggattacaggctcatgccaccacacccaggctaatttttctatttttagtagagacgaggtttcaccatgttggacaggctggtctcaaactcctgacctcaagtgatttgcccgccttggtcaattaaagtgttgggattacaggcgtgagccacagcacctggccgccacaaacttttatatgaccggatctcactgtcatgaggacagcaccaagccacaagagatccaccttcatgacccaaacacctcccaccaggccccacctccagctttggggattacagttcaacaagagattcaggcagagacaaatattccaaactatatcaggaattaagtaggctttgctgtccttttgcagctttgagtcaacccatatgagagtgaattctccgatcctgtactgctcctgggaggaaagggagtgggctttgtgaaaaatggagatttagtgagtaaagtgatgagttcactggaggaaggttggctagaaaaaaagtgacatggctgggcatggtggctcacgcctgtaatcccagcactttgggaggctgaggtgggcggatcacctgaggtcagaagttcaagactagcctggcaaacatggtgaaaccccatctctgctaaaaattcaaaaattagccaggcatggtggcaggcacctgtaatcccagctactcgggaggctgagccaggagaattgcttgaacccgggaggtggaggttacagtgagccgagatcacgctctgcactccagcctgggcaacagaggaagactccatctcaaaaaaaaaaaaaaaaaaaaaagtaaaattgtctttttttttttttttgcgtaccaaatcctatcaatgaaagagacaggaatagatttgactggaatagtcatgggagccatttccaggctctcatagtcttagagatgacacttggtagttcagtgtcttattgtgcttcttcaagcacatacagcctgattgagagagactcaagacagcatacaaattctaggcatttttacatctgcctagctgtagtgaattagtcatacaataattatttaaagaaagaaatgtttcctccatgttgtgctggagatacaatggtggagaggaagtggagatcaactattgatcgatttataatttacacaattccacactttggagaaaacacattccttcttcctcaccatcaccctcaccattataattattatcaattaacttgttcaatatgtaattttgaagttgccaatcatttaccagtgtgattcatcatgttaaaaggaaatggcttttacattattaatattctgcaataaaagtttgggtttgtgtgcttacagttagaataaaagaaaaatgctttgtactaagactatgttaataataatgataataataaagaaataacactttctccagaaaggaaatttcaggaaatctgtttcagaatacctgtctctaccacaagagctttctaagtcatgttttgattgctaacagcattccagtactgggttggaacatatgtattccttctatcaactgaggaacagcaggttttctgttattgcccatgcatggtcactctctgcttataaaaattcatcacttctgctgattgcattgtgtaggattcctactgattaccatttagatttgttaagtgacatagcacattttatggagtcaggagccagtaaccatcaaggtcaatagcagcaacctgaatcagttataaatgaattgtttaattacccacgcatgatcaatgtgtgcactgccataaaagattagttctagtccctgaatgtgtgtgtgtgcctgtgtgtagttctaagggattacagacttctctgaagtcttcttcattgaaagagattgcaagtgagtatcttttcagtggaatagaactgagttatggtaacaacatcatctatacatccagtctaccgtggccactgaatccaatgacttttttttttattaatatgaaggtgcctgcctatccaaagcactgcttactgtatttcattacaatgtattgcttcactcaacacactctgaatagagaagatatgctctacagcttcaaattcaggcacttcctccaagcagagcttgtttatctgtctgcaacacacttggagcatttgaaagactagtgatgaaatccattcatgctgtgaaaatgtgttgagcatcatggccgcttcctttacaatggcctggcatggaaggttggagaaggccattgttaccatataaatgactgtctatttgcctctggcatgacttgtccagacaagttgcatcattttaaaatgaatgaagttctagggagcatttttaactatagtaccttagttgtaactttgagagtttttaataagcttgcaaggaataaatttggaatctagagtagtttgttctatttctggaaaaaaaggaatgctttgtacatatgtaggatcctttacctggccacagagtttggtttgagaagtggacttgactctggatagtgaacaaaatgctttttcaatttttaaaatggaggcacctttttttctgagagcatagtcagtaactccccaaatgtgtgtctcttgtgtgatagaggaaccaagtaagagaatagcttggtgtgtgcctggttttcttccacaagtacccaattagtaaagggggcttttgctttttacaaagcatgaaaattaggggttgcctataggcctgagagccctgccagacagttgcctaatgccaccagccaggattatggaaaagaagccttggcatactattcaatggcaccgattcacccaaattgcaactgaggaaaacgtgttcatttttcaaatagagtttgagtaaccatagacacaggcaaagtaatctctccatttggtcacaatggactaaactaccttgttctattgtctaccttctctctcactgactccatcaaggcagacttgttcggtaaactattcaggtgactttgtgaacttttatttggtgcaaggctctgttaatagctgtaagtcagctgtttttggtcctccctctcattctcttcacactgattgatgaaatgggaaacaggttgaagaagctcacttttttagatgacaagtattaagttgacagataaacctttaggaggttccagttcatttcaggaacgtgttgacatgaggtctttaaagatcgacagtcctattagagatagagaccaccaggaaatcataaggaaaagaaaaatgaaggaaatatctagattcagtaggaaattgggggtgatgagagaattttaagaaaaacgcttgctttatcaccagctgtgtcattttgttcaaagggacaggaaacataatactctctctgaagcttaacagaactgcagacctattgccacagttttctcttttgcataatcttgtttagtcacttaagagctagtgagtgacagatttcacatgagaattggtcacgtacaagaatgttaatgcagaactaggtcagattatggcatttcacacatgcaagatgggaacacgcttcctctggttagacaaaggcttgacgattgcccatgcatctggtcctgctttaaaggaagctcatgtaatcatgagaactcacaatgtatccatagatttcttagatatcaagtttctatgagccttggcattgtgtatggttttattgttattttgccaaacgagggttttctagcttcacttagtatgcctggagaaagctattttggttcggcccagctccatcactctaagaaatgatgaggatgagcgctctcagtttgtaccgactactcatgagagactaagaactgatcatctggctgctggcaacattccactgcaacagctaatacagtgttttggaaagatgccgacaacaaccagattgcattaagcactttaccgtttaagatcagttttgcagttcagaacttgaagtcagcagcagatctaccttttagtttgcagtttactttgctccgagtttttcatgtcttctgtgagccccccacgtttatctcagggtggattctaacacacatatgcttatgtgaaaatttcataatactttagtatttaacaggcacttttatataagtcaattgatttcaggacaccccctcgccgccctgataccaaaatctgcagacgctcaaatctcttacataaaatggtgcagtgtgtacatataacttacacacatacttctatataatttaaataatttctagagtacttataatacccaatccaacatagttgttatactgtattgtttttgtgtttttaattgtaatattttcatttacctgcagttgttgaatgagtcgagggcaggtagatatggaaagctgactgttactacttcccttttacttatattacaatattatctatgttagtgatgttcatagttcaagagacacactaaaggaattacagtatggagtgtctcctaagttgcattgtggaactaaacactagagacaagagtcgagccctggctcaatagagccagtaataactcagtgtctttatgaccctgagccggtgccttaaattctctgcagcgtagtttctttaaacggtggttctaaactaaggggacttttgtccccaggggacatattgtcaattgtctggagatgtttttgattgccacaactgggaagatgctaacggcatctagtgggtagaggtcaggggtgttgccaaatagcctacagtgctcagacagcccccaccacagagaattatcccacccaaaatggcaatagtgtagaggttgaaaaatgtcactttaaaatgtaaataatgtctatcccattatcacaggattcctatggggctcaaccccacattttgtttaaaaaaagtaaaaaaaacataaattgcccttctatgtctgatgttactactatggggcattgcacatatggacaccaaacttttcccttaaaaaggaaaatggatttattcttttagattaaaagttataaataaagctatcagattaaaatatattaaatatatccactgaatcttggtttgtaattttatggttttaaatgaatgctctaaatataaagagaaacaatgaaaagttattaagtaggagaaacctactattcagtgactaatatagataaaggaaattggaatccatgcaactaatagacttttctattagggtacagccacagcacgtctttcctaatagaagcaagcctgaaatgataagttgtttggatcacattaattaacattcagctctattagatttgtacctgaggttgggttcattttactggtgctgatgaatatcaaactacacaatatctacgcacattatattagaataaaacatgttttacattgaaggcaaattttagattcgactcttaataatggtcttttatattaactcagataactagagatagtaaaagaatgaattaaaattccagtgagccaaactacaacattgataatagtaatgagaattaattctgtgttgattttatggtgcctttgcctcgtaggtatatataactctggagtttatgaggcatgtttatagatcttaacttcttaattttgtaatgctgtcctcttaaaatttttgcttgagacggacaaaacctcctgaatttcttcaatttacatgggcatttttactaggaaagagcatgcagccttcatcagattctcaatagggtttattaacaaaaaatgttgagaaatcaccttaaaaggcaggcagctcttaaatgcttgttctcactgaagtccttctaaaatgatattgcatggactctatcagtctcttagcagctcatctgtagaggtaccaactgatcaaaaattcaaagttcttaattgacatactcaggttttttaaaatttaaagatccagattggtagctcagccatatagctaaattgaataattatgcaaatgctgcacaatatttaattggaccttttggaatgaaaataacccaggtgtgcacaattctttgcaatctggagcaaccattctaatatatatctgcaagtgacaacatcttgtatgtaaacaggcagaggaaaagagttctggctgccctcccaggaaaatatacatgaaagaacgtttgtgttacagcatttgtgttacagcacatacatatttctgagttgtttgttattaaagtcccattgtatgaaaacaactatatagacagactggcaatccagagagttggtagttacataaacaggtcccacggctaccaataatattaacacggtattcttagcccttaagaaacaaaacacagaaatttctaatactgggagtttaaagtgccacaatggaaaagcaaactcaattacaaatgctggattccacctggagcctattcttttcattttcttacttctgtttctgccaccttcccttcttccgataacagattttcaagtactgctcttagaattgctaaatgtgttcagagaatgtgtgataagatctgattctcctggaaggccaggttattttaatctttccatttctcacaccaaccatttaactaggtattatttgtttctggacgtcacagctaaagacacaacattttacatgaaaatgtcagtgttgaaaatattatttatctatctatcaaaatgtagccacgcatctgttcttgtttgattctagtaaaccataaccctaaacatgacacaaaaggggctagtgaaatatttgccgagagcggtactctaagttaacagtaaataattgaaaataagtaagtcaaaaccaaaaccaggaaagtttgcattcattcccaatcatactttaacagaacttgcagctgccacagattcagacatcttcatcttcctgtggagcatttgtcttttcatagcagaggacaatctctgtgactttcttatatcactgagaccatcttgtacagtttatttcaaaagcaagagtgttctttttcgtttcatgccaccagtgacaatacgaaaccagatctaactgaaacttcactcaacacattcccgacccgccaccccaaccctaatagcctctcataaccaccgttctactctacttctgtgagttcaacttttgcagtctccaaaaagaagtcaggtcatgtgatatttgtctgtgcatggtccatttcacttagcataatagggggactaagttcaagagatctattgcacaacatggtgaccatagcaaataataacatcttgtattttgaaaatcactaagggagtagattttaagtgttcttagcagaaaagaaaatacaatgaggtaatgccggtataatttagcttgattcagccatttcacaacttgtatacatttcaaaacattatgttgcacatgataaatatgtacaatttttatttgccaatttgaaaaacagagaagtccctcttcagatcctgtcctatgcagctgtcactcacttggctttgtaagcctgcagacagtgtcatttaaaatattttcctctgtaccataacgcttttccttttaatgatatataagaataatatttctctctaaatagttatttctttaactttgaaataattcagcatctcatgattttgatttccatttctccatatatacattttttggggctctgttctgggatttagggctaacctttgtcatggagacatctgtttttggcagtctttgtttccagggagtgaaaatgtgtgtagaaagaattgaatagctacatcttaggtgacacaattgaggaactggatgaaagatatttgtggaaagcaacataattattcaaactggaatatggccattgccctgggtttcatatttatcttcataagcaaagtggtttgggattctgtgcaagtataaggatttaggatttaaacactaaaccacatccctgcacggagcacatgggctttgttgttgataatcatgatagtcgcacaggaaacttgacagtgacagcaggggaacagcacagtatcctacttggccactggtaggaggatgcaatttaaatcctggcatgcgtagaatagcctcacttatctgtggattgttattgtaatctacatagtaagtttcaatcagaactcagttttgtgcagttgatttccaattcccgactctgcatcattagggtacaatgttttctgtaagatttctttgtaatattatagagagaagagcagaacaaatgcagttattcctctcaaagttcagctgaatgctactaatagttcaagaatgtggattgtaatggttctgtgcattgaaagaacacaatggcaaatgacaaagatgacactaagtgtgagccacagctattgttttgatagcccactctgcttttctagttaactttcttacaaccatcagttccatatttaagactagaggatcagttctgatgatgctcattcaaactcttgccaactgacatttaatgcactttaaagttgttaaaaccaagagcaggaaatgttacacttgtagtatcaagcctggctcatgagaaagttccatccactattctggaaaaaaaatagaactagcctgcaggacacaaagctacctgtggtgatccgaactatgcttctcaaaaatctttcttttgtttggccacctttataataggagttctccaacagagaaagagctgcttacagcttcagagtacagatggataattgttgctgtgccatctctgaacatcttagattgagggtcccagagaacctcatgtatgtgaatgttagcacagtacaaaagatgggacagagctttccagagcagtaacagacagctgtgcccagcactttcttctaaaagttggagatgctggatggaaaatttgtcattgtttacatagcacccacacacacacaaaaaatcctgactcactagcttctgtgttgtcatttttttgtccatggttctattgctgcctaattttcatacgggaccctcacagtggttagtctgcacagtaaggagtcaactgtgacatcctcatccttgaatgctagactccccactttctcagctcaatattccatgtgtccaaagtaatactgttagtatcctacattattccaggatcttgtcatgccacttcaagaaacaaattatcaccgctttctaagacttaccaagctaggggtgttgtaaagtatgtatgcaattgacttttgacttttgattcttatgttgaaaggcaacatagaaaataagcttccattaatgtaatgatatagtgttaggaagacagtatctacagtccattcaaaatattctgaaaattatagtattgattttggaacagttttgattccattggccatagcgcttaccttaagtcatttttttttaaaaaaaccgtcttatccatttcatatgttttacaggcactaaaatggggcacagagactaagtcacttagttgagttaaccaataagtaaaattgccttcatattctgcttcctaatgttgtatcttctctagcaagttcaagagagcttactttctggaagctttgcttgttagtaggatgtataacctgtgggaaaagacccagcagcatccacttttacttatctccttgccttctctgaaaacacactgaacagaaatatccccatctctttctccatcgtgggtttttcctttgggccacaaatagtgaacgccactgctttacaaagttattcttttcaccactaatagttctttgatgtcattttttgtacaagtgtcaaagtttttctctagaggcttccacacagttaagttcttgcttttggattctttctaaaccaaataaataaatcttcgagactgcaggttaatcaaatgccttcaaacatgaaggctgtttaggagctaagctgcacagacattttccaacatttaaactcttcatgcagcatcttcctatctcaatttgtacccgttagccagttccacagggcatattgggaaataccttttattttcaatatttatatttgtcttatagatatttgtcctttcaagtaggacaaagtggtaatgacctgcctctatcaaaaaattctacctagtaatccaagataagcagtgtgttcctagtgagttgcttacataaaagccaatatattttgtactgaatagtatacagtgttaaaaactcagctttttgagggacccaagcaagcctaacctacatgattttacaaagacaatacttaaaagtcataaagtactaagtctcaactttcagacttaagactcataaacgttttaattttttatcccttaaaaatgttattttttggctaacagcattgaaataagcgttactatagattaatactatgaaacaggaacaaaactgttgagcagacattctcccagggaaggactgtgtgtgaacacattaaacttacgcataaaagtggagactgtaagtgggttccagggtttccccacgctgactttttaaattaaatgtggcagtattgctaaaaataaaatttagtgtttctcaaattttttttagatagatacctcatatggtactcacaagtagtgtgaaaacttaagtagtatatccatctaaagcagcacaagcaatatgtcagcaccttttcactattaccacagagaaatagtgttggagaccatattgaaaatgactgtagtctggctgaggagatattaagtgaccagatggcctctggcacttctgttttcaaagctgccttatagtgcctttctcactttgtgataccaagctgctgccatgctagtgtccaccctcgaacaccatgccactcagacatggtgggattcgtgtttctgaaggggcacagtaggaagctcattcttgggccttctggcctgcctgagactgtgctagcaatacagtctcattgtgcacaaaagaagccatttttcttaacacctttgagccattaatgaaacctaccagttagaggtggtcaaaagacaaaattacaacaaatttagcttaaagatgtattggttttacttgcaattgtagaattgggcaacaccttgttctataaaatagtatgttctgatgagctgggcaaggtgttgtctgactttatggacagaaaaggactgaagaaagcagaaacaaaatgagaagtagacaggttgtttcaacatttccttctttctaggctttaagcagagggtactttcttatgctggatcaggtaaagggccccttctgcttggttgctatgaatctcctgtttaaaaagaaaacaaaaacaccacacaaaaaaacctgacccattatggtttggtctggttggctgaggcctagggccggagtctagtctaaaacaatggcctcccctaaacttgaacagggttacattgtagaataacataacaggaaatgaaaagagaaatgtgatgctcttcaacaattggtttatggggccttttaaaaagtgtgtatagagtcaatgatgaattaagatgcagtgtgaaagaaaatgacacaggacagatattcagagatcatttgttcagttttaaaatcagattattagtattgctgttgagtcatttcagttccttgtgtattctggttattaatcccttgttaaatgaatagtagaaaatattttctcccactttttggttgtctcttcactttgtagattgtttcctttagtgtgcagaaggtttttaacttgatgtaatcatgtgtctatttttgcttttgttgcttatgcctttaaggtcttatccccccaaaaatctttgcccataccaatgtcttatagcatttccccaatgttctcttctagtagttgcagaaagcacttgtaatttaacagctcaggaagggaatcaaatcattcagaccaactgaagctttcaaaatgttactgcttgaatgggcagaatatccaaaaacatttattgtgtgatcctaacatctacatattagaaactgatagaaaacttctgatgtatcagtaagatgataattacccttgtaacatttctggaagcatgtatgtatgtatgtatgtatgtatttaaacgaatgcttgtatatctagcatctctttcaattgactcaatacccaaggaattttatctccattttacaaataagagagattatgacttatttcaggtcacagaagttggatcacagctggaactttagtccagttgggtctagaaattcaattttctttttactttcatgactaaggaccactctataactctgaggtaaaaagagcaaacataatgaagttatttagagtagtgtttctaaatctaattttgcatgagtcccttggggaacttttaaaacatgtagataaccaggcacttcctgttatcctttttccactgcccctagcagacagacttagtatgtctagcttaggtaacctgggattgtgcaaaaaagtaaatcttcagagtccctctgaatatcaattctcattatgcaattatgactcctaaggcttaaaagtatgaaataaatctgtagagatcttaggatctcctgtggaagttgtttttgtgcctaaagattagcttgtttgtaagttcccatactcagtgagaactgaatattttaaaaaactggtgaagggtggcactgtattttaacgtaaaacatgcaggactagatacagtcacggccattcaattttttaagttgtatatctttgggtgagttacttagcttatttcagcccagatttactgctatgtaaggtgtaattataattattgagtaaaataaactaaagcatttaacacgatgtctggcagagactaagtttttaatactcttaaaaacatcttctggaggtaggcttctagttaattagtgttttaattatgtaattataatttttgtttcctttctctgtcctcatatttgctagaaaaacactatgtcaaccatttgatcatactcatttgtttctaagcatatatcttaactaatctagagacccatattcattgagcttttggaatgactggaaaatttctcaaagcttcctcccttatctacggtttagtttacaaaaattaaataagcttatgatgtgtgtctcatccacccaagtacatctgcagggctcctctattgtaaatcagctgcctaaggctcaagttagacacagtcaaagccgtgtatatttagggtacataatcttgatgtcaagtgctggagtcttgggcaaacttttcatctttttatgtaaaactgatttccattaagtatgaaaacaccttggtggtattgattttatgaaccctgtacattccctgcaatgaagacagattttagggtaaaagaggatgtttgcaagaaatggtgagttttattgtaagagaacttaccggccctatagagaggagaaaacaggttggaatgtccagctgctaccacccaacgggatcccagcacaaagaaaacagtcaaaattatgttcatcatgacagagcaaatgagcttttggggaaaacagaagcaaaataaacctttttgaataatttattattctataaacacaatcataaagcgtaatggtatcagttcaggagaaaggtcccactgctcctgtgttctacgtcagtggctgcagggccacagcaggcagagataaccaagcatgctttcactgccctgatcaccattcccccattaataatttgcttggccctttccttcctactgcctgaagaaaatcaatgtttggcagctctaggttgaattactgtttattttatctttagcctacacaactgcaaaaggaaagcctgagttttccagtgcatattccaatacctgtttatggaagtgagaacgagtcagatagtgatgtattttttcagagagtttcttaagccagctgtggataagaaggtccaatttgcattggaactgctaactaggactcagggaaatcccatctggtttagagaagagtaaatgaaaataaaacagaattgtgaatgcaatgcttcaataattagtttgcaaaacatgtatccactgccttgtgtgggcaaagcaccatattaggaactatagaggactgcaagaaaaacagaaaaacagagtgggctccttttgcaaggtattcgtggctattccaggcatcctttcttctttcagcagtgatctcctgagttattactatgtgcctggcgctgttctgtggactgcggacaaagacaaagtctctgctctcttggagcttatattccagtgaagtgggggaggactaaatgtaaatacatgggcaaaagtcagctaataaatactgtgcagagaatcatgaggagttgatgttcagttagtgagcaggctggttcgttactagggaagatgtgaagggcctctgagaagtaaaattgtagcagagacctaaataacgagaaagacctagccaagcactgagcaaggcaagggatgttcctggaagggaagccagagagtatggccagagcccgagatatcctgggtctggtgagtcatagatgagactggagtactggagtaggcagctggcaggtcacagtggactttcccagtgagtcagggattttgatttggggaaacctttggggattttaaagaggaaagtgacttgatctgatttttattggatactttaagaaataaattttgttttgtatacttaaggaatacaacatgattctatgagatatatatatatagtaaaatagtcaccatagagaaacaaattaacatatctatcatctcacatagttatacattttccccttatgtcaagagtagccataatctgatttagcaaaaatcatgaatacaatacactattactaactacagtcctctgcacattagatctttagacttgttcatcctaaacacctgttacttggtattctctcacctacatgtcatttcctctcccacctctagtaaccactgttttattctctatctctgtgggtattagacattgtttttttagattccacatataaatgagatcatgtaatatctttctttctatgcctggcttatttctcttagcataaaaccctgcaagttatgtatattgtagcaaatggcaggatctccttatttaaggctgaataatattccacttaatattttataatgtgtccatcccttgacagatacttcgattgctttctatcttggctaatgtgaatataggtcgggtttggttccaaaccatttcaacaaagtgaatattacaacaaagcaagtcacatgaatttcttggtttcccagtgcatataaaagtatgtttataccatactgtgctttgttatatgtgaaacagcactatatcttttaaaaaaatactttgataaaaaatactttactgctaacaaaaatgctagtgatcaacagtattcagcgaatgtttttgctggtagagggtcccgtcttgatgttgatggctgctgacagatcaggatgtgggtgctgaaggttgggatggctgtggtaacttcctaagacaaaaatgatgtttgctgcactgactgatttttcttatcacaaaagatttctctgtagcatgcaatgctgtttcatagcattttaatcagagtacaacctctttcaaaattggagtcagtcctctcaaactgtgcctctatcaattaagtttatgtgatattaatatttaaatattttgtcatttcagcagtgttcacagcatcttcaccaggagattacttcttatgaagtcattttactaatccataagaagcaactccttaaccattaaagttttttaagaaaaattaattttaatagttttggggttataggtggtttttggttgcatggataagttctgtagtggtgattctgagattttagtgcacccatcacctgagcagtgtacattgtacccaatatatagtcttttatcccttgccccctcccaaccttcaagtccccaaagaccattatatcattcttgtacctttgtgtcctcatagcttatctcccacctataagagagagcatacaatatttacttttccattcctgagttacttcacttagtataaatggcctcgcactccatccaagttgctgcaaaagacattattttgttcccttttatggctgaatagtattccatggtggatatatataccactattaaagttttatcataacattacagcaattcagtcacatcttcaggtcttacttctaattatcttgctatttccaccatatcttcagttacttcctccactggtcttaaacccctcaaaactctccatgaggttttgcattaaacttcctcccacctcctgctaatgttgatattttgacttttctcatgaatcacaaatgttcttaatggtatctagaatggcggatccttctaacaattttttcaatttatttttcccagatccattagaagaatcactatctatggcagctattgccttacaaaacgtgtttcttaagtaagatgttaaagtcaaaattgctttttgatccatgcacagcagaatggatgttgtgttagcaggcacgaaaacaatgttagtctccttgtatatctccatcagagctcttggatgaccaggtgcactgtcaatgaacagtactattttgaaaggaatcttttattccaagcactaggtctcaacaatggacttaaaatatttagtaaaccatgctgtaaacaactgtcatctaggctttgctagtccacttaaagactacaggcatagtacatttagcataattcttaagaaccctaggaattttgaagtggcaaataagtattgactttaagtcaccagctacattagcccttaactagagaatctgcctgttctttgaagctttgaagccaagcactgactcctcttctctagctgtggaagtcctagatggcatctttttccaatataagaccattttgtctacattaaaaacctgttgtttagtgtagccactttgatcagttatcttagctagattttctggataacctgctgcagcttctacattagaactcgctgcttcactttgtgcttttatattatgaagatggcttttttttttcttaaacctcatgaaccaacccctggtagcttccaactttacttctgtagcttcctcacctgcctcagccttcatagaattgaagagttagggcctttctctgcattagggtttggttaacaggaatgttgtggctagtttgatctatctagaccactaaaatattttccatatcagcaataaggctgttttactttcttatcattcgggtatttactggaacaacaattttaatctctttcaagaacttttcctttgcattcacaactcagccaactgtttggcccaaaaggcctagtttttggcctatttcagctttcaacatgccttcctcactaagctcaatcatttctagctttaaagtgagaggtgggtgactctttctttcacttgaacacttagaggccactgcagtgttattaatttgtctaatttctatattgctgtgtctcaggaaatagggagatgggggtggggggctggagagagacaaggatagacagagagagagagagaccgacccagagagacagagagagagagagacagagagagagacggagacggggagagagacggagacggggagagagacggagacggggagagagacggagacggggagagagacggagacggggagagagacggagacggggagagagagggagacggggagagagagggagacggggagagagagggagacggggagagagagggagacggggagagagagggagacggggagagagagggagacggggagagagagggagacggggagagagagggagacggggagagagagagatggagagagagagagatggagagaaagacagagagagagacggagacagagagagatggagacagacagagacagacagggagagagatggaggaagggcaggttggtgaagaagaacacagacaatattaagttcactatcttatgagtgtggttcatggcaccccaaaatagttataatagtaacatcaaagatcacagatcaccataacagatacagtaagaaaaaaagtagaaatgtgagaattaccaaaatgtaacacagagttgcaaagtgagcacaggcaggtagaaaaatggtgccaacagagttcctggatgccgagttgccagaaacgttcaatttattaaaaatgtatctgtgaagcacagtaaagcaaagcacaataaaacaagatatacctgtatttgtttttaaatataaaaataatttgctttaatgctgaacaaaaatgtcccatgtaaaaaattcatgtgctatctgttcccaaactcagtttccacacctaattacagtaaatagaaaggagagaaaaaccaaactttcaagatggaaaggagaacccaggacagcctcaaacccaacacttagaatggtatttctgcatgcccaatctacagcaaactttcagacttaagaaggaagagagaatggataaaacgttacagaagacagtattacattttaaaaattggtaagatagtagaatgtttagatctggaaggactttaaattaatcttttttccttacattcagataagctttaatgtgtactaaattctatcccaaaatctctattctttgtgaccctactgtaccctacgcagatttttgttgactcaatactccactgcacttaatttgttttttagtctcagctagacctgaaacaactttaggaaagggatagtgtcttcttgcttacttttatttttcctaccaactagaatactaataatcattcaaatgtttattgaatgaattaatggataagcaaatgaattaatataattagttgcttatattttaccccccacactagcctatagctttaaagttgtggtgactacaatgtctagtcacttaacctcacagggcagatttgctcaactaataagattttgaatgagaaagtgcttaaaaattctaaaagtgcttctctaatatttgttactattgtgttcaaagactgttagctaccaaatgaaggtttcatagtcaacagaggaggctgaatcccagacaattacaactgaggcccgggctactccaagtgtgatctttggagtatctgactcagcaaacaaacaagaatcacctcaacccaaaaccctaacccaaatagccatcattactacttccttccaatctccatctccacaccctccaataatgatgaattcttaaagcttgaatacatgttttaattgtaaatttgggttatttctgcatgtaattttacagttattttatttcacccttgtgagttggagttaagctctgaaaaggtcttattttgatgtctttccataagattgtattccttttttggcaagagaacagatctggagttgagctcctgccctctaccaaactgtgaaatttgagacaagtcacttgtcccccatgccaacccctggggcctcacttttcttattcaaaaagatcaaagattttgtcctaactcatgaaatcatgagcattacatgtaaaattaccttagaaactataaaatattcatttcaaatgcatcaagatgttattagctatattttatgagctcagcactccttgatggtcctgaagagaccaaaggggctgaggccaaagggagaattctccttaaatctcttggaaacaatctgacagaccttagaattgtgtagtaagatgaggacataaaggaacagagggtcaaggtagtatcttagctcctttctcccaacgtgttgatactggttaagatacacaaaagggaaaacccacctaagaaactgccaggaattcttttttttttttttcattttgttttaatgctaacttaataatcatgtcttagtgtaactaagcttttcttcatcaagaacattataagctcattgatgcacaggctaaatctttatgcttatttggtgctttttaatctgtctagcacagaatagggcacaacacaggtcttcagtgtgcctttgctgaattgaaatacaaaaaaatagcacatctttcaatacttgaagctcatttttataaagtatatgtgtgtagtagggaattctaaaaactattttttgctggtactagtttatttaatcaagaggaaatatcttcataaagtcaaacaaccagaaaggacagtgcaaatggccctcaaagcttgagcttagcaactgctcccctgttcttagtcttgccactgtgtggaatttaggacttctatatgcagatagtttgttacttgcaaaccattagaccaagcttgtcctacccacagcacacagggcgcatgcagcccaggacagctttgagtgtggcccaacacaaatttgtaaactttcttaaaacattgagtttttgcaatgttttttggtctcataagctattgttagtgttagtgtttttttatgtgtggcccaagacaattcttcttccactgtggcccagggaagccaaaagattgaacacctctgcattagacccttttaatactattataggtaatatattttacaacataaaaaaatcatctgtgtaccagtcagaaatgaaggttttgtatgaaacattttcattcttcagtatcaacagcccaagattctcctgactttatttctccagccctggcccctcacctcaccatctcttagctggccccagatatggcccaggtgttttaatcttctgggtgatctgatccagcctcttgactttaaatggcatctatatgatgataattttcagtttaagcctcccttcagaattccagtttctcaaatccatctggctattcaacctttccactttgatatttaagagacactttgggttcagaagagctaaaacagaactttggattccccaaacttgcatgtcctccaaattttctcatctcttaaatttgattcaggtgtacaaactccacatttgtcatcattcttgggcccctgtcccaactctcttccccacacccagtcaagaagtcctgttgactctgcctcgataacaaattgctcacacatttcctttgctccagctacccatgctgtagtgtaagtcaccatcatttcttgcttgaattctgcaacggcttcccaattgatctccccaattctacttttgcttcccaaaagtccattctccataccgaagccaaagtaatctttaagaagtatacatctaaacaaaacacttcttcacagcaaagaaatcaatacaatgaaaaggtagcccacaggttgaggaaaacatatttgcaaaccatatatctagtaaggggctaacttccaaaatttataaacaactcatacagctcaataacaagaaaacttataacccgattttaaaaatagacaaagtaacccgaatagacattcctctaaaggagacaaaagtggccaacatgtatgtgaaaagatgcttagcataactaatcaccagggacatgccaataaaaatcaccatgagatatcacctcatacatggtagggtaggtattatcaaaaagacaagggacaacatgtgtcgatgagagtgtggagaaaagggaaccgttgtacactgtgggtgggaatttggattggtccagccattacagaaaacagtatggaagttcctaaattaaaaatggaattgccatataacccagcaatgccttttctgagtatatacccaagggaaaggaaattaccatcttgtagaggtatctgcactccatgttcattgcagcattactgtaccgcattatgaaatgggttccttcaccccttttctgagcaccctccatgtctacagaagaagttatgaggaacaaaggtatatgcagggctcgttttgtaatgctgacaacagcaatcctcacatccagacttccatgtccatgtacagggttctctactttcgttctaagtcaaactgtgattcagaaatgagccatccattctcccagaattcctccattcaccccacagacacaaaaatcaaatctatgaaaatgtttttgtatatttcataggagaaacagatgtggaggcttaactcatgtatccaatgccaaaagtcttcaaaatcttcattaggtatttgttatgccaacttctttctcagccctcccggtttgtaactttttaaatctttacccagtgttgcacgaagactgttgagatggttccctctgccttcctctctctagtattctccctgggaagtttaaaatatataatgttatgtaaagtaactcactggggccttcctcttgggcctcacctctatacactgaagacaatgctttctagcaaggaggacccatgcttccagagaggagggtttgcaactggagtaacttgagtatgtctttgggattcttgagctcaacccaaagcagttcagaaacatttctttgaaacaagttcccaagatgaattctaacaactgtaatatcgcatttggcattttaaaaattttgattttacatttagacagagctattaggacatggtgggataaaaatggtagtatcgaaatatactgtttcaaatcaaattattgtattatttgttctcaatgacagacataacccaaacacattcttagtacccagaataaaggcacagccatgaaatcaggcagttattaataaaaacctagtgtagatagctaatgaaagatgaaaatgaagctgtgacatgattatgaactgctattagcaagcaatgtcattttgtatcttagagaccaaacaaggtttgtgtatgtgaactaatggttgacttatatggtaaagatatacatgcattatattcaggctatgttggcttcatttgaaactacagcttccatgggtttaaaaaatacacatatgatttgcaaagtgacaaccctaaattttcgtatattcaattgttcaaaccagtgatttctagaatgtaagtggtgtcctacttgtaagagttttaaaacaggcaattttggaataggtaaattactcagtagaagccttagagaacccaaattgctgatgtatctttttcgaaatgcctctcattatccaggagaatgtgtgtattggaagtatcttattctttaagtctcacacttagaccggttatgtttcctacttttaaaaattgtagaactttattctacagatgtcatttgatgccttttgagaccgaccatatatgcatttatacaatcttaattcaatgttaaaagtataattagtccaaaaaaatcaactaaatggcaacaagggtttttctttttctatattattaatttttttttcctccatctaaaactttccagctgctctttgtgaagttcccagaataatgattaacattattaaaccagagactaaaaatcttggtacggactgacccatggggacacattgctataattattttaaagtaaaataataaaaggggcgtcccatagcgggcaaaagttggactcatcctcaaaatttactctatttgtcaaagtcccctaaaagagttcttaggagtggttggaattggttgtcagaaccaggtgctctcaagtgtcttgcctttgtggttcgcctacctgggtttcccagtccttggttgaacattaatgttctcaacgagatataatactgaatataactcttgtgatctcttccagtggaggctgaggccatttctaaaaattccttccctctgtttcttctacagtatcttcctctccgtgtgcatacatgtgagaggcatagttttccccaacgtacttcagataaaccttattggcatagttttcctcaaagcacttccaataaactttattcctttcatgattgtcctgtagtttacagacactgatattgtactctttggagtggagaggggttttgccattcttacaaaaaaaaaattggctattcctccatttatcaggctcattttattaacattctactgtcatcattgtgctctgtcactttgactaagcccaagaaccctcccacagagcaatgttaattataacccctctatgcccgtaaaatatgccatctaaaggctttgaataaatttgggataaatttcctgaagcagaactcatgaacccatatgtattttgattccaattcctgtcaatacaggttctagttcaactcccaacacacacacacacacacacacacacacacacacacacacacacacctctcacatgctttccttctaattggcaagaagccttcagatgtccttcacccctactggaaaggcatgaaacaaaacccagtaccttcctcctacccctaaactggttttgtcttgctgcccctaatcctagcttgctgttctgtttttctattttcccctaaatgcaacttactttaagcatgtgttaactggattaacattcctacaattgaaggatagtatatgataacccatttgtcagtctagctactttcttctcttttaaatgtctacttacgacgtacatccagactgcacgccctttttattttttcaaagcaaagccaaaaaataaagaaaacgtaaaattagtttttaaagaaaatgcacaatctgtttttaattttggctatcacgaaaaggggaattaaccagccaaaaaagcaaagcaaaaaaaacgtgtcccctgactgctctgtctgtgcctttcaagcctgtgcgtctggttgttcatctctgaaagtgtgtgaaatacttttttctttaaactttttgtttttttctcccttcttgtttgggaattaagtgctttttatattatatatatctatatatatatatcaatgtgtttcttttaattgctagatctttatcttagatttgattttatctaaaattatgagaaaaaaagttatgaattgttttctgcagtttttccccactccctctttaaatgtggaacaacttcagctgcagaatcctcacatccacatctttcaaattagcctggtctcattgccaattgcgtgcaacatgggtggcataaggaagatggatgatgtcgtttggaaaatgccatttctctatagagaagtaattagcaacccagtgcgtgggccccctgcttagtagtgcgtctcaatcacctctgtagatttctgaacctcccccactctagatggggctgtgtggctgccgatgaagttgttcaacttgaatgcataaatctagtcttcttgtttttgctttaaactttttgatcatgactactagtattttatgtattttggctatttttagtaggaaaaagtttaactgtttttattatttgaaaatctttaatgaaactgtaataatttttggagtaattgcatgttgaagaagttgcagcttagggtgtgtgagattgtcagtgttagagttctgttctttatttccatagatgggcatgtgtaggctcatttgtttttgtatattgcccatcccttccttacagccagaagctctaatgcagctagatcactccgtgccgcccttacatggacatggcgactcacttacacatttactcctatcatcttcatctcctgtgtagttcactcatagatatgaccctccccttcctgcatctttccttcccattctccccctttctttagcattgttaaaatttatgtgctgtcatccatctccctaaattaaagaaagcctaaaatttgtcaaaaagacaaaaaaatatatatatctgaaaacttataaatgcagaaattcattcaaaacccgttagagtcatagaattttttgaaaggcaaattataaaagtaaacaggtttttttgtttggtttttcaatcatagcaatcggaattattttaaattcaaaaattgatgccctcccaaaccccccaaagtaaaaatttgttaaagtgcagattttttttttctttttatgttatgtggtgtggatgtatgtgttgttgcctccctgtatcatcctctgttgtaaattattatatttgaaaaattagacattttgctcaaaagtttttaagaaatgacaacaaaaaaagcaagttacaagaatgtggcaattctatttgtccaagagcattcttacacaactttcttttgtaaatttttctttcatgccaaaaaacatgcgggcaatttgttgatgtaagttgactataaattaatatggtatgcttttttagtttaaattattttgcctatatggaaatgatttctttttttcccagaacagcttctatttttaatttgcttttactttttctttccattcttattatattgtgaatgcctcaatgttatttgctctccttctcccagcttactttggctacgaagttgattttattttctactatataattttgaagactatattttttatttcatttgtgtcgatttgctgaattttcactgttatgttttgtgctgaattgcttctaataatcaatgtgaattctactctcagtagaagggggttaatacattgttcttaccacccaaagaaagcctggcctctttgcctgaactttttcaccaccgtgtttaaagccttgaaagtattggtaggctctatttggtatcttaaaattgtttccagccagtgggaggcctgtaccctagaagaaaatgagttgagttagctccaagtagtaccagtggtatttgcatctttttaaaattccttaaaaagcatttaggaaattagttcttttccttcagcaaaggggaaataaggtactctcaagtgactatggtagagtttggttatccaggatcatactctcacttttgcttcaggctacaaaatcaattatactgaaaatgcagatatcaagaatcccaggtgtttcgagtattgttctatgatactgacgccttccagtgtatggaactaacaactggcaaaaacacagacacacacagaaggcacacacacattctctctctccctctttcctttgtctcttctccttttccctttttcatttctctcaaggatttaatcaggtaagctttcagggatcttaagattctaccaagaaaacatgatgattttcatatctaaagttatacttagaaaatatttcaggtgggtaccatcatcgtgtaactacagggtaagactattccttcaccttaagattatttgaaccaatgctgccttatgtacttcaacatacataagattggtaagaagcactatataattttttcatcaagaagttacttgttttgctttacagatatttgtgttatttgaactgttatagaaatatcaaactgaatggtggataagagtgtttccaagccagcagcttaatatttgggctctctctacctcagtttatgcgattttgtgttgtttgacatgctggataatattttaggtctaaaacttagaacttcctaaatgggatgttgttttatcttgatgcattaaaatattttctttctatgaaaaagatatccaaaggtaaatttaataaaatgttatttttaaaaaatacaagctatttgaattataaattatttcttatattctattatttaaaatagcctcaatatataattatacttctactttagcatgaagccactaaataaaaaagggttagaagaaagtgattatgtaagtgtttatagctcagatacattagtagaaataataacattagtaactagcatttctgaatagtagtaggtactgtgttaaccatctaacatataaaaaatacttgatatgcattattttaatatttgcattgatggtttgaggtagggtattttattattctcattttccagagtttaagaaatttgaccaaattcctagcactagtaggaactcctagagagttccgatgttaagagtctgagttacttcagaagcaaagctcttaataagcaaatgaaacactccacttgacatttcctgttttgtaatacataatgatatcaaggggctgtggctcatcttattgttgaaaaatataatctgtagcctttccaaatcaaacctatttcagacaaaccctttgctggggtggaagggtggtggggaagcgagggagaatgccctacctagaaattctcatcctgttaaaatacaagttaagcctctttgagacacttgagtttttctactgtcttctccccaggtacttgccctgtttgtccatgactattttttcccgaaggttgatagagagcaatttcatggttacaagctttatgatatttatgtgttacaaatacacacttctatgtcaccaaagagctaaatatctttgaaaaattaattcttggggggaaaagaattatttccccttatcatgtgaattttcaggaagaaatttggaataatgcaaataagagatgaagtaaaatacccaaatatataaaaagaattcaaggaattcaagcatggtgtcctgtcccagagtctcactgttcagcatcactgttttggtattttcgtgaactctcaaaacccaaatatctccagagaggcaagtgttgaaacttcatgcttgtttttttgttctttttttttttttttccaaagataacccactgcattcactatcacccacaacattctcacagttcagaagaattctattaaattttttatacactgtcttttttgatggcagtgagccccttttgctggatatcagccctagaggcatgaattatatatctacaaatacactcataaagcaaaaaagccgggaagccttcagggctaaaatagaccttttatatctctaatgatctctctagtttaaagaaaagcacaatcctgccaaaaaggggtatgtatgcctgattttaaaatgctaactttaaagaatatagatagcttttatcccaaactaaagaaaaattctggggatagcataggaaattaggattttgatggattacaggttttgtattactctgctcataaccctttatgactttgggttatttgcttccatgaatacttttgtaggcatgggacacatagttgatcactgacttcatgatctctgggaagtgaagaaaatattatcagctacttgaacatttctcagggtagtcacttttgattaaaataaacaagaagctttgaatagcttcccaccaaactacttttttgtttgtttgtttgctttttgagacagagtctcgctctgtcgcccaggctggagtgcagtggcgtgatctcggctcactgcaagctctgcctcccaggttcacgccattctcctgcctcagcctccccagtagctgggactacaggtgccagccactatgcctggctaatttttttgtatttttagtagagatggggtttcaccgtgttagccaggatggtttcgatctcctgacctcatgatccgcctgcctcggcctcccaaagtgctgggattacaggcgtgagccaccgtgcctggccaaactaagttatttctattaatgatcttatagtaggagaaatacatcactttctcctctcaaatgatgtgtgcctttgatcccccaggacactattatcatctgcaatcttaaacatggaatttaatattaaaattaattacaccaacatatacacttgtcccaggcatttttcatgtttacagttatctaaaatgttctacctattttcattagaattgctatttgtcataaggacccccgtgtactgcagttgacttcattttaaactaaaggcaatcttcccacttcttgagaagccaggaaagaggggttaggaaagcttctaccactttgttgtctaaaaatcagcataatttgggctcagattttcccaacagagggtatcatttatcatttttatcgctgctaccgagattaataacaaaatggcaaagaaaactagagatcagtagttctgaaagattttgttttctaaactctgagatggcatacccatcattttagttttaaaataagctcttatcatttcactttgggactcaccaggcttttagaagctctttataaattaacaagcttcagaaccctcttactgtagagttataaaaaatgtggttactcttttttttttttttttaaatctaagatacttgcattagtgtgttaaatgagagggagatagcaaagtaaagtaattcaactgcagagtgaacagtttgtagattttgaaacaacaagtacactgtggaaactttagctggtattgaaaggagaaaaaacaaaccgaaaaaacaaaaaggcaaatttaagactccggttgggtgtcacagatggtacactaaaattgcaaatgaatgccactctgtaatcatgaagatggtgatcttaatcccacttaaagggacactagcctcttacccaacagtttgcctttatattcaaactatttgtaccagggctttgcctcctaagatatcagttattccttgtcctttaacctagtttcctctttgcttactctacatggggtagatttgtcattgccataaggaacaaatgactcggtgtttgtgccagaaaagaacacacatgttaaacctgtgttacagataagttaaaaaaaaaaatcctgccttgtcctctgaaggtaagtaaaactgtgcctgagaaatccttacggaagctttagacagagtccatgggccttcacttcctctctctcatcactgctctcctattactcaaaccttgccctctttcatatatcaccttaaatctaccacttgggaccccctagcagaagaataataaaaaagtttgctcagagttagttttaggactggcttacctttagggaactgcactccaaatcccatttgtaaaaactagcaaaagtgtgtaaattatgcattaaataagttgtaaggcatatgaattatatatgttcacaatgtaaaaaaaagaaaaaaaaaaaaaacaggtgtctgctggtctagtacagtaagtgtgaatctttggcaaatctgcacagatcattttgctcaatagtttcaaactctgagcaccagaatagaggcttaggtttagagcacatactacaagatcatcttgagaatctcaaaaaggtatttttttaaatttcatagtaaaattatcacataggccagagatgacactgcaacattctgttgtcccttcccttctaaatggtacacattatatgctttctcggttccctcagaaactcagtttctttctgcagaacacaattgttattggctaaacagggagagaataaaggcttctgacatgggcaccaacagtttctcagtgcttgaaggtaggtattagctttcttctcaggaagcccttctcttagcacacctgaaacctggacaatttggatgcatgggaaaggtttcaggatgcaaggtgtggaaaggttgcatcttgaagcatttcctatgcattcaaaaggagagttttaatttgtgaatcaatcttcataggaaaaaccctggaagactgtgtaggctccaaggcttattcacttggagtcccctagaactctggtactgaatcacctccttgtctggctttgttactgatgaggtgggtacctcagctacagtcttatctgttaacagctactcaaacactgattatactatcacagcaaagttattaccaagtgtaagagacacacgtacgtggtaccagttgacagctcaatgggtcagctcagaaagaggccttcaacaataacgtcacattagtacctcaaccttctaaataactggggcagggaaacattcgcagcatccctgcgagtggattttttttaagtgatagtgggaatacatttttctggaatatattcaataaagagacatggactatgacttcttaagattcttcctttgcttggaaaacaacattataaagacactgaagagagatcagttatcctgctgacatagatgcatagcaatcttggccttacagtagggtaagcaaccactactgcagaatatttgtggtacccatgatctgcaaggccctgttatttaatgaactattctgagctttctttcccaacttagtctgtatgattctaagtgcaataacgagggtctatgggtaaacagatatgtttttgccacactagttagcaatcaccaatttaaaaaactcactttgctaagtcaacatttctgagtctaacagtttcaagtcatggatatctaggctgagtattttgaaaatctagcttccagctcagcatatattgcatacagcatgaaagcaatgcatacaaatattagactaatgcaaggcaagctgtcatttaatagtcagggggatttctggaaaagcatggtcaaaatggatttgttagatgaatatttttaactttttaaaaatccctattgctcagcttatagtaaacaaggactgtgattaataagtgtgaaataaaaggaagtaacttaagaaaacacaaaagacacaatcttttatgtttcttgatcttggtctcaataagatggtgaatcggtcattctcatcctcctgggagcaaatgagcagaatcccaagaaggcaataaagaaatcttaaacgcatgttaataaattcttaagttaagcacacaatgtgtgcgtgtacccacacatgccaattttgatagccagccagtatttataacagtatcattgactgaatgtcatcagcccataagcagatcctggaaagaacatatatagttgaattttatctaaataattacttgagagtatctttaaaaaatctaagcccctgatctagggatttcaggtttgggtggcaagaggcatacagaaggctccaaatctgcctagaatgattagactccatccagaaaagatccagatctttttattataatttctgaggcataatctgtgaatgacgttggttgagtgagagttgtttacaaatatactaattgtttttctttttcttttccatcccaggaggtgaattagttatccctcttcttgtagaagaccctttagctacccctcctattgctactcgtgcaccttccattacactcccccctacctttcgccccctcctcaccattattgagaccaccaaagattccctgtccatgacctctgaggcggggttaccttgcttgtcggaccaaggcagcgatggttgtgatgatgatggcttggtgatatctgggtatggctcaggggaaacctttgactctaacctgccccctactgatgatgaagatttttacaccaccttctccttggtaacagataagagtctttccacttcaatcttcgaaggtggctacaaagcacatgcgcccaagtgggaatccaaggactttagacctaacaaagtctccgaaactagtaggactactaccacatctttatcccctgagctgatccgcttcacagcttcctcctcgtctgggatggtgcccaaattgccagctggcaaaatgaataaccgtgatctcaaaccccagcctgatatagtcttgcttccgttgcccactgcctatgagctagacagcaccaaactgaagagcccactaattacttcccccatgttccgtaatgtgcccacagcaaaccccacggagccgggaatcagacgggttccgggggcctcagaggtgatccgggagtcgagcagcacaacagggatggtcgtcggcattgtggctgctgccgccctctgcatcttgatcctcctgtacgccatgtacaagtacaggaacagggacgaggggtcctatcaagtggacgagacgcggaactacatcagcaactccgcccagagcaacggcacgctcatgaaggagaagcagcagagctcgaagagcggccacaagaaacagaaaaacaaggacagggagtattacgtgtaaacatgcgaacactgctcacacgcgagttttcacagttatttctatccacgcctatgaatctttggacggtgagatctcacagatgtcagaactgctggaactatgaaatggggtatataaccacgactctggtggggaaaaccgttttttaaaggacacacacacacacagcgatgcatctctctctaaagctcagccacggctgcggcaaggtcccagcggtcgctgggagacagaaggttttgtgccctgctgtatcataaagcacacacttagcgctctggagccggacggtggctccaccacttccgcaggcctggaaacttccttctccggaggaccttttactaaaaggtagaagacttcatggcttacttgttccataactccaagtgagtctgtaatgtttgtgaagcttgactgtaaccatgttttttctgtttaattatgtaaaaaacaaaactacaacaacaaaaaaagaaaaaagttaaaaaagaaaaaaacaccaaaaaacaaaaacaaacaaaaaaaaaaacccacaacccttatctggttctgaccagtgtgcgtgtaactttatgatctgaggggaaaaatggcttttgggtttttgtttatttttttgataatgactggacatcagaagaggaaaaaaactcaaaacaaaagcgagagagactattgccatatgaactcaaaagctatcatggtgttcactctacatatcaggttatggtgtctctagaatctgttgtttgtttcctataagatgctttgctgaacacatagcaaaattcatgtgacggatgataaattgattcgaaaagctggtcccccaggatctaatttcagaatttaccacccaaacccggaacagatgggtttagggctggtgttatcagagctattggctttacgtaacaatattgttcctgtccattcacccagccaaattgtgttaaagaggaaagccccacaaactaaaacagcctttcctagggaagaggaaggggaggtgggctggatctgtgactgattgaaatgcatgcaaataaaaaagacaatattaaagtctgttatcaaaccagacagtaggggagttcaactcgtgatggaaccacaaaaggtcacacaagccaaccatgtcatgccagagtacaaaacacatagttctttccccgccccgaatgtgacaatggttttcatagtggtttaattttgtagcctgacatttatggataactctgtccttccatttgctcacttctctcttcacccatcttttttaaaaacaaataaatgaataaagctgctgtgacacacacacaaaaggaatttaatagtataatatatatataaataaatatatatacagatatatttatcatggtatgtttgatgggatgactgacacaggaaatctgttaaagtcttaaaatggaatgagaatgttgttttaaaagaaaatagcaaaacaacaaaaaagcaaaccttaaaatgtgaagaaagtgtgaattttagttttgtcacagttaactgtgtcaaagagaattaaaaaaaaaaacttcagattttgtttacatattttactacatttttgctggtataattccttagccacctatgtacatactgctttaagaaatgtttttttcctgtttatttctgtttggtttatattctggttgtctttttctttttgtaaagaggaaacaatgtacagaaaaacaataaactggttgtatggccatagctatccgaaaagcaagagacaaagcaagacaaatattcacacaaaaatgaagtgtgtcctctggagggtcagatatacaatttcttttgtacagatgaaaatcaatcagctgcttagatttagaaatctactcttgctggtctttgtaagttgcatgaatatttgactttgaaaaaatatcttaacgacatggggcaaaaagtgcaatctaaatggtagcctttactaatgtgtgtggaaagaggtgttcctcattatctaatatttcaatgtgttaagagtttaatttttttgttatcattaaaaaagacaggattataaagagatatcaaagcacgattttagataacctaaacggcccagcctatacgaagttgattatatctcgatgtctgtaaaagattgctgttcttggagtcttgaggtcttgtgaattgatttcctgctttctttcatttttttcaatttaagtaataatacatttgttatattcctttcagtgtaagtttctatttggacaattttatgggaacatgtgcattctctatgtgagcttctatcatattcctgttttattagcagaacctaaaggaatttatttaatgatgttgtgacattactgctttttcttttttcttttcttagttcatatttgcattttcgttcaaggatatgcttagcaataaaatgttcttcccaaaa

SEQ ID NO: 239 - DNA, 4305 bp, Homo sapiens
gcctgtctgcattctactatataaagcagcagagacgttgactagcgcatatttgctaagagcaccatgcgcgcagcagccatctccactccaaagttagacaaaatgccaggaatgttcttctctgctaacccaaaggaattgaaaggaaccactcattcacttctagacgacaaaatgcaaaaaaggaggccaaagactttgtaagtttgttcagagtctcactttgtgaattttaacaagttatctttaatggcagaaggattgagaatgaatggaagagagtgtgagcatttagtttagccagatcagaggagttaattgcctgttgtgagtaataagtaatattcagctgcattaaaaaataaatcttgatatggcattaaattgggtaggagtttttctctacacaggctcataaaaatgggttctatagcaaaatgttgtatcaaccatttttagtattgccttattccttagagaaatttattctatgtctttttacaaataaaatgaattctgaagaaatatgaatattcacttttatgtcttttgtagtggaatggatatgaaagcatacctgagatctatgatcccacatctggaatctggaatgaaatcttccaagtccaaggatgtgtaagtacactaatacactaaactatcattatcatttacaagagaagcctatgcattatctctatatcccagcaagggataaatactgcgcacagtagacttcatttcttttaagtaacatgccaaataaaattagactatcagtaccaatgtaaattgaatacaaatgtgtacacacacatattggactttatctatttggattttttcaaattttattggcaggttttttttttcataactatagtaactctaagggaagttttgcattttgtgaataaattttaacatatttattagaactacagtttcagtttgtgaagttatcaaagtgtaacagccattcttatttcatttgtgcttacattttaaaaattgactaatgtatgtacattttgtcccctgcagactttctgctgctgaagtaatgcaatggtctcaatctctggaaaaacttcttgccaaccaaagtaagtataactattgaatgtttctgggttcagctaaatactctaaaaaattgaatggcttcactaaatatagtattctgggtaggatagtatgcaaaaggttgtattctagtttgtctgtagttactgataacttcagcatagtatgcctcttaataatgctgacttagcactcaattctgccaactccttttagacaaatttgccaagacaattaggtattttcatagatcattatggagataaaattaaacattgtgctgggattctgatatgtaaaaattttaaaagtaagccaaatattttaatatgtacattgccattttgaaatctgcctaaagaatgtatttttctacacttggatgtaacaagtatgattcattcattcaattaattaaattatctttcatacattcatcattcatctcacccttatgtagaggacattgtagaggtaccaaggattcaaaatcaaagacagtctcttactgccttgaaggtggttgagatacataacataaataattgcattattataacatgatagtttttatgacataaatatgatagaaggatttttaagcacatatagtcttgtggagattttctgatgagagaaggtaaagaatgaaatcagcttgccatccccttgtcttgggcattacaattctactgagattaggacctttttcagaggtgtagatgagcagtgtggtctctatctctaaagagtgagattattcttttctccccacagacaccctaaggagctttacttgggaatcacattgttcactctagctcagctgactttgtttataattcagctaaacaaataaatggtatagatatggaccataaatggtgccatataaaagtctcagtgaatgctagcaaacataattagtacatcaggcctacagatcatatataggcctaacattttctggctaatataaattagatggggaaattatatttactaattattgtgatgttaatgccttttgtcagtgtttgctttcctaaaatactctctactctggctaagatttggcatatataaaagatggttttatattcagtggagcagaatttcaattcaaaccgcggatagaagcaaaacagtttggtagccaccatcaagtagcaatgtgactatgaatgagtttgtctggccccagattcctcttctatgaatgaagaaatttcaaatgacttctcatctctacaatctataacacagctatttcagcagtagctgtctcttacctttgtatgaataggaagcaattgtatttttcttacaaatttcttcttcaaattattcatttgttggttcatttaatttaattatctccccacccacccctcgtttctttttagctggtcaaaatgtctttggaagtttcctaaagtctgaattcagtgaggagaatattgagttctggctggcttgtgaagactataagaaaacagagtctgatcttttgccctgtaaagcagaagagatatataaagcatttgtgcattcagatgctgctaaacaagtgagtattaagcttatcatcatcagtttctccataaaagaccctatatgcagaaataacatttaatatatacaacaagataaaatccttttggggtatataattttacttctacatacttaggcatataaatatagttcagtgcaatgagaatctaattttctatattggtgagggtttcagcacagtagaataaagagactgattttacaaaaccagctgccatgatgagggtgagggaagggttaagggtattgttactgaccagaactgcatgtcagggagtccttaatgagtgctcttgttttggataagaaaatgcagattagcataatgtatacaattgcagcagcaaaagtatttccaattaacagtattaccagataaatattcttggtccaagcagaaaatatcaacaaaaagagccttcttctcctgtaaatcttaaatgcctacatcactctttatgatacatggatcatcttatgtggatacttaaatttttcatgtctgcttcttttgcctctcctaactatactatgaggaaatttggaacaaagacatttttgtaatatttcttatctccttcacacctagtatagagctgattttacaaaggcatttaagagatatttgaattgatttaaatgaggccttaaaattactttctgaggtgtttcaaaaaacagtaacatcataaaatttgcagtaaagaaaagtatatattagctaacaaggttttcttttttagatcaatattgacttccgcactcgagaatctacagccaagaagattaaagcaccaacccccacgtgttttgatgaagcacaaaaagtcatatatactcttatggaaaaggactcttatcccaggttcctcaaatcagatatttacttaaatcttctaaatgacctgcaggctaatagcctaaagtgactggtccctggctgaagggaattaacagatagtatcaagcgcagaaggaatgtgccagtatggctccctgggtgaacagcttggccttttttgggtgtcttgacaggccaagaagaacaaatgactcagaatggattaacatgaaagttatccaggcgcagagttgaagaagcataagcaagacaaaaacagagagaccgcagaaggaggaagatactgtggtactgtcataaaaaacagtggagctctgtattagaaagcccctcagaactgggaaggccaggtaactctagttacacagaaactgtgactaaagtctatgaaactgattacaacagactgtaagaatcaaagtcaactgacatctatgctacatattattatatagtttgtactgagctattgaagtcccattaacttaaagtatatgttttcaaattgccattgctactattgcttgtcggtgttattttattttattgtttttgactttggaagagatgaactgtgtatttaacttaagctattgctcttaaaaccagggagtcagaatatatttgtaagttaaatcattggtgctaataataaatgtggattttgtattaaaatatatagaagcaatttctgtttacatgtccttgctacttttaaaaacttgcatttattcctcagattttaaaaataaataaataattcatttaagattctt

SEQ ID NO: 240 - DNA, 23005 bp, Homo sapiens
cccagctgtgaccagagcaaccagagcctgccacccgacgcaaccccaggctcactcgctcacccccctgggccctcctgcttccggccgggggcaccatggcctgccgctcctgcgtggttggcttcagcagcctcagcagctgtgaggtgaccccggtgggcagcccccggcctggaacctcaggatgggacagctgcagggcccccgggccgggcttcagctcccgcagcctcacaggctgctggtcggctggcactatctccaaggtgactgtgaaccccggcctgctggtgcccctggatgtcaagttggaccccgctgttcagcagctgaagaaccaggagaaggaggagatgaaggccctcaatgataaatttgcctccctaattggcaaggtgagcacaagtagggggtcccaaacatgaagggctgccaggcctgggccggtagctgagctctgtgtttccctgagcatcgatcaccgcgccccacccctgcacccagccaatggggagatggcactgctaacccgacaggctagctctgagcagaggctgggggagggaagtccctgatccatcctggcatgtggggagaaagggaccccaggatggcctttgagggatgtgttgataataacatgctgcatgacctggggtcacccaccacccaggcagggactggggaggaccacctagtgtggccaggggtgccctctcgcaggaatggctgatggaggcatgctctgcggtcctactctgaggcaagtggacaggggagatggcctcccaggcaccacgctcctgtttatccctcaagcctctggtcccacagcatctctctcagctgccccagtcagaaaagccagcagggtggagggtgagtgcggggctgctggaaggaggttgctgcccagactgctgcaagtgagggtgcagctcaggtgtcaggagataggaatgcaggggacgatgcctcgagtcagaacagggaagccagttgggccttcctgcaccctgcgcccctcctgactgcgggaggtgcatcctcagcatcacaaccacacttcctagactccactacccatggcctgcaacaggtctggggcactcgtgtccacctctgctcccagggcaagggagctcccaaggaagttatccacttcccaaatctgttctttactcatcttctccaagaaactcctcctgactctgcaccctcctgcaccctcaagaataatcatgatagtgccagctgccattggttaattgcttactatgtgccaggcactgtgctgatgcttttcaggtttatctgtatttctctcaacaaccttatgggagaagacaattttatgtccatttcacagataaggaaaactgtacatttctgaacctgccagtaaaccagaggtccagccttcagcccctggctcagtccttgtctgctcttggcctctgattctgtgttcctctgcatgttgctggtctcccccatgaggtgggagctcacagagaggggcagagggaagaaagtaacatgcattgagcatctacttatgccttgccctctggaggaacattgcaaatgcaatgaaattcaagccacactgccaccctgcagtggctgttattttcccaactgtgcagatgaggaaactgaggaccagcaaggctaagtgccttgcccaagatcacacaaccagcaaatggtagtctggatttgaactcaggtctgttgagacacgaagtcagtggtctctgtggtgggaatcttttctttccttcttccattcatgtgcctagaccagagtttcatcatccacacctggggtacccctgggtacccagaggggaaggaccacagtccactgaggcagagcatcccttcccccagccctaactgcacagagccttgcattgctgagctggttctccctctaagagcagcccagctgccctggggaggcaggtccctaaagagccacctcctgaccaaacccagtttaatcccttagaaggaatgcttcactgagctatggaatttggctcagatgggtggttttctccctcaaacgccagcactgatatcaccctgtgcccctgccatggggatgggaggatataagcacagggaagaggccctcagggttggggtcctgtgcccagagaccagggcaatgcccttgaagttctttagcagaattggagcctcccaacccttagccttgaccttgagatggggtgcccttcagggtgggacacagggagctgtgggtactggccgtttgggggccctggttgcagggccccaaggggccccagctgacccttcaactctgcaaagatctgttagccccaccctccttgcctccttgtggaggctgtgagggcccacatggaagcaggaagtggttaagatgtgaaatctggagcagcattgtggggtttaaatcccggtccactactgaccagctgtgttgtctcaggcaggttatttaacctctctgtgcctcagcacacattaggttagcaggctcattagaatcaaatgggagaatttttgaaaagaatttagaacatatctggtatatattaagtatattataactgttaaataaaaaatgaaataaatgggcctggcccagggagcagctagaacccagttagccccttccaggcaggagcctggagagcaggtggggagaggctccctgccggatagaggagtgaagggactcatgggcaggaggtacggcgcagggctgttgagcaattatggacccagaggaaggcccaggggtgagacgccatgaccagtgggtgggggctctgggtaaagagaggagaggggtgggggccctctgaggaactgagaggaacctgggagcactcaggaggagcagagactctcaggaggtggtagaggccctggaacactgtggtttcttccacttgctggctgcgttttcctgggcaagtcatttaccctctctgcgccccagattccactgctctgctctgccggtggtcctgagctcgtcccagtggaaggactggtaaggcaacagtcatgagatgaagggggatgaggagaagcagtagcagcaggagaggccaggggaggcagggagggcgcaaggccgacctccagcagaggctgctggctgggcttcttgccttcacgcacacacagacaacagaggggatggagagagaggcaagaggcaggactgcctgagctcatcctggggaggctgtagagagggaacctatgagcagtggtaaaatgcctggagacagagggatggagacagagggatggagacaatgtcttcaccgaggcctgtgtgacctctggaagagctgaagtcagccttccccctgcctgtatgcagaaaagcacaaaccagccactgctcgtgagtctttgaggctccctggctaaagccaatgtctggctgaaggccggggattcaacagcccccgctaaggaacactacctgtgtggcccagaggcactcccctgtaagacctgcagcctctgggatgtccggcctgtctccctccaggagttccagtttaggctgctcggtttcccccacaaaacaacatgcctctcccctaacctcagccccaacctggccctacttttcaactgggcttcagtttcttcatctgtaaaatggagaggtccctgctacagctgctactgtatgatctaagggcagagggccaggcagaacagagaggaggaatcagaggtgaaggctcggcagtcttcctgggttggaggcaattaacctggcacctctcagggcaccaggattatgagccctccccaggtccttgttctgagagggaggagcctttctgcaaggaaggtcccaagtggggaatgaatttccatccccgcccactgagacaaccagagactcccccaagggcagcagaaaacagggggctgtccctgatcccctaagaccacagatgccttctagctggactggccggccaaacgcacaccatgtcccagcgagctagtgctgaagcatagggaattgaggttagactgtaggaagaacttcctggtgtgaagatttctctgctgctcatgggtggaggaaggagcctcacatctctcctctcactccaccctcagtgtaaacatggggctcctgcttgtcaaaacggaggcaaggtggggtgagcagatacctgcccccccaacgctccctctcacactcacaaggcagggcagaaaccctcttgacctccatccctactgaacctgtttggctgtgagtacagcagagagcaggattaaggttggcttcaagcagaacctaccagtacagatatgcaggggaatggcagcccgcaaataccgtcaaacgccatcatccagtattcctgctggcgttgtctgctgtgaatgtcgaagggtcgtcagagcacttcaggaaaaacaaggacaccctgaagaagcagagcagagagagaggggctggccccacctgaccgttcgggagcctacgaaggtgcagagagggcagtggccatcagatggggctctctgggaagctgggccaccgagttgctttgtgaccctggagaagtcacttgacacccctggcctccattgcctcctctgcaaatgaagggcccagctcagctgatccaaaaggctgctggcagctctcgcaggctacgattctgggagcctgggccagcagcaccggcagtggtgggagaaggcccagctactcacctgtgaccatagggagcatcactgggctggttatcaaaacatcctcatgacaaacaacccacactgacgggagccaggccccaaccaggcctccaacctcatggcctgccctcatggcctatccctggcaccaagggaggagaggccccaagggggagcagatggctcccagtgtgatggggaaagtggtgggtcaggacaaatgagaaacaggtaaactgggggcctttcaagatatgagtcatggagggcttcctgcaggagggagctggaagaacaaatggggaggagaggaggacctggtgatgggaaggagagtagagaggacagccagggtggggaggagggaggcagggggagccccaagctgagctgggctggactgggtagaaggaaggagaggactgcgcaggaccctcccagcaagaggcatatggtaggcagagtctgagaggcgcagctgggctcagagccctcccagggtttcacctcgaggcaaaactgtccctaactggaggcagaagccagcccatgaagggtagctgggatcccagggcccacagtgaccagcaacacacaggacgcatgtgtcatagtggttaaaaggttctaaacccaaagttcctggattccaggcctggctctgccacttgctaattttgtgaccttgggcaagttccatcacctctggtttcctcatctgtaaaatacagcttataatagtacccacccatgggggtgctgcagggatttcatgggtcaagcatgtagagcaaggcctggcacacagcaggggccacatgagcacctgctgttgtcgtatcccaaagcacatccccaggtgtccccacagtctcatggggagagtagtggctcaggacaaaggaggagcagctaaactgaaggcctcagtgctggagggaagagggaagtctttcaacctgagtcacagagagcttcctgcaggagggagctggaagaacaaatggggagagcagagggcctggtgatgggaaggagaatagagaggacaggcagggtggggaggaggcagggagagccccaggctgagctcggctggacagggtggagggaaggagaggaccgcgcaggcaggtgttatcattcctaacttctagctggggaaactgaggttcagggagcctctgtcatcgagaggatgagcacttaaggacagtactaaccaggccctaccctgctgagtttccaggacaagatgggaccacacttgtcgtggtggcaagggggcagataggcctctgacaccccatgttccctggggtctcccgccccagccccaggcaggcatggagagcctgtcgcatgcttggcactctcacaccctcttacccccttcctctgccagccctgccctgccctcgcctggaaacctttgctaattggctccaccttgctctgatcctgtccttatctcaccatcttcagttttaacaatcagtcattggaggtgctttctgctgagtgagcgccctgggtggtgtgcataaatgagctgccacttcccagggagccctccgtgggctcttgctggtcagcccggggcctcagcccccgactggtccacacctgacccattcgccgccttcctgctctcccaggtgcaagccctggaacagcgcaaccagctgctggagacacgctggagcttcctgcagggccaggactcagccatcttcgacctcgggcatctctatgaggaatatcagggccggctgcaggaggaactgcgcaaagtgagccaggagcgggggcagctggaggccaacctgctgcaggtgctggagaaggttgaggagtttcgaatcaggtacgtagagccccatgagagccatgagcaaggcctgagggctgggaccaagctgtgctcagatgggaggcacttaagccagagaaagaggaaagatgttctgcaacatttctttacctgagacatttattgagggactggtatgtgccaggcagtattctaaatactgaggatatggctgtgaacctacagccgccccctccctaatagcaacccttaaaacaaagtcaatcttgtgctggctcccagctaaaccctgtgcctgctggcccttgggcatcatcataacccgcaccccctgcctcgagcagccgtcctcttgtacctatggacacacttgctcttgtccacatgttgctctggcaatgggaaattacgtcactagctagaacagatgggtttctgttttagatgtggctttagattttgatctcgactgggttggaaaggagaggaaagccaccaggaagcaggaaggggatggaaagaatgggtttgatttgaataaagaagcaatgcatgccagacatcaaggtagacttggaaagagacagataaggaaaacagccccagtatgcaaggtgcctttacaacttagtggggcagacagacagacagacaaacagttgctgggcagtatatcccagcatttatgggcccaggcttgggcattagcccagaatgaggtttaatcttcatcatcacccatcactagctttgtgacctccagtaagtggcttaatatctgaacctcagtttcttcctgtgtgaaacgggaatgattatggttgatgccaatctaaagtaggtatctaacctgaggaggaagttgagagtgtggcatggtgactggcagttataaatggcagcttttctatccctaaaaggctgaagttctcagcacacagcaggtctttgacacaggtttgctgaactgaattggccagtctaaaagggaaggctggtcactcgggctgcttagaggagaggtgaccctctgtggtcaggtagtgggcagggcttcaggaacaaggagcctggggcagaggagagtggctgtgccctgcaccgacctccttgggtctggtctccttgcaaggagacctccagccagcgtgaggggaggacagggcaggctgaacccttggtctcccctcctgcagtgctgcggcccagccccaaaccctgccaatctgaggtgagacccacaacctccagagcagccgtccaggcaggctggagagtggagagcacctgtcctgtccaggagtccagagacctgggctgtagctgagtttacccatcgcctctccccagccctgccctcccaggcctagggaaacacacacagggcatctgaccgcccctccggagagacccagcttcctagtacctgaccatgaccgggcagtcggggcagctcaccagaatctgtgacccactttcctgatccccagtagatctttggccctcaaaggctcagagaatgccagagccagagggagccctggatcctccttttacagggaaggaaacaggccctgaaagggcagggcttgtcctcagttacacagccttgcatgctaagtcccatccctaaccccagccagccactgggtaaggctgctcccacgagctccgccagatcacgtccatggaagcactttgtaactggaagttctatacacacactacctgttgttttaatctggctcagccccctcatttggcctgccgcctggtttctatccgcctgctacctgactctactgcttaggctgagcctctcttcctctctctgggtagggaacccacccgagttgggaaggagagactgggcaaacagcctggctggagggcttctcggtcttcaggccagagccaggggagctacagcctgactgtgcagagcctagggcccccaggagccaggagacgccaggccaagccccagtagggaagggctgtgccctgtctctacggagccgatgagatcagcctcactcccagaaataaacaagttgcgggggtggggatggtggtgcaggtgtgacaagctaaaaaatgcctgagaatgggtttgggagctggtggctgacagactggcagaggattgggagtggaataggggacctaagcctctatggggatggagacttccgaaggctttgaggtagcagaaaccccaaggatcagcagtctagccctctatttactaagaacaaagcagaggcccagcaaggggaagcaacttgcccaaggccacacagcaagtgactcagggatgccacatacagctgtgcaaactgtgcgctgcacaagtgtgcatgattcaggcggtggatagggactgaaatccaaacaagcatcaggccatgcagggtaccaggtcaaacagcccgtgaggaagggggcttttttctaactggcacaaaggctggagatgaaacagtattggtcttaaggggactggctgcagactggaacccagtgtccagccgcagcccagcgttcccctcggtcctctcccctggggctcagggcttattcccaccccacccacaaagcacacctagaggtccagggtcaaggcagacctggcctagccaggataccgtgaggatgctccctccagtcccctgactcctggtgtccttctctgccagagggggtttcccagggcagctgccaggccagctgtctccctcaactcaccctacttatgttcccctaggcagggtgagtggcagagaggcacctgtgctgtgccaagaggcttcctgaggccgaagcagaggggctgagccccagcaggtgctgtcccccgctgcaagcactctgtgaattgcccccatttaatcgtcacagcatcactataatcgtggctgaggcacacaggaactcaccccaggacacagctggttagcaaggaagccaggatttcagcccaagtagcctggctctggtccccttgcttcatcagcacactccaggagcccccagtccttccttgagcctccatttcctcatctgtaaaatgagaccaatgggacttccctagctgggtgctctgaggaccaccagagagagtgcaggtgaagcactcagcacctgttattccccactcaagtccaatttagttctctctggggatgcctagacagcagaacgttctccccggcctgctcctctgccccacccccaggacctgtaccatcaaagcccctaacagactcttggcagccaaggcagtggccagggagggtgtgggcccctggtacactgagaccagaaacccacgtgccctgccattgggtccacgcccctcagctcctcaggtgggctggtgggaaagaagaaggcatgaggggcgccagatatagccagctcaatgggtgatgagtgacgcagccctgctgggaggctagggcctgaggtaggcaggcggctgtaattagagccgccagtgattcaggcattccccgaataggagggaaaaaaacagaagctgctgaatccccacagcagctggggccagcgagaagtctggagccagcagacacccaccctggggctaagacaaacaaatgtcttgacttgaggaagagggtcgggccagggatctgggggtcctgtcctccccacccaacggtgtccttgttccaaacccaaggtgggagcgagtaagaagtccaaactgagaagagcgttattgagctttgttgagtatggcctatgcggcctgtagctggctgtcaactgcgtcaggggtgggtttgtcagccccctgtacacgtgggcacatgcctaccccttagaggcaggaagccaagagaggaggggtgatgcaacttgcccaaaaacacactgggggtccctctgacagcaaagttcacactctttccagcctccctttggagggaatacaatgggatggtgtcctactggctcgcaaagcagaggggtggtggctggggctgcagggaaggcatggaggtgggagaggtgaggtgtgagcaagatgctcccagcggacttgagtgaacctgagattgccagggaaggaggtcaggtaaagatgaggggataaagtgccagggtgaggggctgcacaatcagggaggcctcctggaggggagtgggtgtggagcagagccaggaaagggcagaagccactgggagaggactgtgtcatcaggagggagtgaggaacggggagccaatgccaggaggtcggggggagagagagaggatgtgtcatagaagatgcaagagggagaaggatgggctgcttttctttaattggcaaagagaccccaagtgggatagcacaggccctgagccccaaccaaggggagttcaccaggcccaagcccccaccatatccagctgagcaacccctctctccctcccaggtatgaggatgagatctccaagcgcacagacatggagttcacctttgttcagctgaagaaggtagcctgcccagcctgccccaggggctccttcctcatgggccctgggccctctttccctccagatatcctactctcctttatgcccaatcaaagccctcagaggcttaagtcccaggaccaacagacagacagggagatacccccatccccatccagctcctttttcgaggctctgagccagatctcctctggaatcacccccactctcacccaggaggcagccccccagcccactcctgccctgggaccctccattccctctcccaccactcaccactgctgccaaccccaggacctggatgcagagtgtcttcatcggactgaactggaaaccaagttaaaaagcctggagagcttcgtggagttgatgaaaaccatctatgagcaggtgagtgagatggggccagtgtcttgccaagcccagagctggctggtccatgggtaaaggacacaggggaagcacagccatccagtggggcatggaacctccaacagtcacttacaatttccagccccagaataataatttcctaaaccccttcctgtgatggtgtcaataaccctgcatgacccctggacattcatctcatggaacatgggctggttccccaaaggccactctttctggaagaactatacctttgtgtgctagagtactgagggcatgctggggaccaggtgcctcggacaagggtcaggaggctggcctcagtggcatggaacccaggggtctggaacgagcatgctgattgaactgatctctccctaattcctgcagcctaaaccacagcacccacagtgctagttctgataggcctgcctttccgttttccccatttttggcgaagacagaggaaacattcgcatttgtttcctaagtcctcagtggggcccagtgtacaagggcccataacagcatggcatgcatcaacacagccattagatgggcactgccgctggcttctggacaccactcctccatgccagctgctgactcctaggcacccttcaggatatgtgtcctcctctccacaccacttgtttcaagggtgaggaggttcaggggtgacactcctgagctaaagtcccttccacagaggtctgcagttcagctaggagcaggcagcaccactgttggagataacagggcttgcccgcctaagtgctgcacactgctggtgccaagctatggcagtgcagccaaggtcaaggctgagatcaaagtcaccaccacaacttacagattctgctaaaatggccctatgatctgctgaccacagcttcatggctgcatcctgtggaaaggaagaccgggcctcatggccctgtcatgggtcacagtcctttccagcagtcccagctgccagctggggcctccgtggaactgagtcttgtttgtggccacgagaggtagcatagcagagagaacagcaaacccttgggagcagcaggaaggcagccctcctaggcagtccgctctccccacagccctgaaaagcttcctggccctaacaaatccccccacagccaggccaagtgctatggggctgaccagggcaccatgcccactggctgggtgggaactgggctaggggcttctctgcccaaactcactgtgggctggtgcagcccaggctggcatcagcagggccatctcctgtctccactgggctggatctctgccacccttaggcctccacccactcatactgcctctgagaggctgagtccatgggtgagtgcagattctgccgagcctagatggagtgcagattctgaaaaccgagcccagtgtttctctacctgctcactgatgtctcagcaagctcagagctcaagctctaagccatgatgcaggccctgcagctgtagagacataactggaagaaggctgggcataaccagtgatattcctgagcaccccacaagacttcttggcccctgccccagtagccaggcctgtgggttccctttggattttgcagtccttgggccccaatcccaacttggccttgttttttttttttactatttctgtaactttaggcaagttttttctcctctctgtgccttagtgtccttatctgtagcatggagagagtaacaggaccagcctcatagggctgtgaggaggactcagcccactcattcatttaacaaatgtttattgcatgcctactaagtgccaggcactgataccacagcctgggcaaggtcccttctctcaaggagggcatgacttagctgagacaagtcataagcaagtcagcaaatatctggacaagatcgcttcgcagggtgacagattctgggatgcaaagaaaccgggtgctgcgctggagccggaaggagggaagagcctcagagcccatgagcggggcctctcacaggcggtaccctccctaagagtggcagagatccagcccagtggagactggagatggcacagaattgctatgcaaagcccctaaggcaggaggggagcctggcgattaaagaaaaagaaagaagtctctggtcagagcacacggggcagggtgggagctttgggtcagagagtgcctcacagggttgtctcacgacttggacctcattctgagtgtgacaggcagccttcggtgggcactggggcggggtggcaaacagcgggtttcaggtgtggttgtgctatcctgagcctgctgtggagaagggcttgcgatggaggcagtaggggccagggaaccacagcagttattattacttttgaaagcagcaagatggggttgaaattggaggtttgcctttctctccatacactgctgcaggctaagagggcaatgctgactctttgccaaaactattccccacaccagagggtgtcttaagtcagtgccgtctgatagaaatacaatgtgaactgcatatgtaattttaagttttctagtcaccacattttaaaataacagaaaaaataattttaataatatattttatttagcccaatatatcaaaaatataattatttcgacatctacctcattggacagagcagctctgagtaaagactgtgccagccacacctgcctcaggtggaagaaaaacctggcagaacacgagtggcccaggaggccctgatactctagtttcagctttggagcagacaccagatcagaaatataggcctacccctgtgtcccagaaaacagccctctcgtctctccaaaacatgtgtgtgtgtacatacacacacatgcacacacacacacacacacacacacacacagccaagatacattctgaaaagcccttccaagccaactgagtaggagctcatggccatgatctgctcaggcctcatctactgcaaaccctctgcctctctcccctgggggcacaggctggaaggttcccccacagtttctgagacacagtccagctcccaagtgtgtttggggcctggctgcatccagtcggaatgccacctacctgacccctacactctggctccagggaaattagctgtggaatctgctgacaaccccctgcagccaggcacacctcgagggaggtccatccctgcagagaaaagccagtgctgcctaaacttttgcatggaggctgccccgagaataggctgctctgcccctgaacactttgtcccagctttatcactgttaccaattaccataatagagaatccttaactactgtttagtgagcacctaatatattccagacactgtgctaagtgttttccggacttaatctcagttaattctcacgacaactctatgaagtagggataatgattaagagagcacagattttgaacagcttggatttgaatcctggctcagtaactgtgggaactggagcaggctattttatctctatatgcctcaatttccccatctataaaatggggacaataatagcatctacctcactgggctgttgtgaggatttgttttcttaacatatcctaaaatacttagaacagtaactgacacatggtaagcattcaacaaacattatctgttttcagctctataattagatccattttacggatgagaaaaccaaggcttagacacatttaaaaacttgaccagggttactcaactaataagaagtgattggccgggcacagtggctcacgcctgtaatcccaacactttgggaggccgaagcgggcggataacctgaggttaggagttcgagaccagcatgaccaacatggtaaaagcccatctctactaaaaatacaaaattagctgggtgaggtggcgcatgcctgtaatcccagctacttgggaggctgaggcaggagaattgcttgaacccgggaggcagaggttgcagtgagccaagattgcgccaccacactccaacctgggcaacaagagtgaaactccatctcaaaaaaaaaaaaaaaagaagaagaagaagaagtgatggcattcagtgtccagagccattagcgctatattttactctccaacactgttaccccataacagtcacaatctaccctgacgtggggaacacagtgagggtgctcacacgcacagcagcctcctaagggaaaccctaaactgtacttcggcttaattcttaaccatttggaggctcacgtgctctccaggggtcccatcccattgggtacctccacaccacacaagcccgaattgtcatactctctgcagcccggcaggggcctgcatgtctgaacacgtctgtggatgttctgaacgctccatttcctgcttttgtttaccaagctcctgcttagcctgcctctttccagaaaatgtctggccagtcttttcaccctgactgggaagtcctgctatagtgcgtcctcacagtgcgccggcctttcctggggccataacgaatgccaagttaggccctcctgtagaagcacactggagggctctgaggccccccacacccaccgatgcccacaatgtgtcaaccaaaacagcctcaaagctgcagctctgaaactgtccccagccaagccccagccagggtgctggtgccacatgggaaatgtcggctagtgactggggcagcagaggtggggctgtggtaacaatcaatcttattctgacacgggttgggccatcagcctgcttttgcccagagattctattttcatttgaagatcaaccaaaacccccagcaggagacacccaagggcagctggccactgagttcagggtcctgccagctccagggcagagacaggctgtcccccagaggggcttccgaatgcccgccactaccgcaccatccttgtcaccaggaggtgctggtgggcagagtcagttcccggacaggctgcccacagggccctagctggcccctcatccctgtcgtctacagctcagaagtccagcctccgcctgagacagaaaccagaggcctcagcacaaactctccaagcagaaagagagacagaggatcaggagggcgcccagagtcaggaaccaggatcagaacacagtcaggaactaaaaagctgagcctggatcccagcaggcatccgggtgcaccggccagttttcagaaaatattgaggctggaagaagcacgttgaacattggcacagggtacaacaatcaaacccagctgtggggactctgcaaggcagacagccagtgtgttcaataagaacaatggcaaagaacaaaaaagagagaaatggagattacaggagacctacagacatatggaccaactgcagtatactggccttgtttggatcctgattcagacaaacacatttaaaaaatgatgaggcggtcagcaaaatgggaatgcagactgaaatttgatgattgaaataggggtcagggtggactctgaatgccagaaggagcatgatgtgtctgcacccaacacccacctcctgcctggccccctccctgccaccaactcactcggtgcaattctcagtcgactcgccttgctcctccttcccacaggaggccctacccttttcagcatctccaggataagcagcccagggccctttgcaacctctagagatccctggtcccacctgcctccctacacacccctgagcattctggctagaaaggtgcgaggctgtgagcaggaaagaaagctggtctggggccagaaagacaatgaagaaggtgtcagccccttgtctccatccgctaagggagcgtcacagcagcagcaacaggggctccggggcccaccctgccactcaccgctgtctccacaacatctttatgcctcagtttcctcctctggggctgcagcagtgccagcctggtgaggatgtgtggaaaacgctcagcgcacagtccagcctgcagggaattcctcagggaatggtgggttttaccatttccagaagtctccagggataggagacggtgaaaatattgtggtcgtccaggcaatgtcccttggctagagagggagtgggcgctgagtctccagggggaccctgaagtcagagtgctggaggctgcgcccaggctcctcacaggctgttggctttcagtggggccgggagaggggagtacaggtttgtcagcctccagcccactccaccctggtcactccctggcttccctcccaacatttaccaaatgaactgaggcactcctttcccagacgtgggggctcagagatgaacacagctctgccaggcccacaaggagctgctcgtccagtgggagaggcagagctgtaccccacagcacaggaataatgaaacagtaaacagaggggcccaactcacagccccagagcctgacttctctggccctttcccatcagccaggagtaggccatccctcccaggagagggcaacagtgcaggcagtggggaagcttgcaggtagcctttaaaaccaacagtcccagcctgccctccactcagatagggggactgtgggtgggtgagcagtgggcagtgagctgccttccgagagtcctggctggggagacgtggcagggaggcattcggccttccatcatctctccagagggacaggaagggagcagctccactctccgctcaccccggggacaaagtgactgtgtggggctgagggtccttgtgccctccccaccagccctgagcccccacatctgtgcccggtcaggagctgaaggacctggcagcacaggtgaaggatgtgtcggtgaccgtcggcatggacagccgctgccacatcgacctgagcggcatcgtggaggaggtgaaggcccagtatgacgccgtcgcggctcgcagcctggaggaggccgaggcatactctcggagccaggtggggctgaccacacagggcacgagaagcagcctggacagttctctgggtggcaggaagggctggactggtgatggctgaggttgcctgcagctctctgtcctgaaagtctatgagagaggaatggagaagcacagggacggggcgggcggggggagaccacagaagctggtctgtgccctccaggagttcaaggtggtgctgttatcagcaatgctaggccagatgtgggcatggcccatggggctcagctagggcagccaggagaggccacccagaaagggaggtggaagggggagctgagggagcctggcgtggcgtggtgggctgcagagttggagatgggactggaggatgcaagaaaaagcagaggcgggtaacaagtgctgggagcggcactgagctgcccctcactgagacctccatgtacctccagctggaggagcaggccgcccgctcggccgagtatgggagcagcctccagagcagccgcagcgagatcgcggatctcaatgtgcgcatccagaagctgcggtcccagatcctctctgtcaagagccatgtgagtatctgggggacgcgcctgggggcggggaggagagcagggagacacacagtcatgtgtgctgaatacaggcaagacatgactgagtgaccctgtgtgggtcgcttagcgcctctgtgcctcagtttcctaatctgtcaaatgggataatagcacagcctcctaaagtagttatgaggcgctctgcatacaaaaatactctgtaatctggtcaaggctgctggaacgttagaaagcccccacactacacacacccagagcccactgcctccctcctgggaacccccaccaactacacagagaggagggagtagaggcctaagtcccagcttccagccaggacaaaccttcagggcaggtgctgccccataaggacagccgggacaggctcctttagtggcttgcggtgctttcctctggccttgggaaggtgcctcttcaggtctaactgaactccctcttgctgcatggcaaccagttaccacacccagaaatgccattgctcagccctccctccccacacctacccccaccaaggacagagacgactcctggccctggcccgctcctccttcccctgctcacaggccctttcactctgtcctcctggctgcagtgcctgaaactggaggagaacatcaagacagctgaggagcagggtgagctggccttccaggatgccaagaccaagctggcccagctggaggccgccctgcagcaggccaagcaggacatggcgcggcagctgcgcaagtaccaggagctgatgaacgtcaagctggccctggacatcgagatcgccacctacaggaagctggtggagggcgaggagggcaggtgagagccagggctggtgaggaagggctgcaggggaaggagggctggaggcccaggcctacacaaagtcagttctcctttccaatatgatacagtgagcctaccaggcctgggtttaagtcttggcttagtcacttacaaactgggaccttggcccagttcatttcatcctgtttccccatctggaaagtgggctgatcataaacatggttcacctgtggcagggatgattcatgtgattatgcctgcaaatgcctgtcaaaactcagtgctcaatgctattagccatttatgccatggagatgggacagaggcccaggaaggacaagctggctagccagggccacacaacagggcaaccccagggctgggagtgaccaccaagaactaccctccacttgccagcccccaggggagtttaagccacaggctctcttcgcatcccatcatatccctctcccacccccccgtcccccacccccaggatggactcgccctcagccactgtggtcagcgctgtgcagtccaggtgcaaaaccggtgagtcctcttgccccgagaacccatggtggggtgagggtgagggtgtaggggatcatgatcctaaaggcatcattttaagtggctcccaaacctccagccccttccctcccctaccccttatgttccctgtagctgcctccagatcaggcctctccaaggccccctcccgaaagaagaagggcagcaaaggccccgtgatcaaaatcaccgaaatgtcagagaagtacttctcgcaggagtcggaggtctcagagtaaggcggctggaccccaggaaccccagggcactccactgcagcaggagggacttaagctagactcaagaaagcagcttggagcctctaggttgagaagagaggcaaaacctgatattgaactgagagaggggttcaaaactgactgtgttttgtgggctgccagggtgggagaggagcatcaccagctcctcagagccactccgctccatatcagtatctcacagtcccatccttccaaccttctggccagaggttttcctgatgggtgagtcggaattaggggtcagttttgtctccacctcctcgctcctctgaggctcctcctccagcatcaggctctgccaaggcccctctgactcttgcccaatccttgaccttgactcctatctcaagccttgccttgtctctgcctcggaactgggactgggactggctcatccacctatgtgcgggagccgaggaggacggcgtgggccctgtcctgtatctggaattcctgggaaggctggctgctgaagaccctcttggctttcccgtgctctttgggctccccagagacctgacagtattagggagtgaagggaggaggggccctggctatttgggacctaagcctaggccccagagatcagcccgaacacccgcatcccttcctcctcccatgggtccctcccagtaggcagtagtcagaactggatgggctgcccccagccagctcccagcagcttctccggaagctgctcttgccataatcaactccctgggagtggaagccagatggcagcttgagattgggcaggagcattcgatcttcctttcacctccctgccatgctggggtcctacccagcctggatctgagctctgtgcccccagccgggttgttcccagcctgagcaccgggctttggtgcaccaggccttggagacccctggtcccacccctgccgtgaagccccaggcccacttcccaagaatctcacttctcagggcctctgttctcctctccactgggccaaatagcctggccctcccctccttggcattcatgggggagcccaggaaccccccacacctatggggttagagctcctcctttcttctcactccttccccttcctccctccatgcccactccccctgcctccagcaggccaggaagaaggcacagtccaggcaagtctgggagcttccaagcccttgaggtccagctgtggggcccaaatgacagccttacaagggttctaccagagaggaaaattccacatcccaccagaagacaggggtgttggcaggcatactcctatctcctcctcttggctctcaatgctgaggcttgcagaggcatcccagcggcaccagcctcccactgcacagcttccttccctccttcactctcctctcccctccctgccccttgcctcacctcctcttctagactgcattagattcattcatctcatttgccaggacatgttggccagaggtctgggcccatcccaggcctcaaggccctccaggcctgtggggagcactggagggttactgactctctggccatgggaactcagagattctcatccccaaagtcccaaaagagggtgctgattggtgcttttcctcaggctcttcattggtttccaagggagcaaatcctcagtggggatacaagacatataaagtatatattattttttcataacttatgtggcttttaacttattgcttcccttcctgtttctgcatgatcagtctgtatgtactatctggaaagataacacatactccagccacctcacctgattggctatcttggggccatgtccccttcttgctgccacaggatgaataaagtgttgagatttgtctatggagaaagctgtgtgtctgtttttatctcccctctcaggaccagtcagccactggtcaatcaggctgatcatggaacattaggaattctccaattaagggagaaaaagtccagggacttagttatatcttcagaccagtgcagctggtacacacaaagttctcctgtctcaccatctgatatggtttggatgctcgtcccctccaaatctcatgttgaaatgtaattcccagtgttggaagtggagcctggtgggaagtatttggatcatgagagaggatccttcatgaatggctcagcaccatctccttggtgatgagtgagttctcactcaattcacatagatatggttgtttaaaagagtctgagacctctcccctctttctcgccatgtgatatgcctgctcccccttcaccttccgcctttactgtaagcttcctgaggccctcaccagaagctgagcaaatgttggtgccatgccagtacagcctgcagaattgtgagccaaaataaatgtcttttctttataaatta

SEQ ID NO: 241 - DNA, 2923 bp, Homo sapiens
cccactgggtagaaggaacagggagcggccagggtaagtccccactctcagagaccctgacatcagcgtcacctggagcagagtggcccagcctcagactcagagcaccaagacccaggcccgcaggcctggacccaccccggtccccccgtcccagctccattcttcaccccacaatctgtagcccccagccctgccctgtgaggcccggccaggcccacgatgctcctccttgctccccagatgctgaatctgctgctgctggcgctgcccgtcctggcgagccgcgcctacgcggcccctggtgagtcccagccggggtccaccctgcccctcaccacattccacaggtcagggcctgggtgggttctggggaggtcgggctggcccccacacagggaagggctgggcccaggcctggggctgcttcctggtcctgacctggcacctgccccagccccaggccaggccctgcagcgagtgggcatcgtcgggggtcaggaggcccccaggagcaagtggccctggcaggtgagcctgagagtccacggcccatactggatgcacttctgcgggggctccctcatccacccccagtgggtgctgaccgcagcgcactgcgtgggaccgtgagtctcccggggcctggaggggtggggaagggctggatgtgagccctggctcccgggtgctcctgggggctgcccagggccctgagtgggatcctccgctgcccagggacgtcaaggatctggccgccctcagggtgcaactgcgggagcagcacctctactaccaggaccagctgctgccggtcagcaggatcatcgtgcacccacagttctacaccgcccagatcggagcggacatcgccctgctggagctggaggagccggtgaacgtctccagccacgtccacacggtcaccctgccccctgcctcagagaccttccccccggggatgccgtgctgggtcactggctggggcgatgtggacaatgatggtgggtctggggacagtggaggtggggccagggtcttagccacagcccagcccctgggctccctctgggctccaggtgggggttgcccggccccctcctgaggctgcaccctcttccccacctgcagagcgcctcccaccgccatttcctctgaagcaggtgaaggtccccataatggaaaaccacatttgtgacgcaaaataccaccttggcgcctacacgggagacgacgtccgcatcgtccgtgacgacatgctgtgtgccgggaacacccggagggactcatgccaggtgggccccgcctgtcccccgccccccgccccccaacccccactcccaggcctgttcggcgagcgctgacctctgaccttcccagggcgactccggagggcccctggtgtgcaaggtgaatggcacctggctgcaggcgggcgtggtcagctggggcgagggctgtgcccagcccaaccggcctggcatctacacccgtgtcacctactacttggactggatccaccactatgtccccaaaaagccgtgagtcaggcctgggttggccacctgggtcactggaggaccaacccctgctgtccaaaacaccactgcttcctacccaggtggcgactgccccccacaccttccctgccccgtcctgagtgccccttcctgtcctaagccccctgctctcttctgagccccttcccctgtcctgaggacccttccctatcctgagcccccttccctgtcctaagcctgacgcctgcaccgggccctccagccctcccctgcccagatagctggtggtgggcgctaatcctcctgagtgctggacctcattaaagtgcatggaaatcactggtgtgcatcgctgtgtttctggttgtggatgtcactgggagagaaggggtccaggtgtgctgaggacacctgccacagtgtgaggtcctagccctcaaggcacagccagtcaccgtgggacggggcctcctgggcagccctggtccccgaggctggcttctccccacacgatgcatccagcattcgggtcacacagagccactcgggcaactcagttgattataaaggacagccaggtccctgcaaccgggtcaagacagagaatggtcgccgggagccccagggctgcccatcatgagcccctaccccacgcttcccacgagctcttctcccggcccctctgtccactgcttgtgctttgcctagttgtttgctttgagacgggatctcgctgtgtcatccaggctgaagtgcagtggtgtgatcagggctcactgcagccttaactcctgggctcaagcgatcctcccatcttggcctcccatatagctgggccacaggcgtgagccaccacgcccagttaatttttgtattttcagtagagatggggtttcgccatgttggccagtctggtctcgaactcctgacctcaagtgatccgcccgcctcggcctcccaaagtgctgggatgacaggcgtgagccaccgcacccggcctgagtttgacattttcaaattcattttgaggtctttctctacatcaataggtgagccctctgcgtctggcgagtgttgcattttatcccgggctcttgtttgcattttttatttgaacatgattacacccaggaatgaaatgcggggctgttctggttgaaaacaactctctaaagaaacattcactctttccttccaactgtcagatgcagagatgtgcatttagtctctccaatctctgcaaatgacctctgtcctcacaaggggtggactcgactcccagcgccctctccagccccacgtgacctctgcctctgcagcccctgaaggcccatccctcggctcctgttctgcaggcccagcgtcttgtctatgaagatggacctggaactcgggccctcctt

SEQ ID NO: 242 - DNA, 64208 bp, Homo sapiens
cgataaagcccccgccgccgcggcagccagcttgcgctgtggggctgcccgggctgcgcggcgtctgcaggcgccaccgctgcctctttccggctgtgaccctcctcgccgccgccgcttggctgcgtcctccgactccccgcgccgccgagaccaggctcccgctccggttgcggccgcaccgccctccgcggccgccccctggggatccagcgagcgcggtgagtacaggctgcgcggtgagtcccgggcgcggccggcgctgccctcggcgggggacgctccccggggctccgcgcgccaccggccctgctccctgaccttgcgcccggccgggaagctgcggggccagcgggaccctggggcgccgacgtcggggagcagagaactttctcagcctcccgcgggccgccttggccggggctgggtgctcgccgggcatcccggtcccgcccgccgggagccccgagcgggacccgggcagggcaaggcggggccgccccggggtggcgtccagtgatacccgcagctgggagcaccggggccggcgtggctcctgcccggccatccgagccggccctgaccctgaacctgaggtttccagctgctcgccggcaacccctaccccggacttaggctgcgcgccgccggatggggagagactggcgcactcttacttgttacctctgcctgggcagagggaggtgacgcgcggtgtggggaaagcctttaacttggcctctggcagccgatttaacccgagcgagcaggtctttgctattttcatcatctgtagaaacgggagttgcgaggcggatgagtgactgcaggtaaaatgaaagtacggtactcagaaattctggaaggaattaggcatttaatgtgtccacaaactgagcggggaaggaaggcttctattacataagacagcactccaccttcaggtattatggaagatgctgttgaaggttttagtgttttaatgaacgaaacacattctttgtgtgtgtgtctctggagaaatctcgaatgctgctgtcttgctttggctactttgcaggggacgttcttatatttagcatcagcataaaaaggtgttcgaaggtgtgacttcctctttcaagccaagaagccgtttatttgtctgaattgttgtggaacaatatatgtgataattgtgtactttgaagattttatatcaaaacttgagcacagataactggaagaattgtcaacattgctaatttgtatatcctaaaccacacttcgaaaattgaagacagtttcaacactatctgaaggtctaaatcagtacttatttgctatttgcagtatttcaatagaaaaatttttggctatgcaaatgaaggtactaacctgagtaatctaaggtttcttttaacccccaaattttgattctttgttaaaataatgtttgaaaatatcgtaccatgcagggcaattactgaaggtcatgaaaatgtcatcgtattttattctaaaaacaaaaatgaatctatgcagaaaatttccgtgtcccatgaacttcatattagtttaattttaaaagtactgtctccaaaaaaagctaattttcacttccacacaagggtgattaaataccagtcagagattgtttgaggtggtagagttggaaatgaggtggtgacctggccacgtccctgggtgcatctcagccttgctgtcctcttccagccagttcttttcccatcgcatggggactttggctcttgggctatttctcctcctctagacctaaagtccatgtgggggacgctctagatgcgcacttccttgactgtctcaaatccagtgtcttccatgtactccagctaccaagtcctctaagtacctccaagtcttgccctctcttgagatgctcaacttctgaaaactcttagtgcctccaacccgcaagctccttccttccgggttgcaaaccggactcccactgtaatcttcaatgcaagcgatctccaatgcttttcctcttgcgggtttggcaggtgactttgtagcccattctaccaggagaatagaggtcataagtatctcctcacgtcctcccccatctcccctgtacagacttttctgtgtttacccagtcatccaataaatcttcttaagcatctactgtgtctgggtactttgttggatactcataggtggtaaatagagcagatccttgctcgcttgaaactgtcattcttgtgggagaaaaccaactaaaagcaaacataatatgttgtaaaatgtatgataaatgaataaggtagaattataaagaaaaatcaagttagactgagaacttagagaaatatagagagatggcctccttggggcagtgactaatgtctccagctgtgtcctgaatcccaactcccagtgcctctctctccttgtgagtgttactcccttttcttacttttatcttcagtctctccctgtgagcttttttcttttttagtagtattttaagaatgccttaacctcccttgtccctgcatcctcagctcacctgtagtgacaaccacgtctctccaggcttcttaaactggtctgcccttcctgttcagctctttgcaagctggccagagtctcctcaaagttcaaggcctgtgacttcctgaacaagcaatcttttttttttttttttaatttttattaatatgctttaagctctggggtacatgtgcagaacgtgcaggtttgttacataggtatacacgtgccatggtggtttgctgcacccatcaacccatcacattaggtatttctcctaatgctatccctcccctacctcactccccgccccccaccacaggccccagtgtgtgatgtttccctccctgtgtccctgtgttctcatctgaacaagcaatcttatggatacccactaggtttctccgtggcatttgatgaggttcttctattcctttctgatggtttttttttttttttccatccctggttgccaccttctggttttccttattcctccctggcatctctgctacctcttggggttacccagggttcgctgtcatcccttttgtgctctgtgtatttgggtgaaccatgttcccacagcttcgactctcaccaatatgaagcgagtcccagattggcatgttaagctagcttgagcatgctcctgtgttccaatcagttacctgcagtctggtgcgcttacccgtgccctttaggccaaaaaaacaccccaaaataaatccaaaattgattttagttttcaccacccaccccatatccgcttcattgttagcgaagatttgtccgtttttttttggcagtggttccaccgttcatggagatgttggagcaggggtctcacggtgatgccaggctcccgcactgcccacatgcaggctgtcaccagatcctgttgcttcttcatgctgtgaaattccacaaaggtccgctctagtcacgctggccttgccttgctttagagcccaaaagtggcaaaatggtggccggtgtgccacttctagcagtaggcagcagtgttgttggcctgaacaaagtatatacaacttgagttaatatttagaaatctggagatgccacttggatgtatagcttctcctaaaagccagaagacctggatgaggcagtgcgtggtggctcatacctgtaatcccagcactgtgggaggctgaaccaggcggatcacttgaggtcaggagttcaagaccagcctgatcaacatggtaaaaccgcgtctctactaaaaatacaaaaattagctgcgcctataatcccagctactcgggaggctgaggcaggagaatcgcttgaacccgggaggcagaggttgcagtgagctgagatggcgccactgttctcgagcctgggtgaaagagtgagactctgtctcaaaacaaaaacaaaaacaaaacaaaaaaaacctggaataggaagcttacattcccatgtggcaaacctcagctgctgctgggtttccagtgcctgaatacactggaggtaggttgctttctggttcccccagacctgtgacccttgcttatagtggcgttctggctcccatgggcttcagagctagagaccctaggctgagacgatcatcgacagcctgggaatgcctagtgcttactgcacagtgtcgtgcacctcatgttgcatcccttctaactctcttccatgttattgctggtgtgactttcctcctgctgccccaaatccaagtcttcttgggtccctcctaataaaattcaatggctccctcttgatctgggcttaaatccctgactctaaaggagtggccatgtcatatcacaagtttggtatctcaagattgaaagatgagctctccgctatctttatacagtgttgtacccgagtttctgaagatgcttttgagcttctgtagggtagttaatacagagttctagtgttgatgacagtcctgctgtttacaaagcatttctacaagcctgactactgccccacttcctcgcagcccccctgggtggagatagggcagggtcgattctatatcccaaacagcagtggggagtctgtaaatatggaggcataggccatcccagggagtcccccacccttggaacatggggaaccttgttttacatgtggtatccagagtcatacagtgtgttcctgaggtcatttagacaccttagggcagagtcttgacccagaactcagttcctgtcagcatgcagccagggaactttccacagtgctccatgggctcaccaggctgctggccatttgtaatgacccaacagagtcaaagctttcttcactcccttcccatctccttgccttgtcccctgcctgaaacattcttttcttgcaaaactgaacctcccgtaaactgcactggtaccgcccagtgcttttctgcctttgctccttctgtacctctgcctggaattccctttctcctcctgtgttcattgtctggctgatttctcctttttcaagactcaggctcaaaaaggccttgctggcagtcaccaccccagccctctgtggcacatgtgcagtgtacacacacgtcacccctccccgtgcctacctcaatgatggcagttttttgtgttgtagcaacatgccctatccagtagactctaagctccagaaagacgtgcctgtgttttagttttatttgcaccagcggtggtgtgtggcccaaaggcaattaacagatgtctgaactaaaccatattcatattttttgtaagtttactgcatgctttatggaagagtgtttgtattccagactcaaaggggagctctctctgccagacctccagccctcattttggtactagcaaatttaatatatatcctcagacattttaaatttttgattaaccttgtcttttgagataaaacattacttagagaaaagcggaagtctaatacagaagcacttgtgtgcctgtgttcacttcagttatcctcatctgaacctccctttggcatggttctgccctccttgaggtctgttggctgggctgcactctgcatttcgtggttttacagggtaggagaatgcattttggtttatttctattaactttggtgatggtgatatatgacctcttggtgactttttttttttttttgccatggaacttttttggctggtatcgtcagtcacatttggtggaaagagcaggctgggagagggtatgggctgcaccaccaatagagcgtgtaggttaccatctagaactcagtttccttgtctgtataatgggtatattgaaataaatgatctaaaaggtgtcttatttttaaaacctataaattcttggctcagtttccttttgatgtggctttctcataagtgttaagtctagataaaattttttcgtaaatgcattatcctgtgctcatacaccttaaagttcttgtctctcacttttttaagcctataaaatcattcagcattatattcagaaacagcatcatgggccaacatgaagatttagtttgtattcccacttagagcatttataaaaattttaaataaattaggtcccatatacttgaatcttgtcaacctgttctccacacataaatgtgcccatcttctctttgcaaaccatctttcctcatgagtagattgcacgcctaatctgaaaaccaatgttgggtttttaaaaaatacccttagatacagaatggagtcaaatgcaataaactacatctttaggttatctcttgtctgcaagttcccaatttaagaatactgagagattagtatgattttatttctcttttgagaaataccacctcccatccaacaggccaagtctatttctacagtcagtgagtcttgcctttattctgctgttagatttctaggtctggatgtaagcccagtccagggaagtcggcatcccttctgggattctttctgtgcatgaggatggccactgagcccaagcaatcctctatttgtaattccactcgtatgttttggcaaacatgtcctaggattcctccaaaggttggggtggacaccctagttcaagattagatcaggaacacccaggcttttgccacagtttgacgtaagacattatcctttgcttcagaagatcatttgagaattggaatttacatccattgtgcctttccatttttcttatttaattctttgaagaataatatgaggagactttaatataaaagaaaaaatcccatcaagagtcagaaaggatttcctgttacggctgcaaatcttggtaaatgcactttgtttttgtaaaccgtgccccacccccaacccctagtgtgaactcgtaacctggggaatttctcttgagagcataccaaaaatagcatcagtgccttctcttacccctaccccaactttcgccctccatgtagttccagcaaatatagctatagaaaaaataaccacttgtttttatcctaagtttttatgggccaaatcttgaaggtggatgtgggtatgtgaaagagtttaatgccaaatacaaagcccactcggaaatgaataaggtgactacaaatgaaaatggatgtttctttcttcctttggggaaagtgctatgtaaataaaggcaatgtttgcttcctctactaaaatttatttctgcagtttttaaataagaaatccactcaagaagttattcttactgaggatttggtcactgttaagattataggaactattaactactgcattatcttttgcttacaagagaacaaacccaaatcaaaataactcggaaacaaggcggagagctgttggctgacactgcccactcaagcatgggagaggtgactctggccctgaagatgactggaaccaaagactgaggacttggaggctttcttctctttctccttgcctctcatctctgcttctgtctgctgattgtggttgtcctctccgggaccatgactgtaggtagctccaggcttacctccctacagcctcctcagtgaggaggaaagaggggcttttcagccagttccagccggcggggggggtggggggtggaaatcctagggaggaattctgattggcttagtttcagtcacatgctgttcgctgtaccaatggctgtgggcagaggagtgaggtcctatgattggctgatgctaagtcacatggtcacatgctcgtcccgataccaatggctgtgggcagaggagtgaggtcctgtgattggctgatgctaggtcacgtggtcacatgcccttccgtgtaccaatggctgtgggcggaggagggaggttctatgattggctgaatcccaaatcacatggtcaatccttggttaggaggaaagggagtggagaggaccgtgctgcctggcgttccccagctgcctttctttctgttttccccccaacggaatctctatgtggtctcctagagcctcgtgcctgcctctcagctagatgctgatatcattcccactcatgtagttgggaaggaagggtgtggcagagataaagggtccacggtcacgcagtatgtggggggtcacacagcctgtatgccaaagtggcacaccctgtgaatatgtagggtcgcacagcctttatgtgtcagtgccagagcctggacccgggtctgtagatgtgtgaaccgtgagctgataccatggatattcaaagatttacatcccatcaatgtttataccttcttgagaagaaatttgtgtcaaagcacactcctcctttcaagactacctcctcgccgtgctgcgtgatagccctagtatcacaaccaaaacacatgatacagaaagaggccagtatctgtgtggtacgtttgaatcatggttttatgcctttggccccctagttccttcctcagacacttgtttttttctgggactgaaatctaaaattagtactgacctttggattgagaaggtagagagatttacacaagagtccaagcgaataacttaagctgagctggataaaactcagcagaatcacagaacaagtgtgccatgacttttcaaacatgcctaattgaactctgtttgcgatttaacttctttttcaaaggtttatagttacctttatttcaaaatttgtcattttaaaatatgtgtttcctccttttcctccactgtatagtaattaagagtgtggaggatttggaggccagcgggctttggtttgaatctagaggctacatattggagggtatgagccaaagccaaatttctaaacatctccaagcccatccgtgagttgggcctaaaggtgtttaggcttaagggccacccctgaagtgttgtgaggatgaagcgaagagtatatcttaggcgctaagcacagtggcaggaatggagctgactttcgggacacgaggtggctgtggttgtggcattgggtaatatttgtcacagaagtacaggtgagcacttctctgagactcatgtcttcctcgtgtctttggcctgatgaatgagtgacttgctctgtgtctttgcatgctttgtttccagacacctttcctgctgcactctcagtgggcagtactccccaatgatcacctggtcatctgtcctgcccgcaggcttcaggctcttgtgcgttggccatgaagcaaaggaaggctgttgcatgaaataacctccttctgactccacccttgcatttgtgagatgtaaacagcagtgttaccaagaggtcttccagggaacacgttgcaggtagccctgtcatgctggctgcttttttccattaggttagttgtgaataacgaataaatgtctatgcagggccagacatgtctatgctggctcacgcctgtaatcccagcagtttgggaggctgaggtgggcagatcacttgaggctcggaattcaaaaacagcctgaacatagtgaaaccctgtctctactaaaaatgcaaaaaattagctgggcatggtgacgcacgcccgtaatcccagctacttgggaggctgaggcatgagaatcacttgaaccccggaggcggaagttgcagtaagcagaattgtgccactgcactccagcctgggtaacagagggaggctctgtctcaaaataaaacaaaacaaaaaatgtctatacagtaggaaaaataatctatttggtttaatatttaggtctctgcaagggtagcatccagaggcttctcttttcattcttgtttttctgactgtgaaaaaatcattctactgtgtccagtgatgtccagataccaagaaataactattttaaacatatggtgaatattgttaaagcacatggtgatggtcatttaattatgatttgattccgtcaatatgcaaaagagttctaagaatgttgggttaaccttagcaagcattcccagataggaaatgtgttttctgctaccattgataggatttttttaaggattttactggcagttatccactttggacttcatacagcagtctgagtatatgcccacacctgagttgttgctctaacagtgagattaggggatgccagggagaatctgtgtgatgacttaattgtaagggagagctttctttctaaaggtgtggatttttctgtttgaaatgtgtatactaaaagaatcctattatcttatgccaaacctgtgctaatttcttaatgacatgttagttaaaataacaatttggaggattggctaaggatgccacagtattcataataaatctgttcttgtgcagcaaggtggtaaatcatgaatatcaaagttctgatcatactaatttgaattaatttagcatagtggaaagtatgaagacatagtttttccaatgcatatgtcacttcttagcctaaaatttctacgagtggggcaagtacattttttacatgtacagtggcaaaattgtgcttgtgtactgctctctaccttgtgttctggttctgcgtgtgttttctctgccctgttaggaacctgcaagtggagtatcttattcttttgggctcctcccaccatagctggcacagaggagcccaaaaagtacttccaaggggagagggaagtggaaaattatgcatcatcagtgtgtcaagtactattaggcatcttttatacacgatcctgttgaatcctaacaacccttgtaaggtagaaatcattcctggtttataggtgagaaaaatgagattcaggtgtgtagaacacccggctccgattcccactgatgggatatagactccgggtctgtgtctctctgtggtggacactttggatcctgaaacgctatcttcaggaatgattgaggctaagccatgtggctgagcagtgatgcacggcctcacagattgaaggtcagagcattgctgggcagaggatgagtttagaggtcaaacaaacttggtttcaaaccccaggtccacacttagtagtgtgtggctttaggcaaaatacttccctctctgtgctttatttccatagctagagaatagagaatgatgaggatattaccctccttgcagagaaagatcacagtgtccccagttaacatgcagggaaatgggaaataggaaatacagtgactcaagttgcttggcaaaggcagggctgtggcaggttgagaattcacgtctttgactcctgtcacctgttacctctccagatgccaagtctgggtacagtttgatgacagaactgccatcacctgccactcacccttggttagcccttagcggcccacataacttggtggctcttacaacccgatcctagagtcccatggctgattcatgctctttttctctattgtgtcgtctctgtattcactcctgtgttctcgaggaagattcattctagagggtaaaagagagtccacaagacttgttcttaatgtatacaccccacacaggacaagaaggaagttgaaggtggcagcctgttgtatttgggtgacgtgcagctgaagagctagtttttgagcacttactctgtaagaggtgcttagaggggcacagaagtatctgcaaaacaggccaatctttgaggggtttatttaggtagaaagggcacatccatgatatttaataacaatttgagatagtctagaacagtggcatatggtatgggggagggggaggcaatcagggagcattgtctgtagaggatctgaaagcaaaaatgaaattacctcagttttttttattatcatggtgataaaatattcctccaccagacccaaccacttctaccactcccaccttgtccctaagtcctgtactggatcaataatcagttgccaaaatgagttgataccagtgacatgtttgggaggtcaagctggcagtggtcagtgtggactgaactgttggggaaggctgcgtggaagtcccctcccctccctctcagttaggacaggacaccaggagagcagtctgtgaccctgaagactgcagcagtccctgatgcccatgcgagccatgggccaggaaagtgctttctgtgcattgcctcaccacgtgagaggctgatagcccaagatggttctgtagctgaggaatctgggtgagtgacaggtgtcctcctatgcgagattaggggagtaacgcccagctttcagacagccagcaggggggctcagtagtgctaatgccaagcccttcatgcagagaagtgacttaagtgtcagttactactttgtgccagaggtaaatctctctgcagagggaaatgttggcacatagctggtaaacaccagtgtctaggtagccctcctgggcacaaccgtcctcattttttcttttacttgactctccactaaatcctttttgcccgaaactttgtagaattggtatttattgatttgtaccagctaagagttggctatttagtctctgacgtgctctttatggctgaagaaaaacaggtaactccttcacagaggagagattaattccctagaaaggaagacaaaagttttcatggacaactttggaaaggtgtgaagcattaaatatctatgacagcaagacacgggaatacacaagcctgtgttaaggcctgatcccttctgggccaggcacataagctgaaaatggtacctgagcaatttctgagtatgtcacgaaaaggcactgaaatacagaagtttctctatggaaaagagtgtcccggcttggaaactgtgtctgaagcaaaaaatttcctcaaaattgttcttcagaaagggagttgccgtctagtagggtccttacaaaatcattaagagttcgcaaaaaaactagatagatgagatccatgagtgactggctgagaacagatggggaaggcaaattcgcctgaaattctctcagtcaatgcatattatgaatgcttatcgaggttgcttcatgaaaaggggttaaattttaaaaaagagaggcaaagaaattgaatacagatttagtacttgttcttgaggttataacttcagagttgccagatattgaacgttgaattagttaaggtagtgctagttgttgtaacaaataaacccaaatatgtaccgtgactcaaacatgatggaagattattttccacttgtataaagcccgaagtgggcgtgtttatgtgaaacctggtgatttggcgacccagcctcttcctgtctgtggttccactttatttaacaggcagctgctaaggtcacgtacttgtcagcattgaactggcggaagcagaaagatcatggaggactgcatatgggagattttgataggctaggcctgggagtggaatgtgtcacttctcctatttcattaagaacagttcagccttatggtcacgcccacctaccttgaaggctaggaaatgtagcccagctctgcggttggcaagaagaggaaatgggtttcctgaagagctagctgccctctgtcatttgaaattttattaagaccattgaaggtcactttaaaagtaacacgatcactaatatgctgtgtggatcgtcaatatatttttgcctctgagggcaactttcttggtcactctgaagggcttctgatggcctagggtaggtgtttcagtggcagtgttgcacatcgttttgaaaagtgctgtgtgataggcaacttggaaggtaaggaggtgctgtgcttagaagaatggttacacaactcacaaattgaggacaggcatgtggacactacctgggaagactgtgagctaaattgcttcatggaaggtggacatggaatgaaaagtactatttctaactcatagggtatgtgatttcatgtgagtcataaagtttatttgggcagattgaccaaaatttgtagggggtagggattttctcattgggaaaagaagagggctgtcttatctgggggatgccctatatccaagcatgcatgggaattagaagttaatcaaagaaataaagaattaacgctggaggaggggagcctcactcttgcaatgtgggagaagttggtcagatgtgctggaaacacacttatacatctgggaggaaaaagagaggtgaaagctggggaatggggttagtgccaatcctgcactctgagggaatgaaaagagacccaggggactgggcaaggggcgggcaggtgacctgtccctgggagaagcccttggccgtgccagtcttgtggtgggtacccccgtgtgctctcttttttttctgtgtgatgtgggcaggttccccaacctctctgcatctctgtgtgtaagagtctgtgaaatgatgtgttcacagagctgtgcacatagtaggggctttatgaaagtttcttcccccatcttctgtgcagctactcaccagccccattgttggggatcattgtctccataattggctgtgagtaactggggagatgttctcccctataaaatgcaacttcatgacaaaaagaagctcagcccccttcatccctaaagattcgttggtgcagtttcttataccagaggttagataaagctgagaaggagaacttccattgtcattgacttttaattctagaagtccctgttctcctatcttagctttggatgttggcagcagggcagcaggcgggtcttgtgaagaaaagttctgtggaacctaagagttattgacttgttcttcagcatcttcgcgtaatcctcatagcagctctctgaagttcattggtggggaaggaggcttatcactgatcttatagatgaggaaactgagttgcagatcaggtatgtgacttacccattgcaggcaggcccaggactagacaacaggcctgttccacagtagtgttaaatgggcataggtttcttctgggaaatagcaaacgtcccctggcccttaaatcccttcacaaggcattagcatcaactgtagcaaaggaaatggagtcaggttacaggacgaagctcagtagctgggtgactaaatccaggttcggaaccatgtttcccatcacttaacatggtttctgagctttgaagaacttttttcgtttgataggtgcttgcttggcaggaagaggtgggcagtgatcacctttttacaaaatttttttgagattttctttgcaaactctttgtactgaaggaagaaagcaaaaggcgcaaagagttggagataaaagcacaggaacctttcttaaagtggaagttgtcttctcatatcttccccatccctcattcccttttcctactttagaagtatttctataccttgtgcctacagatacatatatttttatttacttactatattttggaaaatggctcatatcatttttccccagaagtcaaaatgtgggaaccagggaccacccacctcttgtacccagttcaaactctttctgggtcactgttttatgtgtaattcatgccaaaaagttacactgaaggatatggatggaccaaagctgcatgggtttcttacaacaggcctgggtagagaggcttggtgcaagaaacccaccttgattacaagagccagaatggagaactgaaaaagaaaagaatgtctacccagtgtcacaggattacttttgtgggtgccaaaacatatctcaaagtagccctttagtcacctaataaaagatgggaaatgtttagtccatgtgtactactggaatccatgtattttaatatgacacctttgatatatttggagggagggtaggaaagatgttctctgttttatttcttctgaacctttttaaaagtttctgaactgcttaaatgaacctacctgtagacttaaatgtgttaggaagctgatttagctgcactgagctcttcctttcccttacttccttctcaggttgtagaatacaagctcagcactttcctggcttccctctattgctctgggaaagatagtaagtaaatagtgtctgttgccaaagggagaagaataaacataggctggatcaccaaatggtgctgcattttatttgtatggtgtcagagacactggctgcttagatggcatcactgagggagatccccagcatgaagcagagaagacaaacttgggagtttgtcaggatacccagggtcattgcaggtcagagagactgactaacaattaccagactcacaagagacggataaataacaagagggtcctctgaccaataaggactttcctcaccttaacaaaatcttcatgggaagcccacttgttataggaggcttgattggtgtattagtctgttctcaccttgctataaggaaatatcccagactgggtaatttattaaggaaagaggtttaattgactcacagttcctcagggctggggaggcctcaggaaacttacaatcatggtggaaggcaaaggaaaagcaggcaccttcttcacagggtgacaggacagagtgagtgcaagcaagggaaatgccagacacttataaaaccatcaaatctcatgagattcactcattatcatgagaatagcatgggggaaactgcccccatgatccaatcacctcccacctggtcctgcccttggcacagggggattatggagattataattcaagaagagattttgggtggggacacagccaagccatatcaattggtaagtaccatgtgaaagcaagttaatggcccatgtcatagaactaaaaccatttgttttagttctgtgttgcttgtagggaattttctagtcagttagcacaagaggtttagtggttcagccaagtttcacatactaggtcccttcatttccagagattgggagtgtctaaaggactaattttgtaatgtcagataatgtaagagaatagcccctggtgacaggtgattgaaatagataatttctgagtcctttcattatttcctatctgtttcttaattcgtgaaataaaagttaagggttatctaaggaagaacactaagttatgactagtactttcatttgttcaataaatacatatctggtgttcattatgtcatttaactttaaattttttttttttttttttcttgagacagggtctcactctatcacccaggctagagcacagtggtgtgatctgggctcactgcaacctctgcctcctgggttcaagtgattctcccacctcagcctcatgagtagctggtactacagacgtgagccgccacacctggctaattttttttttttttttttttttttgagaaggagtctcgctctgttgcccaggctggagtgcagtggtgtgatctcagctcactgcaagctccgcctcctgggttcatgccattctcctgtctcagcctcccaagtagctgggactacaggcgcccgccaccatgcccggctaattttttgtatttttagtagagacagggtttcaccgtgttagccaggatggtctcgatctcctaacctcatgatctgcccgcctcggcctcccaaagtgctgggattacaggcgtgagccaccacgcccagcctaatttttgtatttttagtagagactaggtttcgccatgttggccaggctggtctcaaactcctgacctcatgtgatccacccaccttggcctcttaaagttgggattacaggtgtgatccactgtacccgccttaactttaaattcagatacttttaattctttggttatggtttgttggttgctaccactgtgggtcactgtcttatccttcccagtagggatagatgtggctgctcttctgattttcacctcctcttactaatttaccctgtggtgggaaacacatcaactgatagtgttatttcatgttaagtaaaggcaaatagccaccttcctcatttgactgaaactcaatgtgtcacattctacctcttttcttagtccttaaggatttctgtcatctgttagtctgcaggctcttaaggtcaggctctgtcttcccttcatctttgaagcttctactcttgtgcttccctcttgatgtaggccctgaatcactgttttgttgactaggagagcacatgaactgtttgtgcaacctctcaagctccgtttgaaatggaagatgatcatacatcttgtggcacccctttttcccagatcccaagcttccgggcaccctttctttcttcacctccacagatgctgccttcacccaccctttgatgaaccatcttgatcaactgccaagaatgtcaagggcatttctaacgccagggcaacagctatgagcacttatgagaccacatcaggtttgactcctgaacgaaggatgtccttatccatggtctctttttcctggcaggcatcttgctgttattttggaaattttctctgggccgtagaggtttgaaccagtcatgtctaggagcgtttgttttctcaggaaaagcaaccctgttaaagccattgttttaaaaagtcacttggagcattaaaaacctttgaccatccattcatagtgctaaaatttaggagtggggcttcaggcaagcaatattgaattaaatgtgtggagcactttaagacagcatttgattgtacatttaaaatagggaatgcaaattgaaattcctcctgggtgctttaaatcatgcattatatgtgcagtattttcaattagctgcagaaaaaaatatgttcggtgtggctgtatttttacagctgggaattgctcagagaacacaattgactatttcatccatgtgagatttatttaaatgactcgtggggcatttgcagtttagccaataattgaaaatattgttgcaatgtggcaggtaaaactaggaaatcatttcgcattcctgcagaggtgttccaagctcagcagcatattatattagttgaagaggggcaaacggagtgagatcagtgttgagtcctagtctttcacatttcattcctgggttttgccccaccatggaaatatatgggatggtgctttccagaaggacctgaaacgctaaggtgttatcttgtttctattctgtttttatatgccaaacacaaatgaatggtcagaccagatatggaaagacccatctatcccccaactctcttctgactcctatacctttctttctattcttcgtaccatttcacttcagacgtcacctggaatactgatgcaggaggctaagctgagtctctcagggtagacagttcaacctttccatggttgttcataaatattactagggatttggaatgcatgttcccactaaaatgatgtaaatgtggttaagtgataccatattaaaatgcatcattacttgtgtgattcagacaaagtatgggttaactaggcattttgaaggcagaattaaaatactaaccaccaccactttctctgtaatagtggttgccaaccaggggtgatccttcctctctccttcagggacatttgtcagtgtctccagacatttggttggtccatctgggtggggtgctattagcatctcttgagtaaaggccaggaatactgctaaacattctgcaatacacaggatagccccctacaatgaataattatccagacccacatggcaagagtgacaaggttgtgaaactttgctctagaaatgtgtacattctttttttttttttaaaaaaaaaaaaaaagacttcctcaaatgctttagaccatacctgcttataagatggtggccactgtaattgaccttaatacatgatggtaatcaacagatcattgaaagctttgctttttcatcaatgcctccattatatattgagcacttcagtgtccatgtgccatgctggaggctggggtgccatgctggaggctggggtgccatggtgaacaggatgaacaaggtccccagtgggctcacaggcacaaagacaagggaagatgacagtgatccagttagagggaacataggcatgaaggcctgaggctaggaagaaccaaccacgttctgtaaactgcaaggaggacagggcactgtagtctccaccttattggtggcctaagttacctgcagtctgaaaattggtacatgcagtacagtaagatgttttgagagagacatcacattccaataacttttattacagtatattatccatatgtataatatataaaaaacaatatatttttattattgtactattgttattgttcatctcttactatgcctaatttataaattcaactttatcataggtacttatgaacaggaaaaaaacatagtgtatatagggttccaaattttccatggtttcaggcatccactgagggtcttagaacgtatttcctgcagttgagggggcctcctgtctgtggaaaaggaagccaaatccagaccagacaggccgactcagagcctatggagagagggtgctgaattttcttgcaagagcatggagaagtcatcatagggattgactcagattttagagtcactggggcagtgcaggcagagagatgggtctaggagaccagtgtcctcctccggagatgttggtggcttgggctggggatagaggagcttgagaggggtggatcattcaaacaatggagagcttttccttgttgatggttctgtgggataaaggaaatgatgaaggacagtttccagactttggcttaggttcttggatgaacagttggtggtgtcacttagaaagatatagaacctgggagaacagcagggttggggtgaggagtactttttcttctcatcctggttttctatgataaagggacttctatatatctttctaccccttttattattttattattattttttttttttgagaagtactgtgttttagagtctgcttgcaaaaatggagggtttttctcctggattacctcatcttccagttaccattgttacaggctttccagtggagctcagatttatttctaaacgatctctttgagcaatgatcaagcattttctatatgaggtatttcatccatctaaacaaaactgtgatgagagttggcctaaactctagacttctatcatggaatgtgttgaccactgaggcagggctggtctggctttaacacactaaaacttcttaaagaattatgttagtataatcccaccctatttcagtttcaggctggtaggaaaacacttccttattcatgaggttggcagccttggaaagaacacaaggaaaatcgccagagcctgacgcccatttcctcagtcgccagtgaccatcaatcatttcctaagcccatcatcagggctgtcgatggagtcacagggctgagctgcttcccctggggagggcaaggcctctcaagtcaccttccctgaggacctgtgaccagatgtgaaagtctgataaagtcacatactagagacccttgactccctctaataacaaagaaataaaggaaattgaaaaaagaccacaagtcttaaaggcagctttaaacatgtgttttgatttttagaaattataatatttgaacattttgcccttgaggaaatgttaagctggactgtagtataggccttcaaagcctgaagagaggaccccaggccttcgtgatgatggtggtaaatggggtaacagcagaggccagcttcgagtggggcctcaagaactgtcctaagaacctgagacatagtactttttaaaatccttataacaactcttaaagtaagaactactattacaccgattttcagatggaggagctgaggcacactgaaggctagcacttgtcaaaagtcatacagataattggcagtggaggtgacatttgaacttgggtggtttgtcttaggaacctgcaggggccatgtatagtgtcctaaatccttttgttaatttcttatagaataagaattaatactgttataagtcaaataattatgagaatgtacaattatgcaagcaccctaaaactgtagctattctttttgaaaggaccaaaaatattacatttttgtgtgattgtacatttgcagtacagggaaaaagtaagaaataaaaagatctgtcttaaggtacattggcatttgtttgctgactaaaattttacagtagggtttttttgttgttattttgagatagttatatagattcacatgcagtcgtaaaaaaaaaaaagtagtaattcagagagctctcgtgtaccctttacctggtttcctgcaaaggcattatcttgcataactgtagtacagtaccacaaccaggaaactgacatcacacaatccacccaccctattcagatttcaccaggtttacaggtactcactggggtgtgtgcatttacttctatgcagttttatcacatgtatggacttgtgtgggcaccaccacaggcaagatacaggacatttccaccacagggacccctcatgcctcccttttatcgtcacacacatccctttccctctcttgttctctaacttctggtgactactgatctattctccatctctgcacctttgtcatttcaacaatgttatatacatggaattacacactatgcatctttttgaaataggcttttccattcagcatagttctttgaaatccaaccaagttgttttgtgtgtcagtagtttatttctctttattactgagtagtagtctgtggtgtggatgtaccacagtttagccattcacctactgaagaacatctgggatgtttccactttgggactattaaaaaataaagttgctgtgaacattggtatacaggtttttatgtgaaatgattttcatttctctctaataaatgtccagcattgctggattatacagttaagtgcatgtttagttttgtaagaaacggccaaacttacattaaaaaaaaataaataataaacagaaactaccaaactattttttttttttttttgagacggactttcgctcttgtcgcccaggctggagtgcaatagcacaacctcggctcactgcaacctccatctcccgggttcaagcgattctcctgcttcagcctcccgagtagctgggattataggcacctgccgcgacgactgactaatttttatatttttagtagagacagggtttcaccatgttagtgaggctggtcttgaactcatgacctcgggctcaggtgatccgcctgtctcggcctcccaaagtgctgggattacaggcgtgagccactgcacctgacctaccaaactgttttctagagcggctgtgccattttatattcccaccagcaatgtgtgagtgatccagtttctctgcatcctcaccagcaattggtgttgtcactagtattagccattcatctggacatatagtgacatctcattgtggttttaaaaatttggatttccccagtggctaatgatgttgaacatcttttaatggacgtatttaccatttatacatcctctttaatggaatatctatccatgtcttttatttcctaatccgatttttttttacagttggggtttaagagttttctgtgtagtctagatactagtcccttgacagatacgtgattggagaatattttctcctagtctcttcatcatctttgcaggatcttttgcagagtaaaacttttcattttgatgaggtccaattgatcagtttttcagtttatcagtttttcgttttatgaaactcaggcttttaatgtcaacttagggttttgattcctgcctgttgtcatgcgcagtgccgggtggtgagaaagagagccatggaacaagatagacactggagtgtgaatgattcttccagtttctgtccggttgggttctgcagtatgtcttgatgagctgcctatttgttggagtcatggacacagagttgcccttgtcttgcaaaggctgtaaggtgatgatggtatgaaaggaaaaatatttccagaataatccatggtacctcccaacacaaggtttgtttgcacttgagagcttctgtctggaatactcttccttgcttccatctctccgcccctttgtccagtcacttccagtccatcctccaatgtctgcccatgtggcccttcccaggagcacttccctggccactgcctctcaccctggcccaggtgtgcctctgcttccattcttacacactctcctcgatgtcagagcatttgtaaagtaaatacgtgaaaatgaaagtaaatatcaagtaataagacgatttgattaaggtctgtttcccctctagaccaggcttccccaaccttggcactactgacatttcgctggataattctttgttgcaggcggctgtcttgtgcattgtgggtgctgctcagcagcacccctggcctccccccacctagcagatgccacggcaccaccctccctggcccccacctaccagatgccatggcaccaccctccctggcccccacctagtggtgaaaaccaaaaaaaatgtcttcagatagtgccaaatgctccctgagcgacagagtcacccaggtggagaaccatgccttgagactctgagaggtgggagggcaggtaccaagccccttttcatgcctattctctctctagcatcccagcgccaggcctggcactgtggtgcttcattaatatttgtaggataaattaagggataaaccaacttaataggggacacttgtttacacggcagccttggaaatgctaccctgacttcaaaggaacaaagtgggttttgttgggcacttgagacccaggagaatctagagtcttctgtattcaggtggatatgggtttccttatgcagtacccaagacagcccccacactgaagagttatgtcagtagtgccgagataaagaaagcctgctctagggcacaagagaacacacattcccactctcgccccaggcgccacacaatgatccctctgactttccctctgactttccttagtttagaatcagagtctccgtctgaagtcctagactgtttctcatcaatgcaatgactgcattgataccaatttacctagtggttctccctggaatttttctttttttctttttctttttttttgagacagtgtcttgattgttgctcaggctggagtgcagtggcatgatcttggctcacttcaacctctgcctcctcggttctagtgattcccctgcctcagcctcttgagcagctgggataacaggtgtgcgccaccatgcctggctaatttttgtatttttagtagagatggggtttcactgtgttagccaggatggtctcgatctcctgacctcaagtgacctacccaccttggcttcccaaagggctaggattacaggcatgagccacctcgcatggccactccctggaattttcaagccaaggcttctctatttgggagaggaaggaatgaggccagttacttttgtgtatcctagaagggaaaggatgtggtactggtaattgaagctttggcctgccagcccaccttatccaatttgtcagcccaggttcatctacatcctgttgagaagtttggcagctggaggtggacatgcacacactacactgaacctcctgcaacaagcactgcggaaggtgtgaaccccaggctgagtgactgggcagctgttcctctgcaggaatagaggagccccagcctcctgacacggtgcacctcctgaaacccacaaagcagcagtagggaaccgtggatgacattaccagtcctccccacctaccgcctggtcactccttacaggctgcctttttcttcctaagccaaagccagctctatcattcaggttcaggaaacagaacagccagccactgagagaaaaacctaaaacattcatatataatctaaattattcttacaaccactgttcttactccctgggagctttctaaaccaattttatccagttacctgcttagctaagcaaaacggagcccaaacccctgcttccctcctcttcctcgtgaaaagggagcaggacccagctagagggaaagtgcaagtgaacactgcattaggtctccaaaccgccctgtgcaagtcaccccagaaaggccacctgaaggagggcctgtcctgtctgctgggaggccctctttttctcacaaggagagtccatgccttatggataaacagagatgccttttctaggctgtgagagcaccactttggcagtgttcatggaggatatggggttttatcaggcaggaactcagcagctcccacgttcctatttcagtgagccggggagaaaggcaaggaaacccaacatatattgagttactactatataccaggtactatgctaaacacagagaataaaaaaattaagtcataatccccaccattaaatatctaatatgtagatttggccacatacataggtcaaatcatgttcaccaaaataacaccaccatttactgaaaaaactcaacatgaaatggtctgtgggttgtaatggggtgtaacattcatcttagtgtatataaaaagattccactttattatttctcaactctttctccttttccagtaaataccatttttattaaagttttatgatcctttggtttagccactgttgtgctccataaccttctctgctcccctttagaacacatttcagctattccagagtctcagttcctgataaaaggaaaagggatgcttgttataagtggtgatttcattacagaaattttgaaggctacataacggtatacagaataataaatattcatattcccaccatcagaaataactatatagatattttaatatctgtcctgttagtctttttttgtgcctgtgtataattttttttttttttttgggatggagtctcgctctgtcgcccagactggagtgcagtggtgggatctcggctcactgcaagctctgcctcctgggttcacgccattctcctgcctcagcctcccaagtagctggcactacaagcacccgccaccacacctggctaatttgtgcctgtgtataatttttacatagttaattataccatacttttttccagttaagatatatccagaatgtattaccatgtctttaagttttcttcagagataggttcttaacagccaaaggatattgtgttggatggatgtcattaactgttccttattgttggacattttaggttatgttctcccagaagcaatccctgagccaagcataaagtgcaagtgattcattaggaagtgctcccagttgaaatagtaagggaaggggagaagtgggaattagaaagggaagaaaccaagcaagaaataccaggtgaagtcccacactcagagctcatggggagctctggagagtcagttaacaagcagaccagtagtcaatggctgttagtcctcagggagggagtggtgtttgtgaactctcaaccacttagggccaaccaagaaagtggccttcaactcccactagtaattgaccgaggtaacaggtataaaccattagcaacaaagcagataaaaactaggagataagtgcacaaagctggtaaaaggtcacccacagtgtcccctccattggagatttaatttgcaattataattgctattgcaattatttattgcagagaatattgcaatacttttgctactgaaaataatagtaaacatttttggacctgaatcttttttattatcacattaggattgattgatagaaggggtattactgttccaatagatagatacattattaagattatttatgcgtactagggattgcctttaaaaaagatttttaaaaaatcaatttacatttctaacacttgacactcattttttaattggcaagaatccagagagtgttagtttctcgtctctgaattggaggcccataggcatatcagggttattctaaaggatcagagaaatcatgttcatggcccagttttgattatagattgataaataatatctcaaaatatgatttcttaaaatgtatctaggtactgataaaaagaatttggattttattgacatgtttaagaattcatggttgtattttatgtatttttaccaatactaaaaacatggtcatgaactatgtgtaatattttttatgtctaaaaaaggtacttccatgtctcttgctgaagagagaaattaaaaaggtacttccttgtttttaaagattgagaaccattggtcaatgtcactataatgtcttgggtcacctcttggttgctggattaggaaatcagccatttggaccattacgtcttaaagacatatcaaaaagaaaagtctataggacttgatacataggtaaaccagatttaatgatctgagtcagcagaccgaaaaacatatctcagcactattaaaggttttctgggacatactcacccctccccctccattcccacagtaatggacccctcagttctcttacagagacggcaaaacgcaccagcattgtcttaatttatttctgagtcttaaatagtctaaggaagttataaagatacagacaaggctttatcaaggtagcagtgtttgactgttttcttagcttgatccttgagactttctaaatggttgctgaaatacaaatcagagtatttcaggtcttgagcattgaagaggaccagaagaagagagccagcatttactgaacacttgctctgagccaggtattaggctggttactatgtctttcagtttgcacctattgaatttccatggccacccttgagatatgatttctaatatggcagaggacaaagctaagacggatgaagattgtgacttgccttggatctcttggttaatgggtagtaggattggaatttgaactttaggtgaattttcccggaaacttagaggaaaatagaatgaatatcctgtaatcttgaattttaaaagacagactgctaacaaagctctaatcccctccttccccctagccttttcccatcaacccaaagagatttcagaatggataatatatggataaaaggcacttgatgtcagagtgtactttataataaaatatgtgtcttttcattgaagggaccatttggatgttgctgccatacttttcagcggctgaaaaggtatttcctaaacatttttaggttcctttttggccaaattaattagtgtcatagaatgagcatacactttgaaggcagacaaaaatttaagaaaaaattcagatgtctctaagtctttctccactaacctgaaaaacacattttaaaactaccaagctgctgtccccttgataagttggcatttcctgtttgttctctaaattttaaagatgctgagtcattttgctagtacttagtacacttcccaaggataaccaagatgtactttagtttgcttgttcacctgatttggtatcataagaaaatgtggtagatgtttggaaaatgaatacaggtcttggtggacattatttcagtaatgcttatacagatttgagagacagagaccatatgtgaggcttaaccccgattacttgtacattaacaattactgtcatcttacagagacagccttaatctccatggctcacctcctgaagagtttctagaatgcctcttgccaaacaccgttgagtgttggcaaagtactgatgagaaatgtttggtctgaatgctggacagcacgattttacttaaggccattcagaagtctcagtttggcagccacaaaccttgcctgtacatttgttttgttgttgttttttttttgagacagagtctcactctgtcacctgggctggagtgcagtagcacaatctcggctcactgcagcctccacctcctgggttcaagcgattcccacacctcagcctctggagtagctgggattataggcatgtgctaccacacccagctgatttttgtatttctaatagagacagggttaagccatgttggccaggctggtttcgaactcctggcctcaagcactctgcccacctcggccttccaaagtgctggggttacgggcttgagccaccgtgcccggcctgtacatttatttctttgggaagccctggcaggaaaagctgttgagagatgtcatgattcggacaaaacatacctgctgtttttctctacctgctgtagcccctgtagattaataaggggccttaggttccaagaaccaggatcctagcaacacagagactagaaggatggcgagactttcccagtgcctgagaaggtgtcagctttcactgaggggcggggaggggagaggctgagataaatccggggactcaccttgccgtgctgtgtgtcggttgtttgtcgctggcatctgcactgttaggattccatttttaggctgggcttgattcaggaggctcgctgctgtcacacgagggcaatccactttgattctcccagcccagcttttaatgcccagcagactcctttatcttgtcatcatccagcgagcctccctcggtctagatggccatgggaggcaaacccgttcagtgtcagcagctggtctttcataatttgattttccagtgatgtttgagccatcggtgtgaaacagtcaccagtctggctctcataatttgaatttcagtatttggatatattccagagagtggtgtaaatggactttggattttccttatcactgttgctcagcatttccacagtttaaaacatttagggtttattagataagggtgctcagtgctactgtttctcactaaaaggaaccagagctccctggagaagtggctgattccatctggaacagaagatgtataaaatgagcctaaacatctagtcaaaccggaaagcaaggaggctaacaagactgtagggttgtatcagaaggtttaagaacgagtgtgaagaggctcattttgagcaccaataagaataaatttgcagtggatcgagacccttaaagtatgttgaaaaacacgagtttatagtgatacagaaaatagaaccctctggtcaatcaacctattttgaattattttgaaaactgttggatatgggaaatgaatgaagaatttgtcctgcccttgtaacacaaaataaacctcagggcaaccaagtagttgattatggaaaacttctttttatataaatattctaattaataagtgagggaggaaagttagaattataacagcacccacatttggtaactcttaataaaacagtgcacttaggcggtcatcataagtagcttgctaacaccacaaaaagagacagtcagctaccgtctactgatttcaccaccctctacggcacctctacaaaatattcttacaaaaagagaaaattgacttgaatctgatcagtccctacagctggggtcagcaggcttttcacgtagagggccacataataactgtttttggctttgcaggctataccgtctctcttgcagccgggcacctctgctcagctccctatcatagcacagatgcagccataaacaaagaaaaaagcgtggccagatctggcccatgggccgtagcttgcagacccctgctctagctctaacagtttacaggaaggacagaagacagagaaacttgttgaacagcatgacattaatgcagttagcaaaatctaccctggggaaactctacagggcaaataacctgtttttttcaacagaaaaaattccaaggttaaaaatgaagcaactagtggaagatgaaacaaacaaacaaccaaaaaaacaaaggcaagaggtgtaaccagttgcaatgtatggagcttacttagatcgtaattcaaatatactataaaaaatgcgaacatggactagatatttgacatgttaaggagttattttgcggtgtgataatgatgtcatggatatctattttaaatccttaggctgagtctatatgttgaaattattttgaatgatattatatgatgtctgcagttaactccaaaatcatctttgatttgagtagaaataaaccaagccgtgagttaataattgttttttctggatgttgagtatgggggggagtattaaatatttgcatatgtttgatatttcccatgatataatgtttttaaaaatatatgtatgttttataaaacatgatcactttaaaccttttatagagaatgagagagcatggagaacttttccttcattagacgcttctgtgtcctcccaaaataggtgtgcaccatccagctatgaatggacccagaagagtctttccagtggtttttcccaccaagctgtctgcctacaacttacttattatgctacatagagcagactagtgtcatattatttatcatttgttcatgcactatatgtaaacttttatttcataaaaagaatttattaggtagaaaatgagcttcatgttttgtgtctggctatcctagttgccactgttcagttgttcagcactggttccaggctaaggggtctcgtcacaggtgctcacacagcctggagaggtgatggcagtggcggccatggcagggtgtgaggcagcagggagcagcgggagcgaggcacgctggaaagtgggtgcccagcccataaggggtggcgtctgtgcagaacatttgccatgggggtgagggtccagtagtactagaacgtccactctttttcatttttcctgagaataaccctaatctagacttgtgacattttttgacttttagttgctaaaaatatttttagaatactctgtattgcacatcaaacacttgctggattagtcccacgggtcaacctctgattttgtgtctaccaatgaatggtaaggccctaaactgaccctgtgggcaccaggagtctacagtccctgctttccgtgagcttccagtctacttgcgaggaaagaaaacatacttggaaaacaactaaaatgagacaggcaaataggaaatgctataggaattcaaagaagagaataaagaacctcatctttaacaatcaggaaaaacatcacacacaccgtggaaggagttgggtagaagtgtcactgttgctaggtggaggctaagggagagaagcagaggctcgggcttgggtaagcaagctctttcaacagaaactatgattcttgaaaaagagaagagttggtagatttttggagactagtacccctccccaccagtggataatttttctgaacgatcaagtgaaaacaggtagcaaactgttgaaagtatagcactgcaattcagcagagagtttgaggatttgagctgcatatttgagcatcacctgtgtagaagagatggttgacgccattgggtctatagagagtgggttcctctaatgtctgctattggcaagcagtctatttataaatgttagggttatattttgagtctggcatttgcaaaactaccatcccattatttactacgttaaatcatggttaaaactcaaagcagtacccagctatttcataaacattccccgtattggaaaggagaaaggtttgaagtaagagaaactagaagaacatagggaaggagatacctggcatttggaaggatatgcctgtggcgatggctctactgatgggcttatgatcttccctccaatgatggcctagagacctatttttactgttgtgaaacaatattcaagcaaatgataatcttccatcttgttgctatgcagtacatttgggcagcactcttatttctctctgatttgaaagtttaaagtgtaatttctcttaaaaaggaaaataaacaggaggtttctatgtacttcccattatggcatctgcttgttccagagatcaagcatttcaaagcttgagaactccaagttacttcatgtaaacgattgtctatttggacatgagtgtgtttcattgttaggaattatgcaggcctaaagtaatttatagatcaacacccactctcctggctactgaactttggagaaaaatgaaagcttattcttagacacgtatataagccaggtgagtttagacgagtgagcatttggcctaggaaaccaaggccaaggagaagttctgcccagcacatcaatcaaaaatagctctgattccaagttctgcacagctctaacactgtcccagtgcacttttatgaaactgtacatagacagctctcaaaaacttcccaagtccaagaaacccagaaaaacacccataacagctttcttccgtgtcataggaaaactgttcttttagcgaaaatttataatgaagcagaattctgctaaataagatggctgtttatttgggagactgtccttgtgactttaagacattggagctgttagatttctcactgtcactgatcctttcaccctgtttttacaatgttttatatatatatatatatatatatatatatataatatatataaaatatataaaatatatttatatattatataatataatatataatactacatatatataatatatatgtagtatttgagtctatcaactttaagctaccagaggcaaaaccagtttaatgttcatgtcttctgaatccaaattctaatatttattcaaatattcactaatctaggagcatttctttggggaggcttcaggagtacagattatagtgggccgaatgtagacaccagaatagactataatgcaagagacaacaattgagatggatgaagttggtcactgcatttggccatttgtaagaaagattgtacacaatgttttatacttatgatgactttgtgctatattaaattttaaagaggatatttattgctcaaaagaaagaaaaggcaagagggaggaaggaaggggagaacacagtttctagtttttagatggaatgaataaagcttccacggtcatgatttggacgctctccaaagtccagtaggctccaggaaactccagggattgtcgtggcattagagccagtcctaggtgccaaagtcaaaataggccacgctggcccgttgagcccaagcgggagcagcgtatgtaggtcacttacatgttttgaatttagacgggctgagttgatacaattgttttacaatgaagctctggagaaacacggaacattctaaatctttagaaaagcgcttgtttcacaacatataagaaacttgcaacatcagctggaaggatggcctcagtggttcacagtggggccctctgtgtcggggggccaggcagggagttctgcgtgtgcccacagtccttgctcgatgtgatggtggctcttccctcagagagtgtcttgagctgaccgtgaggatcaggattaaacacaagcgttttcttagccacactccataaacgctgttgtgatgcagggaaagattaattaataaaaataggaagtatttatgagccatcggattaatctcacaagtgtttattgaacatctcctacgccctagggtgggaagcacagaaagtgtgtagaaaggaaggcaaggagacaccaaatacggggccagttttgcctaacactgtggttgtgcccatgctttcccccagagcacacagagacatgatttccccctccctccaggtcacctgtctcttaaaaggcccccttctgttttattctctgcagtcacccctaacctcccacacgtaacaacagagtgggacacattggctccacgggagactgtgcttagcaggagcttgggcctcttggggaagaactgaattagcaacatcacgaatgctgcttttgttttaccagctgccactgttaagttcttacttaatgaaagtatttgcttttccataaatacatgtaaatttcctacctcttacttgtcatagccagagaaagctctgtgagtggtaattaaggaaggaagcttctttaaaacaaatcactgtagttgagaacatccgtgtaagcaacaccatcctcaaaattgatgaatttaccaattgtcctaccctattgtaactttaaagcagtcacttaagtttattttaattaataattctttaattttaaaagcagtgtgcttatggtaaaagaatcaagcgcttgtggttataagataatcagagcaacccgagggattcactcccttgtttgaaatcctccaggggtttcttgtaacccttggagtgaaatcccagtgcctttccaggctctacaggaccttaccagatctgaactctccttcggcttcacccacctgtctcccttctttacgaccttgatttcacatccacactggcctctaatacaccaagtttattcccacgtcagggcctcggccctgctctccctctgcccagcgtactgtttacccatcagagtgtggctggctccttcccccattcaggtctcatcacgatgttcctgccatagagatggctccctgatcaccctatctaatgaccaccccccgcaccctgccggcccctcatctgctcgcatccctgtattttatcattgtgctctttatccttttctgaaaatgctttattgcttgctggcttattttctgtctcccttctagattgtaagctcagtgcgggtgagagtcttgtccattcagttatgtcatatgcctaacacttagaaaagggtccgacacccagtgaaccctcagtaaatattggcttaattggatgaagggcacttatgagaattaaataatgattaggctgagcatggtggctcacgcctgtaatcccagcattttgggaggccggatcacttgaggccagacattcgagaccagcctggcaaacacagtgaaacctcatctctactaaaaaaaaaaaaaaaaaaaaaattgccagacgagttggcgcacacttgtaatcccacatattcaggaagctgagacgtgagaatcacttgaacccgggaggcggaggttgcagtgagccgagattgcgccactgcactccagcctgggcagcagagtgagactgtttcaaaataaataaataaataaaaataaaataaccgagaattaaataatgattagtataggacctggcacattgtaaggacccaagagatggaagtttgcttcctttccctccccacctccccagggtgtgttttgaaaactgatttaattacactgttctgtcttaaatatattcacatggcattcaattatgctgagtacagtcaagcatactaggtgagtacaaaatggcctcgcaggccaggtacagtggctcacacctgtaatcccagcactttgggaggctgagtcaggcagatcacttgaggtcaggagtttgagaccagcctggccaacatggtgaaatcccatctctactaaaaatacaaaaattagccgtgtatggtggtacacgcctgtaattccagctactcagggggctgaggcaggagaattgcttgaacccaggaggcggaggttgcagtgagctgagatggcaccacttcactccagcctgggtgaaagaacgagtctctatctgggggaaaaaaaaaaaaagtagtaaagtacccatttaagtataatttaaatattttttaacttacttttccaggtcgtccttggtggaaggaaccatgaactggcatctccccctcttcctcttggcctctgtgacgctgccttccatctgctcccacttcaatcctctgtctctcgaggaactaggctccaacacggggatccaggttttcaatcagattgtgaagtcgaggcctcatgacaacatcgtgatctctccccatgggattgcgtcggtcctggggatgcttcagctgggggcggacggcaggaccaagaagcagctcgccatggtgatgagatacggcgtaaatggtgcgtgtgcacaattgctcactggcggagcctttgcctgagagtcttgtgacaggagggtttatggcttggtttttgctgacaaccccaagaagcagagcagccagaaggggatttgctggtgccacttggggcttggggtcagtctcttctaaagaacaaacactgtggtgctggcagttaggagaactagactctggtcccttttttgtacttttggagcttggggtctgccactaggtctcctttcccagggctccagccctcgttccagcgagggggacacttcctggcttaccgcctccatggcgcccagggttgagttgcgctgtgatcgtagatgtgcttgtgaagcctgtgagaggagctgggaaggggtggctgtggagggcccaggggcctcgtagtgatggagccatcctgggtcttgattgtggtggtggccacacaaatctgcacaaatgataaagttgcacagacccccctccccaagcccacaacaggagtgtatggaaaatgagtgaaatctgaatgcaccctgtggactgacctgatggaaatttcctgatgcaacgacggtaccactgggaagactgggtgaaaggcacgtgggacttccttgcatattgttttgccacttcctgtaaatctataattatttcaaaatataaagctaagcaaagacttggaaccaacccgaatgtccatcaatgatagactggataaagaaaatatggcacatatacaccatggaatactatgcagccataaaaaagagtgagttcatgtccttgcagggacatggatgaagctggaaaccatcattctcagcaaacgcaggaacagaaaaccaaacacggcatgttctcactcaaaagtgggagttgaacaatgagaacacatggacacagggaggggaacatcacacactggggcctgtcgaggggtggaaggcaaggggagggaaagcattaggacagatacctaatgcatgtggggcttaaaacctagatgacaggttgatgggtgcagcaaaccaccacgacacatgtgtacctatgtaataaacctacacgttctgcacatgtatcccagagcttaaagaaaagatacagatagatagatagatacgtagagagagagagcgagctaaaaaaattgttttaaagtaaggcccaatgaaaaagatttagtttgagttaaagaaaaacctttcttaaatgacccatttaactgcacgagcttcatcctctggcactgttttacttcagctgaggggtcttgcccagagccatgtcccacctgctgtctccataaatgcagtgctcaggggagcaggactggctccccccctcttcctggccaccagcaccctctgtgaccttgcaaaagtcacattcacatctaggtctgctcccttcgttggaaacaagggagtcttcctgcccgtgttcttccacccaggctggcccgaaagttctgagaatcttgactgcactggcgtcgtcagctggagagtaagatcagtgaggtggcgatttgtgtccttcagtgcctcgctctgcacccgcctccgactctgctcagcgtggcctccagggctgccagcaccaaatgcctaatctcactgctctgttgatgcagcattacacttctgtacgagtttgcagtttgttcacctgttggaagcatggaaggactaaatacttggaacacactcttctgccccttgcttggaagttcagaaaactcctggtgatttataacttcatggtggatcactgctaaaatttatgacctttcctagtgtgatccaggctgtgtcggccgagacagttccaaaatagcaactggacttttgttgtttgttttaatgctgagccacactgattttaagccattatttctgaagttctaagaatattggcccgttggccatccaccactgcctcacccctaccccaaaagggccaggagctggcagttggccttggaattgtctttcagcctccaaagccggccgttttcttacttgtagaatgggcctgcaccatagaacaattgtaaggtgtggtcatgggcatctaagagagggccatgcacgttgtaaagccctacacacgcccctgtttgtgggccctgagaagactgcccccctcccccgtgtaaaaggcctgaagaggacgcacattcagagtgacaaatcggctctttagaggaccatcaaggtgactctggcaggatgttttaggacagtgccattttgaagagaccccaagcgatgaagaaggatctgtaatttgagctctctttagaaacacatttcatccttataacttatttgcctctttttcaccctctcaaactaaatggagcatgtatgaatggctcatgtaaaataaagcttacgttgccataaaattaatctccttactctttgagcttgttaccaagtaaaaaccacattgttctggatggtggcccatggtaattttttatagtctttctaatgcttattttattcattttttttccaaaatagaaaaaaagaaattacattgttaaatctttggcaagaaaggaagtagcacttaataacgttagacaagaaagagagaaagcattaggaagttccctttgatttgttcccccttggctatagaactgaggactgtgccagcattcatactgacctggtgcccagaaaggctaccatgagaatgaggtctgcattgggaaggtggtgagaacaccttgaatattcctgttttgatgcagaagcacagttgatttttgagagcttcagtggttagactttaaccccactccctccttttcttaagaaataggcccctgagagaacagaagacttagtttcttgctactcatagctatcctgtttatactgttctgttatttttatttttgagacagggtcttgcttagtcacccaggctgtatgcaggggcccgatcatggcttactgcagcctcgacttcccaggctccagcgatcctcccacctcagcctcctcaagtagttggtatcacaggcgtgccaccacacccagttaattttgtatttttggtagagacagggttttgtcatattacccaggttgttcttaaactcctgagctcaagcaatccacccacctcagcctctcaaattgctgggattacaggtgtgagccactgcacctggcctatactgttcttacttgctgcaacataaaagattttaaaaacttttctagattcttatggaagtattgctgtatcttctgatttctcttttaggagttggtaaaatattaaagaagatcaacaaggccatcgtctccaagaagaataaagacattgtgacagtggctaacgccgtgtttgttaagaatgcctctgaaattgaagtgccttttgttacaaggaacaaagatgtgttccagtgtgaggtccggaatgtgaactttgaggatccagcctctgcctgtgattccatcaatgcatgggttaaaaatgaaaccaggggtgagtggccgcagtatgtcatttgattgcatagtttgtgaatgaagcatgagttagactccagggttcaaagtggtgtctgcaagtccaattcaatggcctgtgggttgagaaactcctggaccaaggaagctctattcagtctccctccttccccttcaatctgccattgctcactgtgctcctgggaggtgtttctcctgtagtttgggcaacagaacagaatccagcccctccactgtctcctctccttgccatatctggtctccagcatccttgcccacaggctcttgttgattttgaaggttttcttgctcattccttcctgcttttgcatctgcctctccctttacctggaatgtcctcctcatccttccaggttgattgatctctttgccttccatgcctcttgcttctgccattgccaaagacataggtaccctgttgtccgttatgattggcacatgattacaacttttacacccccccgattacagccctttccacatctcaaaatgattactcatttgtaagtgtctcttctcccattaaataaaggagagtctaacgttggtgttttaaaacttaatttgtaggccaggtgcagtggctcacacctgtaatcccagcactttgggaggccaaggtgggtggatcacctgaggtcaggagttcgagaccagcctggccaacatggtttatcccatctctactaaaaatacaaaaattagccagacatgctggcgggcacctgtaatcccagctacttgggaggctgaggcaggagaatcgcttgaacctgggagggggagattgcaatgagccgagattgcaaccctgcactccagcctgggcaacagaatgagactgtgtctaaaacaacaacaacaaaaagaaacaaaaaaacaaaaaaaccttaatttgtaacgtggaggtccagttggaaacatgcaggaggagctgtaggtctggaacaacaggagaatgtgaaggatgggagtacagatttgggaccttttttttatttttaattttttggagacagggtctcactctgtctcttaggctagagcgcagtggtgcaatcatagctcactgcagcctcaacctcctgggctcaagtaatcctcccacctcagcctttccggtagctggaactacaggtgtgcgccaccatgcctggctaatttttttattttttgaagaggtggggtctcactgtgttgcccatgctggtctcgaactcttgggttcaagcagtcctctcgcctcagcctcccagagtgctgggattataggcatgagcccctgtgcctggctatagagccttttttcatagaagggagagagtcaataggaagaagaagcccaaagacaaaacctagggaaactgtcgcctttcaggctatgtttcttaaaagtgtggttactggtgtccctgcatcagaattatctgggctatgtgttgagaaggcagatccctggagcccagcccactgcattggaatcgccgagggagtggctggcaactcccagtctgcctctgcctcccatcaccattcttacacacccagatgttggagacccattagcagaactagtgaagaggtggacaaagaaggctccagggagggtggaggagaccccaggtgacttgggtaaattcgtggcgtcccttctcagtggggcctggaccatgcagtctgggcgcccttcctaaaaccataaaccatcgggaggtcagcacacatgagggtgttcagtggagtctccaggtgtctggcatctgtaggcttgtgaagagtggtcagaagcagacgccctcaggactggttcttggtcctgactctgtggctggaggctgtgtgactgtgacatgtcattttgtcctcttagccgctgccttgatctgtagaatggcaatattaaaccacattagttagaccatgtgacagtcttcagagcacctggagaaaacccccacgtgtgctgggaagaagcatggagactcctgcagcactttgcagccctgtcagccccagctcctccgtttgtaacaaatatttttaatactctctttactattctgaaatgaaattcatacatcatattactctatgcacacacacaaatttttaaaaatttgagacagtgccaaactgtaatacaaaggaaaacaaaagaaatgtatatatgtagttcaataggtaaacccttgggtacaactacactcaaatacgtaataaagtagtcagagtctcagaataattgtgaattgacagctacaaaagcagacagagacaggcatgttgtcctggtgactcataaacatgagctgtgttaactattgctgatgcaattttttctgaaacggtgcaagacttttgataaatttctgaacaaaacaaagcacaggctctgcttgatttgcgtgggactcacattcctggcaaattcagcatacatgaaaaggatgcaaaaacaaaaacaaaaacaaaaacaaaaaacccaaaacaccctgtgtttacacacgaaaaagaacgaggttctgggctcagataattataagtaggtgtcctaccaatgcagagatccggtggggtattgaaaagccacgggagaagcagcacaattcttcattgggtgggactgttttgaacattgcaggacagatagcatttctggccactgcccactcaattaaaaacatccctgccaaattccaaactgcctttacctgggggtgaactgcccccactgaaaggtacatgaccacatggtagagctcagaagtgacttggagctcaactgtttgtgtctggaaggttgctgggtctgtctcacggaaatgatagttccttccctacagagagtgggagagcccaacgcgcaggccttttgcaggaggagacccatcagggatgggtctggcctgttgacctctgcagactcactcatccttgtactctatgttccagccacacaggcctcttcctagtccccttacccaccatcctgtctcctgttggagaaccgcacacatacactcctgctgccttctctccctcttccctggttaaggccaactcatttctgtaccataccatgagtggcaggcatgaacattaaaagcacacattctgagtttgaatctcggttctgccacatactacctgtataaccttgggcaagttatttaagcttgctttgcatcagcattctcgtctgtaaaatggagagatgtaatagtgatacctattcaaataattctaacaacaattaaggctggtgtgaggatgtgaataatacatagaaagcatttagcaaaggactctgcacttagtaaatgttcaaccagtgtgagctatttttatagccatttctgaggtactgtccatctcagacctcaccaactaggtcaggtcaccttcttagccctccatagccttgagtaattccacttccagatatttatttaaattgcagctgtatacttttccaagttattttatgtcagcctgcacctctctctcattcgtagtttttgagaccagatttccttcttggtttcttatttaagagagtaccaggcacatggtaggcaggtaggtatccaaggatggatggatggatggacggacggatgatagatgcatgtctgtggcagttactgatggcaggtttccatgtgcctctttgcctctaaactatgcattttctttttatttcttcatgtccccttattatatcttagtcctcccaggggcagttggaggcattatttgtctctgtaaaaaggggctaaggacatttctacagacagttattgagcactgcctgtatgctccatgtagtgctaggagtaagcaaaaagtgaatggcagagtctcatgcaggtctcagtgtagctgagggagacagacacattaaaattggctagaataaaatactgcaggtgtcatggtggggccaggcattgggctttacagaaatcgggagcagagacatctcttaggaggtggcgaggatgatcagagaagatttagaagtccaggggaccattgagctatgtcttaaaggcaagtaggaattgaactgggtaatgttcccagcagaggcaagaaacaacattcactattaggaagtcaattatgagcttgctagtgggatggcataaagttctaacttcgctcccacaggacagtctgtttgcagccagctttgtgttgagttgaatgatgtctgtttatggcttagatattttccttctttgtcctgacttaaggtggcgttagtgcccccttgtggaagtagtgagtggtgatggaactgtcttagcagcacgctgtgggaaacttcagtgtttatttatcatgatttatgtaaacacttgtttactgtacatcagaatcctcttgagtttcatttaaaaggacttaatactctcacccctgaattagatattcttgcttcttcaaaagctgttggttttactctcaccatttaaagtagtataacttgtatttatattatgtatttatacacatacacacatacacacacacacacacacacacacacacatatatttgagctaataatgcagtgaactaagttttaatagctttgggcattactgatccctatttaaaaacacacatacatacagacacacacacaactgaaccttcaaagacctcagaataattgtgaagctaactgtataataactgtataataaaaggaagctaactggaagaccaaaccttcagccacaggtagcattttggaaggctctttcagccacgggtagcattttggaagcatcctgaaatgagaagaattgtgttcactccttcactcctgatacaagtaagacggaccattcccaacgtcttgtaaagagcattttccttcaaaattaggagttctaggacagaccttaattttttctgtctttttaaagatttattttatcttattttttttagagacagggtctcattctgtcacccaggctggagtgcagtggtgcagtcatagctcaacacagcctcgaactcctgggctcgggcgaccctcccacctcagcctcccaagtagctgggattacaggtgcatgccaccatacccagctggctaatatgtttttaatttttattttttctagagatggggtctagctatgtttcccaggctggtctcaaacttctagcctcaagtgatccttcctcctcggcctcccaaagtgctgggattacagacataagccactgtgcctgggctttattttatttttcattgacccataataattgtacatatatggggtacagtggtaatgctttgatacatgtatacaatgtgtaatgatcaaattagagtaattaacatttcagttacctcaaacgtttctcatttctttatggtgggaacattcaaaatcctctcttctgttgtctctaatattagcaccttgcttgatgcctgacccataaacaaagacactgattttttgtttcctttcttctttaagcagttaggaggccttgtgatacccagagattccaaaataatgtttgatgtttctaaaatcttaagagaaatgaagcattcacccttaataacatacaggctgaagtgtttatttttgactgggattgaattaaaccaagtggagcaaaacaaaacaaaattgtttatcttgtactgaccagaaacccttactatcagtcatttattggcaaaaaaaagaaaagaagaagaagaaataattcattatcaaatgtagcttatttggatgagtaagatttttttaaagcctggacttgcagggaattgataataaaagaatttcttgatgaaaagttttgtaacccctagctaggggtttctaaagtcttttctgtttctcttttaacttctttttaactttaatatttagtgggggaggggaacctagaaagtacaaaagggtagtttaagaagattctctttaacactccttaaaaatcctttgatttttcagtctacctgatgacagctgccatttgccctcaagccggccaccagtcctgaggttatttttcccttgtttgttctttggcttcacagatatgattgacaatctgctgtccccagatcttattgatggtgtgctcaccagactggtcctcgtcaacgcagtgtatttcaagggtctgtggaaatcacggttccaacccgagaacacaaagaaacgcactttcgtggcagccgacgggaaatcctatcaagtgccaatgctggcccagctctccgtgttccggtgtggtgagttcatgctcagcgaagcctgttctaggatgtgctggcggcagaaaggcccttgagtgctttaacttaattccagagcaaatctaacttttcatcttttaaaaaactggggaacagagcagggtgctgagaggcaggatttttataaagctcatgtaaatctgtgttatgtacaaaagttaccatgcatagcataatatgcataatatatgcataagttatgtacaaaaagtattaatgcatggcgtgtgtagtaggctttttggttgaaaacttaaagatgaaaggacaattcatgaaatgagtataagtgagcattaaacacagcaactcattagcagtcttacattaccaaattaaaaattggatttctttttttacttagcagatcagcaaaaattaaaaacattggtaaaatccttcggtggctttggtggggaggaagcaggacccttgggcactgttcgtggcagggatctgtggtccgaggacttcctcggggtcctggctccagcagtcccgctccagggaatttatactgtgaacataagcacacaatgacaaataaatagaagccaaatacaaatatacagtggaacgtatgtgatcatgagacttagatttatataaatggaaagattatgcaatatatgattgatttcagaaaacgagatataaaacagcagatatcaatctcgcttatgtaaaattcttttctttatattcacacgtcaatagagataggtctcagaggatcttcagtaaaaaatattaatggtaggatttcagaaaaattatttctgaatttgaaaaaactttttcgagatagagtctcactgtgttacccaggctagactacagtggcacaaacatggctcaccgcagcctcgacctcttggactcaagctatcctcccacctcagcctctcatgtagctgggatcacaggcatgcaccaccacggccagctaatttttttactttttgtacaaatggggttttgccacgttgcccaggctagtcttgaactcctgggcctaagtgatccacctgccttggcctctcaaactgctgggattacaggcatgagccaccgcaccaggctcaaatgaacttctaaaatcactttgcctgggatatgagccggtggccgtgttagtgtttcaatgaagtgattttattttaggtcaatcttttgtacacactttatagtccataaaaaaataaaataaaaagtgagggggccctcatttactgtatgtttctcttgctgaaaaaaaaaacaagttaatagttcaagattaaaatgcaaggattccattaacattcctatggaagattttaaaatgtttgtttttacagaaatataacatgaatttcttgagtaaacaggctattcccagagagttacatgtcagggtagcttttcatttggaaactgatttgcctaggaatatacatgtgtgttttatagaaaataatgcacaaatacattcttattgtcaaagatttaaaccctacagaacccccacagtgtgttggtatcttccctccactttccccgattcatgcctctcttctttacccgcttccaccctgctctgggcccccttgccctctctcttcttgctgggtttgctgctgggagtctgcaggcgataggaaggacagaggagaaaggggtcagggtactaacttcccaagcccccccttacagagtcatgggccagctgcattcctctaccaaaggtttcagcttctgccagggggtgtgcccaagagctctttctctctgggtcaccacccctctcttcctccctcccagcccaaggctagccatggtgcccaccgtttcttgtccagggtactgtccatcatgtttctctgtatcctgtctatgctttacaactggtccttcatcaaattctgcttaaatggcccaatttgatgtcttatctgtttactctccaccctgactgatctgtacctaattcggaccagaaaaagaaagtccgctgctcactcctgttctcattccctcacaagtaaacacggcgaacagcttagctcacccttctcaccctcctttccatgcctgtcatcaggtttcactgaggaacctggaactggatgcgactctgttctgggccatgcagcagggcatgagagtgtcataagttccctgttttcttgccttggccaaaacccagcttatcatgataagatagggaaggattgtcttgacagggctgtgaagaaagtaccgccatttgtggtgtccccaagtggctgattgtttccatttccacagactgtccgtcattttctgcctgtttcctcactctgacctgcaggagtggcccagctcgagctgctgtgtccaaactcacagggcccagggtgccacctgtcggatgcttcctgggcctcagccacgcctcactattctgggtcactttgccaaaacattgtcattcagtttatctgccttcttgactgttttccccaagatatcattaagagctctgagaatatttgcttgataacaaaaagagagtgaaaactagaagagaagaaaacccttctgatttatgccccataaagtagaagtacttcaagggtagaaacttttctattaagaaaaagagaagccttaaaatcatttttagtagatttatatttcatgctcattgcaaaatcctcagtatacctccatgtacaatatatatggcagaaaccaaaagttcccctaaaatcctatttcctaggataaaattccctattaagtatcaagtttgtcatttgagaacctttctaggtatatgtaaaatatgtctatgaaactttttacatacataggattgtactgtagtttctgttctataatctgctttcattagagagtggacaactttttgtgccaattcataaggatttacttgatccttttatcagccacataatattccataatacaaatgtatcatgctatcctatggaaagccatctgcttttttcctataacaacactgcagtgagtattcttgtacataggtttttcaatatttgcatcagtaaatttctaaaggtaatttcctgggataggaataggaatggaataggaatctccaagtcatagttgttacaaatgttttatggttatgaatttagacatttgagactttattttggaaaaaaaacatgaagaataacaaatttatatttccatcttcttttctcctgagtttctaactcatacctgtctgttcacattacgtcttaacttggttgcctactaaattctagttgcatagatgaaactcatttatgccaaggcaccatggcacacacctgtaattccagcactttgggaagctgaggcaggaggatggcttgagcctgggagttcaagatgatcctcggcaacatagcgagaccctgtctctacaaaaaaatgtttaaaaattagccaggcatggtggtgctcacctgtggtcccagctgtttgggagtctgaggtcgggggttcacttgagcccaggatgttgagatgcagtgagccctgatcacatcactgctttccagcctggggaacagagcaagaccctgtctcagtaaataaatatatgtattgcccttgcccatttagttctcaacccatcgttccttagcagcaaatggcaccaatactcacccagttacttacgccacccctccttccccagctactgtccccgaactccctttggactccagcctagaatgtagagtattgcacacgatggagcattttgctgttgtttttccaaaatatccatttcaatttctactaaagtgcagtctaaaaagtttcttaagtcctcaggaaatccatatttacttgtagtagaaggtaattagagggactttcatctataaaggtttcctgatattaaatatttaagataccctctttgattttacagtgtgagctcttaacatttcagtgagcctagttacgtcttccctagtagcacttaaagtggaaatcagattacttcaggggctttctggaaaaactgggtcacccaaaacaccacttagagaaagttctaaatctcctccacatttttaatgcttgattcttcacttattgtctcccattagaagttttgttgaccaccattcatctaagagaaaatccttattttctctttttcacctccgctccttttcagaatgaatcaacctattatacttacgtttttatacactgcagaaatgacccttgttaaagaatactcagtctgccttccagaggttaaagaatagagagcatcgggtaggggattttaaagggaaaagctctgggacgatgagaggctccatgctctgacacaaggctcccaagtccccttccttacttgattcattctgcttgggagttgtgcttttatcagctacgtaatattccatgtagtttacctgggtgggccgattttgtgtttagactgtgagcagggacctcacattgcaagaagtgaggtattttacaaagcttcttacatcaaaagacggcagtttttgctatgggccagcttatgctgagcactttgtatgtgttgtctcaatgaattttcatagctctgtaaagtaggtgctattattgtaggcttttacagataaagaaactaagacttggagtcaaggaacttgccaaagtctcagagctagtgtgctacaagtgcaggatttgaatacaggtcttataaccccagatctcgtggctttggcacgtgtcctctataaaaggatgcagtacttgagtgaccaggtagaaagacagaaaaggtgttattttatctcccagctcctcaaggcaccaaataaaggtaagcatgcgtatgtctgatgcaccctggctaccactggtcatcagcttctgtggtcagaagcagaaggagtggggggaaatcagtcatcaagcagaggtgactggatgcggttcatggttattaatattactgatcagttaataatgggtccagccaaggatggattaactggtgaagctagatgatctctctcctcccttgaacacattccagctcataacttttcattattcattacttcaatcctccttaacagaaatagtaaacatttctagaagcagttaacacctccaggtccttatttcatgccctggagcaatcacttattaaccacttcccatatttcacagtttctgaaaattagctccgccagaatagagatttaatgttttcttcaaggattaaagagctcattaggaagtgatttttttctcactttcccattgatttttccgtttctgctgagaccattttgttatgcaggctaagagtaaagacgaagaatcctctctttcattcttaggttgccgcaagacagaagccaggcttgggtgagagttcaacacacatgggagctgaggcgagctgcacccgggttactgaacagccctgcaggaaatgcagtgtgctaggaccaggagagccccagttcctctgccagttctctatgttgtttcttccttagggaaaaactgtagtgtcatcctgtggtgccatatattctaataacctcagtatttttatgatatttcagtgttcatcaagtacactctctttccctctcttggtatctttctcttcatctctccctctgtccatccctcccaaccctgttctatggagaactggcatattgaagttccctgtctcaaaggcagtgattggcacatgtcatctccaaagaaaagatcagtgaaaatcgtgcaagaaacttgctttctctcttcttgtttgctgaactccctaagatgtggaatctgttttgtctatagagcatcttgcaggtagactgttctccaaataacatttgagaaatgctggcttaaattattcttgggttttcattagtaagtagaagtaccataaagtatctaaaactccagtggtgattactggaatgggtgaagagtgaatagggcagggtggtgaagtaggaggaagacaatccttggcattagactctcctggctcctcacttcttagccgtgcatcctttggaggttacttcatttctctaaaggtggctttctcaactgcaaaatagcactgcttacgcctaccccgtgaggtgctgtagatcctcagcctgttgaagggttgatatgggcctggcacagagtgagccctgtggatgctctgtatccctgtctctcttcacctgcacatgtaggcttatccaaaatgaggactagaggtaataaaattgcaccatgttgggattcctgctcaatgagtaaattttagccgctcttgtcccaaaaacagcaaaatgggtaattatgtgagataatggatatgttaatttgctttttcatagtaactattttactatctatatgtatcccataacgtcatattgtgtaccttaatatacacaatacactttatttaaaaaaaaaaaaaaaaggaatgattctaaggcagcttgaatgtattcttttattcatgtgagggtcaacttcttgcaaagcactgaattttaagcactttgtgatttagttaaattctccttaacagaattaaagtgatttcagtgattcccaaaggcattctgtctagactgaagaaaggagaattcttcactggggaaggaagaaataattgtccttgtctttgtccttctaaggaagctatttgtggaaaagggaagttctccaactgagttgctctctgaagctatcccggtgaccagcaagcactcatcctgcttctagaagtcaacaaggatacactgaacctgcttctgatttctttagggtcgacaagtgcccccaatgatttatggtacaacttcattgaactgccctaccacggggaaagcatcagcatgctgattgcactgccgactgagagctccactccgctgtctgccatcatcccacacatcagcaccaagaccatagacagctggatgagcatcatggtgcccaagagggtgcaggtgatcctgcccaagtaagtggccccttcccctcaaagaaaacagtggcattattcaatcagcaggtgttatgtcggacaccagacaacatgaggcgaaaatatggcacatcatgaagcctgttctgttctgcagaaatttcatggtgggattacgaggccgtgcttttctaaacgcttttattcaatgcctgtgcttcctgtatggtaagatatggatcataagaaaggagagagggcaaccttggtctctaaacctccacatgagcataagcagttcatggtactgcaggggctttttgacatatctcattgtatttaaaagactgaaaacacacgtgtgtcatcatagtatggatgaaagtacagtgaggtttaatagaactccatgtgctttcataaggagcttcattttagttatttatttatttaactagaagttcatgaagaccaaggcagccagtttttctattataccctaagagtaagacaaagatggaatttgagctgttatgacttgaagccatgggaaaagtaaccccaaatcctgtatgaatcttcatgttctaacaggtcagagaatgctttgtccagaactgtgaagaagcaatgaatgttgttccctttctatgaacttttcaacattgctgccttcccaccatccagagcttttaacaacccaggtcttggtggtagtggagagttctaatagcttttgattctttggtcaccgagttaagtaatcagagtaagacattcacaataagtattactaattctctcaagattttttttttttgtaaaataagccttcaagtaggcaatgcttgatataaataaataaataagatggtggcatcgtaggcctcaatgggtgaagaacaggttctttaccattatagcccatctgtggtgagaatctgcccacgtctccttagtgctcttccacaggatgagatcaaatctgataaagcatcctctgatgacagtaactgacatttacacacacacacacacacacacacacacatatacacacatatatatacgtgtgtgtgtgtgtgtgtgtgtgcatatatctccatatatccccaaggccaagtaggtcacaaatattcaagaaacctatattatacccaaatataataccgtgtcacctatgcctaatctttgctcctgttttaatagtaaaatactttcagaatctcaaaaggggctgggcgtggtggctcacacctgtaatcccaacactttgggaggccgaggtgggcggatcacgaggtcaggagttccagactagcctggccaacatggaaaaaccccgtctctactaaaaatataaaaaattagccaggcatggtcgtgggtgcttgtaatcccaactacttgggaggctgaggcgggagaattgcttgaacccaggaggcagaggttgcagtgagccaagattgcaccattgtcctctggcctgggccacagagcaagactctgtctcaaaaaaaagaatcccaaaatgaactatcaggaatgtttctcctctcttttgaccatctccaatcccaataaggatggcaggtcttagagcagccaagatggatatggagaactttagttggatatggggaagaataatagatattccagagtactaggaacttgttaacactcaacctccacgtcagtataaaagaaagtatgtttgtagatcttcctaagtattggaacagggggcccattacacctgagggtgggagcgcctattcttgccgttagtacatatgactcattttgccagctaagtgtttgagagaggagttgtcctttacttatctggtatttaaatttggaattcaaatttaagatgcaattcagatcggtattcagatattaactttaaaagaatcagtttgtaaacatgcaccgactctatcatgtagcatttatagcctcgtgattttttttctccatttctgctttcatgctaggttcacagctgtagcacaaacagatttgaaggagccgctgaaagttcttggcattactgacatgtttgattcatcaaaggcaaattttgcaaaaataacaagtatgttcaatttaaaatgtatttgtatacttgaagaaagtgttacaaactgagactgatttgtgcagagaaaaaggatcagaattaggaatgtgttgccctgaaactgtacaaggtttcatttgatacattgccaaattatgctattggccttcgtttatttattgaccttcatttatttattttttccttttatctttttatttcaatagtttttgggatacaagtggtttttggttacatggatcagtttatatagcgatgaagtctgagattttagtacacccctcccccgagtagtatacgttgtactcaatatgtattaatagatttttagctcctcaccaacccaccctcctccttctgagtctccataatccattataccactccgtatgcctttgcatacccgtagcttatctcccacttacaagcgagaacatacagtatttggttttccattcttgagttacttcatttagaataatggcctccagctccattcaagttgctgcaaaagatattatttcattctttttatgactgagtagtattccatgatgtgtacatacctcattttctttatctagtcattgctcttgaccttcatttaaatcagcgtccccacattttgcacgtacatttcatgggaagccccagtgactacctaaaggagtatttcatgtattgcttttatgaatattggctctgacttaggtgttgtcgctctgttttcaaatgccaactttttccttttgcttgaaaaaaagtcaagactgcagtcattcactgtacccagatatgtattttggcatttcatgctcattaatatgaaacgatataaattcaaatgaatctgattaaaactttcctttgccaaagcaattaaggcatgcttttcatttgccagcagtatatgtacctttttctagagttatgtttgaatggtcagtcctttgttctttaaatttagaacatagcaatctttccaaggaaaagccatggcttgaacattatttgcactccagtttgcaaataactttgagtggtaagaaattagctcattaccagcttcagttgcatgctagtaaacacctagtacctgttctggggacaaacatgactcccctggtgaacctgcagctccatggatattctgatagccgttcatccctcatgactcaaactcaggcctccagcccagcagcattagcatcacccaggagcttgtttgaaatgcacaatcttgggtgtaacccagacccactgaaccagaatccattttaacacagtccctcagcccagcaaagactgagaagcaccattttcatctgcacttttcccttcaaggttgttcatggtagctgaaatactaaatggggggtgttcacaggaagaaccaggtgccccagattctcctggaaagtcctctttaacactgcatgtgacttgggccctataaatgtgcatctcagtcacaatttggtcatattagagctgggcattggtgcagatagttcacaagcagatgacacaaaaagcacattttccctttgcatccagacctatgtcccatccagactaatatcaacttaagtttttcattctctgtgaaagctacacccagtgggtgttgctggaatggtcagaatttgctgagaagtaaagtgagttcaccagaatgtccctgaggcacaactgcatttacacatcggcccttccaggaaaatctaaactcttctcttgttcgacactcttctcttactagcatgcccatgagatgagtggctgttgtgaagagccaggacttactctgccactaactagccgtatgattgcagggaacattacttaacgttctaggcctcagtttccccatctgtaaatgctgtctgaaatcccttctgcatctgcattctgtaactgaaaaataatcttgttgccttgctgcttccagaaaaccgggcttcctttttaaagctctgctcttttcatttttaaaaaacaattctagtgatcagaattgaattgatagaggcactaaatcatttgagggcctgggcccttctccagaagtgagtatcacagttcacttagcagggactgaaattcacaagtaacagctgtctgcagccttcaacaccaggactgtcagaggtcatgtcttctgacactttaaaaattggaatttgccatggctttgagctttgaggttacttccccaaccaaccaatggcctgcctatcaaacaaatgctgatactgttttattttctggaagcagggtcagaaaacctccatgtttctcatatcttgcaaaaagcaaaaattgaagtcagtgaagatggaaccaaagcttcagcagcaacaagtaagcactgggtcacgtggcagggcttcctctagcaggggagcaaacacattcctgtatactcattggttgagcaaatatgtaatgcaccctctttccagccaggcagtgtgtgtgggttaaccctcaggagacagcagtgagtacagacagactgaagacctgtaaccacaaagctcagaatctgtttcattaaagaaaagcatttcagtgagagaaattcctctaggacaggagtcagcaaacttctataaagagccaggtagtatgtatttcagatttgtgtgtcataccatctccattacagcttcttagctctttcactgtagcatgaaaacagcaatcaacaatacaagtaaacagatgtggctgtgttccaataaaactttatttataaaaacaggatttgtcctggtagacttgccttgaggaaaatagtttgctgacccctgctctcaggaggataaaacatgttctggcttcttactggcaaaaaagaccaatcttcagatttgaacataaaataaacaacaagtacttaaaggaaaataggcaatcaggtctatccaggataaaccgaagaattcgccagcatctgttgaattgcggcaggattgctgtacagccttccttgataattagaacatccacatctgcttcctcctcagtggtttacataatgaaggagaaaacagaacaatcgtaagtcagttttttcacccctcattatccgtaggaaaatagatgaatagatttggccaactctgtgagcccataaagtgaaaatcttagctacacttgcagctgggtcaaatatctctggtcattgaaacataccagttatactcacaatagatgtgttattgcctttctcgaataaacgttttaaaaattcctttaaagaagcatttaaaacaaagaccctgaaataagagggttggaaattttaagatgctttttgtcttttctaggtaattttaagtaacatctaaaagttattgaccagttttgctgagtgtaactatcaggaccagctacatagtttgtggggtcctgtgccaaatgaaaatatggagccccttgttcaaaatgtataagaatttcaagatagcaacagcagagtattaaacccagtgcagggccccatgtaaccgcccaggtcctcctgtcttagtccgcctgggctgccatgacaaaataccgttgactgagtggtttaaacaacagaactcacacttctggaggctgcgagttcaagatcaaggtgttggtgttggcaggtttgtttctcctgagatctctggatctccggaggtcgccccctccctgtgtcctcacatggtcttttctccatgtgacacatccctggtgtctctcccacttcaaataagggcaacggtcctattagaatagaaccctacttaaccttcattacctcctcaaaggcattatctccaaatacagttacgttaggggtttggggcttcagcatatgaatttggggggagacacatttcagtccataacacctgctatttaatatttgtttttaataaccctgggtaaaagggcttgccccagcataactgcagctgtttcctttataacatcaagcccaagtgttcaatacttcatggggtttgagcaagaggactgagctattgcaacaggcatgtggtagtaatgccacacacctaccctcccgtgaggccctggttcaggcttattaaatggaaacaagcctggcagacgaggaatggccaagacccatgaggctaaagaagtttgctttccaagtcagatgcctacacctggtgagtggaacagcagtataaggtagtaggtcccggatgagtggtctacattccagtgcagaggaaacctaaataatgtgccaaaggagaaggcacagacacaaaagctaagaattggactgggcctttatatacagaaaagatttagagaagctaaacaggaccaggggtcgggcgcggtggctcatgcctgtaatgcccgcactttgggaggctgaggcaggtggatcacttgaggtcaggagttcaaaaccagcgtgaccaacatagtgaaaccctgtctctaaaaatacaaaaattagccaggcgtggtggtgcatgcctgtaatcccagctactcaggaggctgaggcaggagaatcgcttgaacccgggaggcaaaggttgcagtgagccaagatcgcgccactgcactccagcctgggtgacagagtgagactccatccccaaaaaaaaggactgggggctttatcagcaaagcagatggtgtgaataaaaaatagctaataacaataaatatgcattagatgtgtttagtggcaaacactgttctaagagctataatatatcttatgtcatttaattatgtcatttaattctcatcaaaactctatgaggagtaagtatgtttatcagagatggtgcttgtgtagaagacatgagagagtaatgtaaagggcctggcccaaggtaggcttagtaaatggtgaccattgagcctgttgtaacatggccagcctatggaacaagcatgaagtgtgtcttcagacaccagcctctgagggtccatgaagctagctaacttgctggccttatgcttacatggtctcatgtaatgtgcacaacacattttccttttcttcccgtagctgcaattctcattgcaagatcatcgcctccctggtttatagtagacagaccttttctgtttttcatccgacataatcctacaggtaagtgactctcctcttccatcatgccctctctgttagaatttcaaaaggtatattgcactcttcattatatccaacagtggtgcccatagtccatttccctaatgtcaatagttgcagacactttgaataatataaccacccatgttaaagagataggaaaataaaggctgtgtttacagatgtgatggaatcttttacacactgacaggattttaggttttgcggattgttgtttttaacagagaggctcagcatccctttggaacacttttgacatctattgacttttccatatttatataaatgtggtggttcaattttgctagaagctatataacttcaacttttgtgtattagtctgttctcaccctgctatgaagaaataccctagagtgggtaatttacaaggaaaaagaggtttaattgactcacagtttcacatggctagggaagcctcaggaacctcacaattacggtggaaggcatcacttcacagggcagcaggggagagaatgagagccgagtgaagtgggaaaccccttataaaaccatcagatctcatgagaactcactcactatcacaagaacagtatgggggaaactgctcctatgattcagttttctccacctggtcctgcccttgatatatggggattattaacaattcgaggcaagatttgagtggagacacagagccaaaccataccactttgtaagcccactctattgttataccttgggaattgttaatacagtagatttttgctctgtgagtcatggttcaaacttggctctggccttaagcctcatctttaaaatgaggacaacagtagtgctgactgcttattacaattatgaagtataagttcatctttgtagagaggttggcttcttgttggtacaagagtaggcactaatatattttagcttttactattttatttaatcagtaatatgagatagttccttattctcttatctcattgcatctgtgatgttctaattggcatgccccagaactgagccagccaatgaggagcttctggccacatgtggctatttaacattaactttaaaaattcaatttctggttgggtgcggtggcttatgcctgtaatcccagcactttgggaggccaaggcgggtggatcacctgaggtcaggagttcgagaccagcctggccaacatggcaaaaccccatctctgttagaaatacaaaaaattggctggcagtggtggtgggtgcctgtaatcccagctacttgggaggctgaggcaggagaattgcttgaacccaggaggcggaaattgcagtgagccgagatggcgccattgtactccagcctgggtgacagtgcaagactctgtctcaagaaataaaaaataaaattaaaattcaacttctaagtcacactagccacattttaagcactctctggccacatgtgactagtggctaccatgctagacaacaaagatatagaccatctctaccactgcagaaagttatactggacactactgagcaagaggtcaaacatgattgtttcccttcccttaaatagaataccttccatcttattttaaggattattaatttacagagtcatgcattgttttcttttaattctgtaggtgctgtgttattcatggggcagataaacaaaccctgaagagtatacaaaagaaaccatgcaaagcaacgactactttgctacgaagaaagactcctttcctgcatctttcatagttctgttaaatatttttgtacatcgcttctttttcaaaactagttcttaggaacagactcgatgcaagtgtttctgttctgggaggtattggagggaaaaaacaagcaggatggctggaacactgtactgaggaatgaatagaaaggcttccagatgtctaaaagattctttaaactactgaactgttacctaggttaacaaccctgttgagtatttgctgtttgtccagttcaggaatttttgttttgttttgtctatatgtgcggcttttcagaagaaatttaatcagtgtgacagaaaaaaaaatgttttatggtagcttttactttttatgaaaaaaaaattatttgccttttaaattcttttcccccatccccctccaaagtcttgatagcaagcgttattttggtggtagaaacggtgaaatctctagcctctttgtgtttttgttgttgttgttgttgttgttttatataatgcatgtattcactaaaataaaatttaaaaaactcctgtcttgctagacaaggttgctgttgtgcagtgtgcctgtcactactggtctgtactccttggatttgcatttttgtattttgtacaaagtaaaaataaactgttatgagtagtaaaaataaagctatttctctgctatttgaaaatacaatagaagaaactga

SEQ ID NO: 243 - DNA, 6229 bp, Homo sapiens
actcgcctggagcgcgcgggcaaggcgggcggagcgcactggaactcaagggggcgcacagcggcgcgctcgcaccgctcggctccgcgcggctctaggaggtggcggcggtggcggtggcggcggtggcggcggcggcggcggcggggcgcagggctgagcgagcgtccgggttccggggctccggggaaggcggttgcagctcctgagtgcagcgcggcttcctgccactgtcccggcccggccacctctctgtcatggctctggcggacagcacacgtggattacccaacgggggcggcggcgggggcggcagtggctcctcgtcgtcctccgcggagccaccgctcttccccgacatcgtggagctgaacgtggggggccaggtgtacgtgacccggcgctgcacggtggtgtcggtgcccgactcgctgctctggcgcatgttcacgcagcagcagccgcaggagctggcccgggacagcaaaggccgcttctttctggaccgggacggcttcctcttccgctacatcctggattacctgcgggacttgcagctcgtgctgcccgactacttccccgagcgcagccggctgcagcgcgaggccgagtacttcgagctgccagagctcgtgcgccgcctcggggcgccccagcagcccggcccggggccgccgccctcgcggcgcggggtgcacaaggagggctcgctgggtgacgagctgctgccgcttggctactcggagcccgaacagcaggagggcgcctctgccggggcgccgtcgcccacgctggagctggctagccgcagtccgtccgggggcgcggcgggcccgctgctcacgccgtcccagtcgctggacggcagccggcgctcgggctacatcaccatcggctaccgcggctcctacaccatcgggcgggacgcgcaggcggacgccaagttccggcgagtggcgcgcatcaccgtttgcggaaagacgtcgctggccaaggaggtgtttggggacaccctgaacgaaagccgggaccccgaccgtcccccggagcgctacacctcgcgctattacctcaagttcaacttcctggagcaggccttcgacaagctgtccgagtcgggcttccacatggtggcgtgcagctccacgggcacctgcgcctttgccagcagcaccgaccagagcgaggacaagatctggaccagctacaccgagtacgtcttctgcagggagtgagctccccagaccccctcgccactccagcgcccagtccttctcctgcccgagagatgattacagagcctcttgtcccacctttgtcccctggctgctgccctcccattctccccctccagtagtagctgggtgagacctgtccgcccaccttccctccactacagaacctgcagccgcaaatcctctgggctgcttcgtcttctttggacctcctgaaccgagagaacccagaggaacccccaccccacccccacctaccactccatgctttctctactccctgcctcaaaccacccctcccccagatggtacttcagtttggatctattgggggagtgtggccacagaccgggggatgattgaattgttcagaacctgattggaccgtgtccaatgtgcggaagatttccttgaaatcttctcaagctcttatgactcactgggggtttaagagatcaggattggttccactgtctggggttagtgttttacaaggtcattacacagtctttttgacctcttttgaaggtagagttttagaaggctggatggaagattctgagcctggaattaggaccccatggaggcagttcagtaactaaactaataaagttttgaaaagttacacgtaaagtagaagaatctagtgcgtgggacagtaaaggatcctttctcgtacagaataaaaggtctcagcctgtagcttaaacttatagaaagtgatccgcctgcctgcagaggcgcccttttcagctgctgctcgccagaagcccttgattccactggttgacatggcagcagttactggcaagagggagaaaggacgctgccgcctaagagtgcaaggctgctcaggtctccaagcgccgtaggaggtcacctggcagtgactgtagggagctgggtcatagtgcacgtcgtgggtattaggaaagcctgtattctttcaatgaatgtcagtaggaccttcctttagctgtaagacttggtgggcggggtggggtggggagggaggaaagggtaggaagggtgggaagggagaagcagacatagtcatttatgatttgaaagttggaagtttgtaccatctgtttgagtatatgcacatttaaaaaatatcatatagtaaatgcaaacatgccaagtattttataaagattaataacagacctactcttacctggcagtttacttaacttactgttttgagtcctaaacttagagttgttaatgcttatatataatctaaccaaagagttacccagtagggttttagtttttgaacttttattttcttgttgattataaatcctgattttggaatctattgcgcaaaagaagtttcattttggttacttagacctaagatcacttattaaaaatccttattttctccaagcccagcaaacgttgacttctgggcaaacctgaaaacctgaaaatgccactttcatgcagtttgtttgaagttaagtggaatcctttcaaatgacgagctgcagagaactcagcaccaagggctgcctatctgtagatagctgtaaaatggaatatttttaaatgaaggcaaataagtacttaaaagtgagctgagcaataaaatggtccaataataggtaaatgcaacagaaacagaaggagacctggttgccttatgcctttactcttacatggaataaattcccaatgcatatcctatgtaaaccataagtgaagggaaataaacctcgtcatgctccatgctgtgaggtgtcctttggatattctgtgatgacagagaagcctattttgttttgttttcagcatctttctctgatgtacgtttttaaggattttgtaagagctgttttcagtgtttaaattagtgctatttttccttgtttttaaaaatgaatctcgtactgtatcttactatgtccatacagatgttacaaatcgacagttttattcttagactcatgtgatccaagctgtatataccatatataaacattttacatgaatcatttagttttttaattcatttactaatgctataaaatttcctatattaccccagtaatttgcatcagctggtttatatactaaagcaacatgttttgatgagtttcttacatccttatcgaggaattgggttaggaaaaaatacataattgtaaaactgagtttgctgtattatactttttttcttgagtattagttgtattactaatcatatgttgattaactgtctacttaaagtcaaggtacctgtatttttaatccactaatttttttttagttgggaaatagatttcaggtcttttattagactaacattttttgagaagtaaaattgacttcatatacaaagcctgtaattttaggcgaaatggaagcagaaatctaggaagttgtgcttgcttgtatgttgagtttggtctcagactaagtaatgcatcagaattcatctgtttgaagcctgaaataatttaggactctgattcactgaccaaaagtcagtgttgcagagatttctctaccccgtatggtattttgttagattgttcaacaggaagcacatgattgagaacatcttgggacagaccaaaaccactgacagatggcaaggctcggcgattctgatttcccttctcaaatctgctcaactccaagagtcttgagaaactgctaaaattttgcctctgtcactcaagtcttacaaatgttatcttgtaaacctttgaggtgaactattccactgtcttgtacataggcatcttattcactgcaccctgtcacacccagcaccccccgccccgcacattatttgaaagactgggaatttaatggttagggacagtaaatctacttctttttccagggacgactgtcccctctaaagttaaagtcaatacaagaaaactgtctatttttagcctaaagtaaaggctgtgaagaaaattcattttacattgggtagacagtaaaaaacaagtaaaataacttgacatgagcacctttagatcccttcccctccatgggctttgggccacagaatgaacctttgaggcctgtaaagtggattgtaatttcctataagctgtaatagtggaggtattgtgggttcatttgagtaagccctccaaagataccattcaaataacctgggagaatgtcataaattattcagataattaacactgcatgaatctgattcagaggcatgcatttacatatgttgccctaattaccatttgatgatcataaatacaagtgaatgacattggacttttagtaacaaacttaatttttaaaaaggtgtagacaatggtggttaaaaaaaaaaaaaaaacaggtaccaggttctgtgtgtttgcaccaagtaattgacatgttttttaatacatgtggaccatgaacagtattcattctactttttcaaatgatatgctgtagaaaatattccttgaagatgtgagatttaaaaatttttccctttcaatgttgttatgtattctactggtttttgattgatagcacagtgataaatcataatactagacaaaattgtcttctctttcaaaccagagccatatatatgtctgtatatatgggacctactgcttctctgaggaaatgcataatctgttaatatcagacaaaatgagcaattggcagtgctcataatatattccaatttttattggaattttcgatggaatgttatttcaataaagccatgtaaggtgaaactttgataactttttactcttcaagttagggtaaattctgatccaatattcaattcatttgtgtactcccacatgcaaaatgctaaattacaatgcagacattaagaaaaagtattgactggaggggttgaattccttgagaatttattttatagtctaaatcacaaatactttactcaatttagtttttaaaatagtaaactgaatatttttgttgtaagcctatcagagtcaatccttcgtttggaattgttttcctgtttttccttactataaatcatttaaaaactgaattcattttcttagatggcataagtctgtctcttgagaaataagtaaaatactcctattttcagtatctgtagcacctgaaataggtctttgtatagccagaaacaagttatgttgaagttagcttttctttgtcaacagttttggacaataaaaatctgaaagtattaacacttgattttctactggggcccttcaaacttggttggaagaaattcaaccagaatatctacattagagtataatcatgtgtggtaggaagatggactagttaatcaagatttgttgtcacttaaattttttgtgatttttttccaagccagtttttttaaattctaaatgtgttttgaggtatgggtacattaattgtaatgtaaactattatacaactgtttttgcgactttataggcaggtaaattttgctattactattgaatacaaatgacaattcatttatgaccactcaaacagcgttagtaaccatttagtgacaaaggattaaaacatccatctggatgttaattttgaagatgtaaattatatgttgtttaaatttttccaggcatctgaaaaccttatctgctagacaatgtaagattcacacagagttatctgggattctgattttttaaatagtacatatcattaaaccattttctctaaatgtaagaagagcagaaaaaatcttataagattatcagatttttctaatgacacagaaatgtaagaaaaaaatccctttatattgaaaaaagatgcagtcaaagtcttttcagacatgcccaaactttgagaatttcttcaaccatctaatgctataaagatttttgttcttcctgttcacaaccagttgtataacagaaatactagctactgttttccttcctgtgtgtgaagtaatgaatcattgattatgtgacttgttatgtattcaattaaacactaaagaataaaacattcactccttt

SEQ ID NO: 244 - DNA, 1157 bp, Homo sapiens
gagaaaccagagactgtagcaactctggcagggagaagctgtctctgatggcctgaagctgtgggcagctggccaagcctaaccgctataaaaaggagctgcctctcagccctgcatgtctcttgtcagctgtctttcagaagacctggtaagtgggactgtctgggttggccccgcactttgggcttctcttggggagggtcagggaagtggagcagccttcctgagagaggagagagaaagctcagggaggtctggagcaaagatactcctggaggtggggagtgaggcagggataaggaaggagagtatcctccagcaccttccagtgggtaagggcacattgtctcctaggctggacttttcttgagcagagggtggggtggtaaggaaagtctacgggccccgtgtgtgtgcacatgtctctgtgtgaatggacccttccccttcccacacgtgtatccctatcatcccacccttcccaccagagccatagccatctgctggtttggttatttggagagtgcaggccaggacaaggccatcgcttggggcatgaatcctctgcgtactgccctggccagatgcaaattccctgccatgggattccccagaaggttctgtttttcaggtggggcaagtccgtgggcatcatgttgaccgagctggagaaagccttgaactctatcatcgacgtctaccacaagtactccctgataaaggggaatttccatgccgtctacagggatgacctgaagaaattgctagagaccgagtgtcctcagtatatcagggtgaggaggggctgggtgtggcgggggctctctgcctggtcctggggctgccctgggccagcggtcctccctgccacccttcatagatggctatgcctcggctctctctgagatctttaaactctggcttcttcctcctcaatcttgacagaaaaagggtgcagacgtctggttcaaagagttggatatcaacactgatggtgcagttaacttccaggagttcctcattctggtgataaagatgggcgtggcagcccacaaaaaaagccatgaagaaagccacaaagagtagctgagttactgggcccagaggctgggcccctggacatgtacctgcagaataataaagtcatcaatacctca

SEQ ID NO: 245 - DNA, 6461 bp, Homo sapiens
gggagacgccggccccttggcccagctgaaaacggaattctttgccggctggctccccactctgccagagcgaggcggggcagtgaggactccgcgacgcgtccgcaccctgcggccagagcggctttgagctcggctgcgtccgcgctaggcgctttttcccagaagcaatccaggcgcgcccgctggttcttgagcgccaggaaaagcccggagctaacgaccggccgctcggccactgcacggggccccaagccgcagaaggacgacgggagggtaatgaagctgagcccaggtctcctaggaaggagagagtgcgccggagcagcgtgggaaagaagggaagagtgtcgttaagtttacggccaacggtggattatccgggccgctgcgcgtctgggggctgcggaatgcgcgaggagaacaagggcatgcccagtgggggcggcagcgatgagggtctggccagcgccgcggcgcggggactagtggagaaggtgcgacagctcctggaagccggcgcggatcccaacggagtcaaccgtttcgggaggcgcgcgatccaggtagctggggccccagggcctcgccggcagggggcgcgcgaacgcggggcgcggcctcggcggatcggggctggaacctagatcgccgatgtagatttgtacaggagtctccgttggccggaggtgtgcattccacgcgtaaaacaggcttttacccagcaaaaatcctaaagagagacattgaaaaacccactgtttaagctttttttagtggtttttgttctgccatctcatgatcagagatgcaaggaatagactgaattggggagaaaaggagaaaaggaaagcttatttagggaagaagattatcttgtctgtctgctttcaacgataaagataagtaaagtataagttacgcattctagattggatttaaggaattctacaaaatcatagtacatggaaaaaatcaatgtaaacttctaagctactatatgaaatctgttgtattgttttctcatagaggttaattgagaatgagacgggattcctcaaccacagtacttagttccttttatgttagcagtgtcttatgagtgatgcataagagaaaaaatatatagttctataggtttctcattctttaattatcatactcagtgcccagattacaaaaatattcctgcagcaactgttaggtcctttttgaatggcaaaggatcttcataaataatgcatctttatcttcattgttaaaatacacttattcaatgtttaagtacgaatcctgctttaattagtactgatattttttatttcttttacaatctcggacaactcttttgtactttaccgttggctagtggtcatattcagtactcacctcactatcaccctctaaaactaagctaatattaagggatcttgttaatagtatagattttaaagaagtgttcatttcttttgaattcttagaataatggtataacaaatgagggatttttaaaggagcaaaaatattgtaaagtgcatcttaaaaacttaaaattttattaataattataaaaacaagttatatatgtaattcaccattttctgaaatactaacagcagctattttcccctttttttctatgtaaaatatccttacatcactagtagatataacttatcacggtttttaagagatgaaatgaacatttctaatattaatgaaacaagccaacaaaacatgagaagtatactgcctttcaattaaatggtatattttaaagtgcataaacccataacaaataactcgattttagacatttagttaccaaaaattgtcttataattgactttaaatatgacagcaaatgttttcataatgttcatgtacacaaatggctgctacaggattactcctgcaaaacatcattttttctaagttatgcatcatcctgattgactgctaacatccaagctctatttatttatttatttattttattttttttgagatgaggcctcactctgtcggacaggctggagtgcagtggcacaatctcagctcactgcaacctcttccaggatgcaagcgattctcctgcctcagcctcctgagttgctgggactacaggcacgccccaccatgcccagctaattttttattttttgtagtagagacgggatttcaccatgttggccaggctggtctcgaactcctgacctcaggtgatctgcctgctatggcctcccaaagtgctgggattacaggcataagccactgggcctggcccaagctctttttatatagcaaaatatttactgtttaacatttttaaatcttagctattataaaatcctgtagtatacaaatatagttagttttatattacattaaaaatattatagtctaaatttaaaatgatgaactgttaaggaaaaatcatttattataattttataagattttgcatgatttaatttacttttcccttctaatctccaactttggctcaaattatcacactacaagccagttatgagctcagacacatgacaaacaaaagccttccgcacgggatttgctatgagaactaaataaattaaaaaaaaaagaaagaaaaaaacttagttgtttattttctcccctaaaccattactcccaacttctaacaaacagtagttgactacctaataaatatttgtagacctggattatggaggaggggtcagcaaggcaaataatttaaaactttaaaagccgaataaatttaactctgcccctaaatcatttaacaaaatagattcccatgttccaatggaaatcaagatttgtttttccataatgatgatcatcactttaccatcaactttcttgtctctgcacgtttagagaataaaatggcatttaatttgtactgagtataacctgaaggtggggtgggaaagtggattgcatcagcaaatgaagaaacaccagacatcagagacctgaacacctctgcactgggtgaaaactttgcaattaggtgtttctttaaatggctccacctgccttgccccggccggcatctcccatacctgcccccaccctggctctgaccactctgctctctctggcaggtcatgatgatgggcagcgcccgcgtggcggagctgctgctgctccacggcgcggagcccaactgcgcagaccctgccactctcacccgaccggtgcatgatgctgcccgggagggcttcctggacacgctggtggtgctgcaccgggccggggcgcggctggacgtgcgcgatgcctggggtcgtctgcccgtggacttggccgaggagcggggccaccgcgacgttgcagggtacctgcgcacagccacgggggactgacgccaggttccccagccgcccacaacgactttattttcttacccaatttcccacccccacccacctaattcgatgaaggctgccaacggggagcggcggaaagcctgtaagcctgcaagcctgtctgagactcacaggaaggaggagccgaccgggaataaccttccatacatttttttctttgtcttatctggccctcgacactcaccatgaagcgaaacacagagaagcggatttccagggatatttaggagtgtgtgacattccaggggtcgtttgcttttcagggttttctgagggaaagtgcatatgaaatccttgactggacctggtggctacgaatcttccgatggatgaatctcccactccagcgctgagtgggagaaggcagtgattagcacttgggtgacggcagtcgatgcgttcactccaatgtctgctgaggagttatggtgaacccacaacttaggccctagcggcagaaaggaaaacctgaagactgaggacaaagtggaggagggccgaggtgggcttcagtaagtccccggcggcgctttagtttgagcgcatggcaagtcacatgcgtaaacgacactctctggaagccctggagaccctcgcccaactccaccagatagcagaggggtaagagaggatgtgcaagcgacgacagatgctaaaatccctggatcacgacgctgcagagcacctttgcacaggatgctggcctttgctcttactacactgaggagagattcccgcgggttccgcaggcagactacacaggatgaggtggtggagtggagtgagagcaattgtaacggttaactgtaacgttttctttcacacacacacacacacacacacacacacatgctaggatgcggaaatccccttatgacttgctactttttgattttgtgatattttgtactttttagttgttcagcaactgtcttatttaatggggagattttaagtaacataactagtggctctcagttaaaatgtgaggaagaactacagctcttaaatgtagcaatggcactgttgcaaactcagtgcaaacgcctagattgctttcttcttaacctatttatttctttgttaaatttttctgattgtttcctttatagagtgtctcagggtgcagaggtcagactaagaaatattccaaatgtcttttagaagatagatgcacttatgcagtaaattatcttgggatagttcccaaaagattgctgaaaaagtagattgagtataaaaacttgaaaatatatgatggctcgtgggatgtcctactatcactgaacaaactaaaggtgcactgctttgggatttaatttccagggttgcttgatcattatatcattggaacaactgatacttcactactttaataaagaattaacagagattgaactccaagaggtgggtaatttggtttaaaaatacatgttcatgggtttaccactaactcctgagaaatgttaaaggttcacaggggttcccttctctcaatgtttgtaataattgctcataagcaataccagcaattcataaaaactgcttacttatgccatagaaaattaaacacaaagtgtatacatgtattatgcttctaaatgctcattctaccagatacacatttaaaagagaaaaaaggaacagaaacaagtcatttgagagtggagacttataagaaggagtacatttgagttgaatacacaaatctttacttctctaccaattcctattcccaaaatgaacatattactggggaaagttagttgagaatcagagcatatgttattggggaaaggatatgtttattgacacataatctgtaccaggtatgcattaaaatatatttgttaatttaatatttaaacctgagagataggtattgtttcccagatgaggacaatgaggcaaagaaatatcaagtaacttgccaaaggttacaagatattcattccatggatgcacaaagaagtgcatctagttccacagctgattatggttgtcttgcttttcttcccattgcaccagcttgtcctccaaaatcatgaatgatacacatgaagataactttttttaaaaaaaagcagaaatacacaatgatctcccttgtaagctcctaaggtggcttttctttctctaacttctagtaaatataaacggtttgtttgaaaactattttaaaatgtcaacaatatggagaataaccccccccaacacacctataaaaacccaaatttttggaacaaagataatggaacctccattttcaaactgaagcacagggacagaaaatatatttctagttatcacttaagcactcaatcattagaggctacaagaataatatttttaaagttacagtattttacaattattagaaaacattctatataaaagaagtcagttgatactttaaaatctcccatttggtttataaaatcccttaatttgacctctatatcttaaattccaagatgtttaaatttgctagttgcattatactgggtcatgaaaaattatcccttgaaatagatatgaaacatgttacttcatttctggtttaaataacttgtggaatctttcctaatgacaacctgatattaagggaaactaaagaaaatgttattgtggatcccacagtactatattacactgttttttttgtttgttttgttagttttttttatttaaagcaaacctcaaacattattgggtatcaattaccacctggttgtattgaaatagtaacttatcaatgccatgtaaaaattaattccattttcgaagccacctggcagacaggtttagctgtttcatcagcagcctaatatatactgttaaatttgttaaggatttcactttgaaggatacatgcaaaacatatagttactattttcatgagtcctgcttctagctccattgtggaatacagaaaattaaatatacctgttaagttcgtatctaaacctaagacattaccaaggtttgtacaaattctactacctgacatttattccaagaagatctggaaagttaaataaatttataaatttaataaca

SEQ ID NO: 246 - DNA, 8768 bp, Homo sapiens
aggctgacagaccagcccagatccagtggcccggaggggcctgagctaaatccgcaggacctgggtaacacgaggaaggtaaagagttcctgtcctcacccctccccacccccaccttttctgtgatcttttcagcctttcactggtgacttgttcttccagggcccatttctctaccctacctgggtttcttctaacctggaaatctaatgatcaaatcacactaaaaagtcagctcctgtggattacatatcccaggagcatatagattttgaattttgaattttgaaagaaattctgcgtggagataatattgaggcagagacactgctagtggtcaaagatttgaaaggacaactttctgtgtgcaggcagggcctcggctggagatagatgggtctggacgaggcaggagagtgagaagttctgaggtgaaatgcaggaagccctcagagaatgctcctcccaccttgaatctcatccccagggtcttgctgtcccattcttggtgctgggtggatctaaatccaggagatgggggcaagcatcctgggaaagctgagggcacactctggcagattctgtgtgtgtcctcagatgctcagccgcagacctttgggagagtaaagggggcacacccacccaccttgcctccaggctctttccttcctattcctgttctatggtggggctccattgcgagacttcagattgagaaatcagatgaagtttcaagaaaaggaaactggcaggtgacagagatgggtggagggactggggaaaggctgtttactccctcctgtctagtcggcttggtccctttagggctccggatatctttggtgacttgtccactccagtgtggcatcatgtggcagctgctcctcccaactgctctgctacttctaggtaagtcaggatctccctggttgagggagaagtttgagatgccttgggttcatcagacaccccttttcaggctacgaatgagactcccacaaagggatgggacccctcaccacatctatagctgtggattgagctaccaggacaagccaagatggggctagaaatgaggagaatgctggttccaattgggtcatagtcatgagtgaggccagtcacttcacccctctgggtcccagaatcactatgtggaaccaaagagcttcgactagatggtccctagggtctgtctctttcagtttgacattccagggttctcctctatggtttttaatttctaccctttcttgtggggatatgggttgaggctctttctgtagcttggttcagggaaattcaacctgtacccttaatttgtgagtttgcacagggagcaaggggtaagggagcagtgttgaaaatagggatttgtgttgacagtggcgcaagaggcatgaacagtggagaccagagagcaggtagcaaggtttccaccagaaacatcctgattcttgggaaaattgggctcctggggcagaggagggcaggggagttttaaactcactctatgttctaatcactctgatctctgcccctactcaatatttgatttactcttttttcttgcagtttcagctggcatgcggactggtgagtcagcttcatggtcttggattgacccagtggggcacatatggggacaatggccataagatattgggaaatgcttgttgaatgggaaaatgctgatgtggggttagcagggatagttcctccaacacagcagaacttggccctgtgcttctctggccagctttccttaagatactgaacaggccaaaaatggggccaagatgctctaagactgagccaccaagcatgggtttgcaatgagctcattctggctttgaggctccctgggaatggcagtgtagagcctgctcctctccctgtcctcaccccacattatcttggctcctcagaagatctcccaaaggctgtggtgttcctggagcctcaatggtacagcgtgcttgagaaggacagtgtgactctgaagtgccagggagcctactcccctgaggacaattccacacagtggtttcacaatgagaacctcatctcaagccaggcctcgagctacttcattgacgctgccacagtcaacgacagtggagagtacaggtgccagacaaacctctccaccctcagtgacccggtgcagctagaagtccatatcggtgagttgatgaaggggaagaggaaaatcaccaataaagggtgaaacaaagggtcctgaaatacttggtaagagccagagatgatattcttagagataaaagctaagatgagatgatgtgtggtcccactgaatggtatcagagttgtagtcctagctctaagtaggtcttgggcaaaatgtcaaagcctgtcagacagtagatataggctgctgcattgcacaattccaagaatccccatatggagtgcatacaatgtgaatgtgtcatgtgaaggttaggccatggcatagatgctcaataatagttatttatttatttattttcattttttttaattttattttttgagacagagtatcactctctcacccaggctggagtgcaatgcggcaatctgagctcactgcaacttctgcccccttgggttgtagtgattctccagcctcagcctcccgagtagctgagattacaggcacccgccaccacgcccagctaatttttgtatttttagtagagacagggtttcaccatgttggtcagtctggtctcaaactcctgacctcaggtgattcaccggtcttggctttccaaagtgctgggactacaggcgtgagccaccacacctggccaataatttttattgaataaattaatgaatttggtgttaggacctcaatctccttctcgctctcagacatgtaatgccctaagccacctcccaaagcaatcctagtggcctagaatcatatctttctgtctcctcatcaatgctatactcaaacctataattaagcataaatttggtaatgtgatagctcttccaatagaggcagatacatgttcagcctgcacattaatcatgacatgaaagtccttgtgtactattaacagaatatagacatcagacacaggtaggagaaatattttgaaggcaggggtctttcctggtgtccctacaatcttaccacatagcctggtccctgcagtgtcgccctgcaaacctaattctacttccacggctgttccattcatacaatgtttatgggtggaacaagctttgggggaagaagggcataaggaggtggatctgcaagagagctccatggaattgggcctctgaaactgatttttgtggctctttggcctctgacattaccactcaactgacatggtcttcactctccagagctacaagaaggtatgtccatttctagctaggtaagagatgtccacctacaaccaaataaaatgggggaattaccaagagaaagcaatagaaaaatcaagtctaggagttactagtttgccttgaacttggctctagaaactggctttagaagtctagccaatcaaggctatattaaactgtgaccatgagaattagcttcaccaggtaaacttctgagcatcctttattcctttaggacccatttcacttatgtcctcctctgagaagcactttttacttctttgtttgtttgtttgtttttgtttttgtttttgagacagagtttctctctgtcacccaagctggagtgcagtggcgcaatcttggttcactgcaacctccacctccctggttccagcgattctcctgcttcagcctcccaactagctgggactacaggtgcatgccaccacgcccggctaattttttgtatttttagtagagacagggtttcacggcattagccaggatggtcttgatctcctgacctcgtgatctgcctacttcagcctcccaaagtactaggattacagatgtgagccaccgcgcccagcctgcattttttacttctttcaggcagaatttctttattccaatctagtcggccccgcagtcctttattcttagcctgttgtagcactcgtcatattgtattgtgattatttctgaatatttatgtttctatgtctaggctgtagattctttgaggctgagaactatatgtcccatcatctgggtatctccagtccacagtgtgtcatacatagtgagtgcttgatgaaatatcacttgaaggaatatacacatgggcattcactgagtccatgacaggacagattcgaacaagaatgttcctccaaaggccaccagactatatactaaccatgactttatgctaataatgattcatctctttgctgaaaaagtaagtggatagataggcacatggcttcttttgataaatgatatctcttaataggtaatgaagattactttctgtttggcaaatctttgtgttagagaatcatgaccaacacacgtcctaccaattttgtttagcatcaggtagtagatttttaaaattatagtaattcaacctgagaatgtagatttaaaaaataaaattacagtaaatttagttttgctcttattacgtttcgggtcaatttcaaaaatatataaaagtaaacaggagaaatttaaaatgtcctttggtcccactccttcagagaaaacccctgttaatatgtaagtgcatatccttcttttttctgtgcataatactttttaaaatatttgaagtattatgcttttttaacttaacattgtctcatgaatattttcttatgccattataatacttacctataacatcattatttttttaattattcaggccatttcccgaccatgacctcatgttctctctttgtgaagtctgattacttggtgacatgattgtgagaataagctctggcgatataagaatttcctctcttgaaggccatgctcagtaataaagttggtctcaccgaggccctgtgacaccttagaaaccacgaattgccactctgagcactaccagtcccgcccttcgccaccctgatgtttacattgagttagttctccttcacaatttctgcagccactctgtggcgaccgtcagcttattcctgaaggccacaagagtctttcaatattcctttgattgcctattccttctgaaatctaccttttcctctaatagagcaactcatcattttcaaatgcaatttttactctgatctagaacttactgtgaatccttgtcacctgccacagcaaatctaagtctagcacttaaggatcctgcagatatgctcatcgttgcttctcacttacctcattgcttagtccctctgctctaaccctgtgtgttgatcacatgtgtgtgtgtccctcttccccattagacaaaggtcttggtatgacttcagttctcttgcagggccccatcagctcttccccaaagggagctatgcagggttgactcccaatctggctttcccttatgcctcaggatctgggtggtacgtggccccttcacaaagctctgcactgagagctgaggcctcccgggcctggggtgtctctgtgtctttcaggctggctgttgctccaggcccctcggtgggtgttcaaggaggaagaccctattcacctgaggtgtcacagctggaagaacactgctctgcataaggtcacatatttacagaatggcaaagacaggaagtattttcatcataattctgacttccacattccaaaagccacactcaaagatagcggctcctacttctgcagggggcttgttgggagtaaaaatgtgtcttcagagactgtgaacatcaccatcactcaaggtgagacatgtgccaccctggaatgcccagggacgcctgtgtgtggaacctgcactcacactgggaagttgagttgggaggagattcctgattcttacacgcacttcttcatatgtggttccctcctggtgatcaccaggaggtccccaaaagtccctgattgcagggtaggtttgcagctctgtttcagtccattcttttggggtagctaggaggtgtcattcactctgcagcatgatggcaggagcagaagccacatctcctccccaataaatacctctgtctttccttaccctaatcacacccacggtgtcatatgttcctatcgtgctggcctccttcttatccaagccttttagccacgatccaaactggcaggagcccctcatcccctcacagaaagagcccagaacctgggttctggccctgcagctaattaaccatctgaccagaggtgagccacttagtctctctgaaccccaatttcttcttccgtaacaaaaataagctgacatttattgggcacctttcagtgtgctagactctgtgctaaacaattctttacatgcacctggtttgactaccacagtagaccttcacaacatgagataggtaatattccattttacagatgaagtaaccgaggtgcaaaaataaataaataagttgcccctaaggtcacatcaaagacttcaaagcctgtatatttaaccagtaagtaaaagatttgaagaagcactaatatcctatgatcccattaagtcatccacaaaacatctctaggttccatagcaccagcctccagaatcagagctctagagtggtgtgcctggactttccagtttcacagaacttctatctgtaactagcccaagacataaattgtaaacaatttgcatgtagaaaggcagcaaaacaccttttgagattttgacaccacaatgccataatttgtacaaaaataatttcatgacactttaaactgaaagtaaatactcccaagtggttagggaaagagagcaaataaagcaaatggggtaacatgtaaacaatgagtggatctgggtaaaggatatacgagatttctttatactattctggtcattttttttaagtttggaaatatatcaaaatcaagagtttaaaaaattgaaatgcaaaatcaacaaatttatcccagtttctagaccatagcattgtctgacaatttcttaactgtcacacaaaacccagcttacaacctaacttgttaacgctccctgtcacatctctgtcaaacaagcaggagcctttgctaagtgtttggtgagctgtcctctgctcagatagcactaagatcaggaaccaatgggaggaagcaatactttcccccagacctccccaccattcctaccacttgcctgttggcacttgtcaaagactctctactggtgacctcactgtttgttccaaatatctgccttagtgactgtcattttttttcatctctccacttctcctaataggtttggcagtgtcaaccatctcatcattctctccacctgggtaccaagtctctttctgcttggtgatggtactcctttttgcagtggacacaggactatatttctctgtgaagacaaacatttgaagctcaacaagagactggaaggaccataaacttaaatggagaaaggaccctcaagacacatgacccccatcccatgggggtaataagagcagtggcagcagcatctctgaacatttctctggatttgcaaccccatcatcctcaggcctctctacaagcagcaggaaacatagaactcagagccagatcctttatccaactctcgatttttccttggtctccagtggaagggaaaagcccatgatcttcaagcagggaagccccagtgagtagctgcattcctagaaattgaagtttcagagctacacaaacactttttctgtcccaaccattccctcacagcaaagcaacaatacaggctagggatggtaatcctttaaacatacaaaaattgctcgtattataaattacccagtttagagggaaaaaaagaaaataattattcctaaacaaatggataagtagaattaatggttgaggcaggaccctacagagtgtgggaactgctggggatctagagaattcagtgggaccaatgaaagcatggctgagaaatagcagggtagtccaggatagtctaagggaggtgttcccatctgagcccagagataagggtgtcttcctagaacattagccgtagtggaattaacaggaaatcatgagggtgacgtagaattgagtcttccaggggactctatcagaactggaccatttccaagtatataacgatgagtcctctaatgctaggagtagaaaatggtcctaggaaggggactgaggattggggtgggggtggggtggaaaagaaagtacagaacaaaccctgtgtcactgtctcaagttaagctaagtgaacagaactatctcagcatcagaatgagaaagcctgagaagaaagaaccaaccagaagcacacaggaaggaaagcgcaggaggtgaaaatgctttcttggccggggtagtaagaattagaggttaatgcagggactgtaaaaccaccttttctgcttcaatgtctagttcctgtatagctttgttcattgcatttattaaacaaatgttgtataaccaatactaaatgtactactgagcttcactgagttacgctgtgaaactttcaaatccttcttcatgtcagttccaatgaggtggggatggagaagacaattgttgcttatgaaagaaagctttagctgtctctgttttgtaagctttcagtgcaacatttcttggttccaataaagcattttacaagatcttgcatgctactcttagatagaagatggcaaaaccatggtaataaaatatgaatgataaaa

SEQ ID NO: 247 - DNA, 13059 bp, Homo sapiens
attccgaagggttctgtgctaggaaccttacacgtgttgtctcacataatccttaaaactcagaaatgattttaaattaaatagcacagagaggaaaactgactggagagggagcctttgcttaggtaggcaactttaactggtttattagcacattcccctgaagggaaagggggtgtgattgctcctgaagagaccaaagagactgggctcctttttaatcaaagctcaggaggagagctgcattccactgtttcacagatgctgtgagggtgacaaagatgcagggcacccactggaaacacagacggcactctgcgaaagaggaaggggcgccaggagcttgggtgagcaaggttggaggtgattctgcccctctccccaggctttctgtgtgagtccattcctcctctcagatttattgttagaacttaagacaagccaattacatttcataatgtctgtgtcattcagacgctgagaactaatccagccttctaaatggtgcttcttaactcctttcttcaacaggagagttaatgtgtggaattaagtgcagaatccatggccctctgtggtgacggtgatggttcaggttgtgtttctgggttcattctggaagctcccccaaggaaaggaggaaggaagcttgcagggtggggctttgccattgccctgactggctctggtttccttgcctgatacattgaagtcagcttccaaagaatgccacccaaggttttgaaggggcacagtgcctctgtcctcacaaaaccagcctgcatatgagtttactgaattcatttaggtcctgctgaatctttcccatttgttccttctctgtttcaatatttcaatgcttccctggaggggcccaacctttctggagggcaaagatctgttgttagagaaaaagagcagccagaggaggaagatgacttgagggtaggcagcagttgggcaatcagtattgaaaggttgctttcagcctgccaagacttggggaattagaaaagcaagataaaacaaaacaaacaaacaaactatatatataaaaaacaattttttaaaagtttttttatgttctatattactattagctatatattaatgaatgttcctttaaagcagtgtagtcattattgctattattattattatggttagttatagacagtggaatattgttctttctctatattatgattactagcactattactgttattagttacatgttattgaaagcttcaaagcagcataggctttttataaatatttttgctcatctttatgacaattctccagtgttggtattgctcctctatttaacagattagaaaactgaagcttcaagaacagacttgcctaacaacaggaaacttgtatgtctcgaagtggcaattcacacataaggctccatgactcctgaactctcacaaatattagttggctcttttcatggttttactgaagttgctagaagtttacagaaaaggaagtgcaggaacatttcacaaatctacaatctgtgagtatcacatcctgtatagctgtaaacactggaataaggaagggctgatgactttcagaagatgaaggtaagtagaaaccgttgatgggactgagaaaccagagttaaaacctctttggagcttctgaggactcagctggaaccaacgggcacaggtaggtaatgctggaagacttttctcatctcactattcccttgccgtgacctcattagaggagtaatttaacttgaaactccttgacagcagttaagagacactagggccttttggaaatagagtgggcaaatggaaggagtatctgtttttaactctgtgtccgctgtattctaattgcataaactcagtgagtcacttacctaaggttgtgtaattaatgggagcagagctcttgtctcttcaaatgtgtttagaccatttgtaaactgggcggtctgtgctttgagaatggtgccgtgaaaagggatccaagctgagcttagcaacaaataccacaacctacttggtctttatgctaaaaagtggggaggaccaacgacgcgagcctatgtgttatgagtccaagacttgttctcataccactgcatgcagctgtttctccagcctgagtaaactcagacacaggctggcaatgccaggtgggaaattaggaagaggtagaatgatctagagatttatgcaaaggcttcagactccaggaaagctgagatccaagactggttttacagcttcccggctgtgtgaaccagggtgaacaataagggtaactgcaaatatttcttcagcattaactctgggccacacatatatgcaataggtatattatttgcattcataacttaaactttattttgcattttcttatttattacatgtttttactaacttactaacatgcagagctgttgtaaggattaaaagcactgcagggtaaaaattaagaatgtgtctggtaaaatatgataaacatatctgagtgctaataaatagtattattaaacaagaaataagtaagcagagttcatttattagtctgaaaattcatcaaatatatggcaatacagttgttgtcagtaggactagaggaaagggaggttgttgcatattgcaaattttgtgtgaccatttgcctctggacattgagacctctcaagattcatgttgctgccaccctgtgatgtgtttattatctataatggactgtgtcaaacattatggaaaaatcctcatgaaaccaagattgtgtggttttcactgttccatactatcagtttctttctctaatggacaggccaagcctagactaattggcaaagactgagttactgtttttggagtcagaacctgggagctctgtactttttaagagctaaatctattttttcttacatagttggcaacaccatcatgacatcacaacctgttcccaatgagaccatcatagtgctcccatcaaatgtcatcaacttctcccaagcagagaaacccgaacccaccaaccaggggcaggatagcctgaagaaacatctacacgcagaaatcaaagttattggggtaaatctaattcagaacgtgttggagaggggttgggggaagtgccaagagatgatatatgtcttgggactggacatctgtcgtgagtgtggagaccctaaaattttgctagagggactttagggtagaagccacttggagaaaactgtcccagaacttttccacaagaggttgtcttaaaaatatattttcccttattctgaatatgaggaattgattttctattgttgtctttgtatttttacaatacagtgcttttctatattttcttttacaaaagtaatggtggtaaataatgacatattgtgtgtatgtgtatatattccacaactgcatgcttaataatccaaactgactttttgcaaataatttttccctcactgcaaattagaggaaatatacaactccttttcctcttttctcctaacgtttttgagaatggaaatgatattcaccttttgtttgtctgtttctcctctcacccagaatttattaaagaagctgtattgcatgaagggaggagagaaagaagggatctatcttggattgggagggaaacacagagttttggtttctagaattgcctctgcacttatgtgatctgaggtgaggcactctgtttgactggatttcaggacctggtgggactggtttccttgcctcatgtacaatcacatgggtttctatgaggctcatgtgacataaggtctagaaaactttttggtaaatgataatagagctgtgaatctctgaggtggatgtcaggaaggaaaactacctcctaagacagagcttcagttatacatgagaacatgcagtatttggtttctgtccctgtgttagtctgctaagggggatggcctctaaatgatgagaacacatggacacgtagaacagaacaatgcacactgaggcctttcagagggtggagggtgggaggagagagaggatcaggaaaaataactaatggatactaggcttaatacctgggtgatgaaataatctgtacagcaaacccccatgacacaagtttatctatgtaacagacatgcagttgtacccttgaacttaaaataaaagctaaaaataaaagagcttccagagcttcagctatagggttgtgaactgcagtttccgaggaagtgaccaaaggggcaaactccatgtccagtggagtctgggagatgaggggagggccttctgcactgccaatactgcagagaatgtgggggctttcagatgtcccctgttttcagagagatagaaagagagttaactagtcatggacttagaggtcctgagagctgggaaagtaaatctcagcacttgctgtgagctggaagcaagtctcatgagcagaccagggcctgagaggcagaaatgcagaagccttcctgagcacctgccagacacctgagactgtggcttctgtggcagagctgcacaccctccaggatgtcttttcatatttctcactccagagtttccacagggtttgtatcctcattaggatcttgcagaaggcgataatgcattagtgccatgggagcggcaaaaaggccctgtctttacaaatgctggttttcatcctcaatctcactttctcttcccacagactatccagatcttgtgtggcatgatggtattgagcttggggatcattttggcatctgcttccttctctccaaattttacccaagtgacttctacactgttgaactctgcttacccattcataggacccttttttgtgagtagagtttctgaggagggcaggatggggcaaagaggggaggaagatgccaatagcttagacttcccacctgccagcttgctatgtttgatctgccaggagcaaggagtcaacggtgaatcttgttctcctgtcgggtaggatgacaggggttgcttgattttagatcaatttcttatcagactcaaataaacatttcttttgaagatcatcttattcttcacattatcatcttgagctatgatgaagctagtgacttctctccaggtttaggcgaaaaaaaaatccatgaattaggataaagttgggaaggaacattttatacaaaaaaaaaaaagagcataaatggaagacatcacacactcacagagaaaccacactgttatcccccccatgcttgtggggatcatggaggaaggagaacttacacctctgagcattttgaaaatacttttactgcattgactgattcccaggtaaggctgagcagatatctatgcccagtgattgacaggaaattcctctgaaatagctgcaagtctggagtttcaaaaggacttagtagtcctttcctcagagaactgctttctctaagatgggggctttctcataggtaagtttccctttcatagatgttttttccttcaacttcctgcaattcagtagctatttgtttttcttacatttgtgtatttgatgcaccaagaagtccacctttttgtgtatcttgtccatttttcttgtcttattaactaaagttacacttggatttggatttcattggttttccccaaatgacctttttctgttccaagatccatgccaagctactacattacactacattacattttgtcatgatgtctcctcagggtcctctaggctgtctaagattttccttttccttgagaactttgatagttttgggtagcgctggctgagatttttatagaatgttcctaaatttgggtttgtctgatttttttttttgatgtttagagtatggtgatgaatttttgggtggtgatgatgaggtaaagcaccattttcatcaagtcgtatcaagggtcatgctaccaacataatgtcactgacacaattaaccttgattatgtggttggggtagtattttccagatttctcctctgtaaaattactacttttttttttaaccattgcttttatgtccttccctagagaacatcttacaccaaaactgtctcattttattaaaaaaacaaaaattatttcctggcttttaaggtctttttttgtttagtgggatattttttgtttattaggatatatttctgctatcttttttttttctgatgttatctgaatgttatatggacaaagggacaaatctatgtatttaaatggaacttacctcattgatcactggtttctcagggattttcccatgagagttgtctataaacattgtgatagtgacgtcgaaggtactctgtacatggaatctgacctgaccattttctcttttatcttagtttatcatctctggctctctatcaatcgccacagagaaaaggttaaccaagcttttggtgagtaagagagctataacccacaacccaatggatcaaaataaaacttagacagaactctttaaggctagtctttctactttgaaaagttgaaaactcagttccagagcagttggttgttgttagaattaggagctgggcctggatcctctgtatccttgttcagagaacatttctccaattattgtaccctacatcaaagtctgcattcaggggattataatattccctctgcccatgccgaagaatgtatcacagagaaattgtgcctgtttatgaggttctttcggtgataactggccttcaaattcaggttttcagtggcaaggaagctgacagtgttataaagcggtctattggttggggtccattctttaagcccaggtgttacaacccttgaaaaaaaaatgagtcaaagtgttgttcatgtgaggtatccaaagtagacacagaggctactacagtatactacattacatttaggcctgatgtctcctcaggttcctttagactttctcagattttccttttccttgaggacttcaatagttttgggtagtgctggctgactgtatcctttcatctatctcaccagaagtataatacttttattttgtttgagtataaattcttgcaccctaaaaagttgtccttagtcatttgtattggctaacaaaaaaacaaaacaacaacaacaaaaaacaaagctttacccgtctttatcccttattccagcaaaaactagagttggaagtggcagggagacaaagcctggattatagggagaatcttctcttgtctttaaagtttcattaagtcttcgctcaatccattatctctcaaggggttgatgttggagattatgtgagagaatgtcataccatgcaattgcaccgagactcaatttggaagctctggctacaaaaatctcccaaagccagcaaggaagtgagaaacggcatccagaaaaatgccaattctttttctcatcggtatttagagattattatttggaaccctcagttagactcggaactactaactagatctgtgctgtttaatttaactttctttgaggatggaaatgaaatgtaactttctatgatgatagaaatgaaatgtaactttctatgatgatggaaatgcactacagctgtactgtacaatatggcagtcacatgtggctatcgatgatgtgaaatatagtgcaactgaataaaaatttctcttaattttactttaaatatagatagtctatgtggctattggcaaccatactgagtagcctggcacaagggtagtgctttcaaacttttaggaggaaatatatgggcctgttactccagagaacaatcccacagtgaacatgcaggaagctcaaggatgcaggatgtggtctcggggtgggctcagacttaccagagacatcgaggctttagcgagttctactcttgtcacacattgcaccagccctttttgagattgaagaagagtgccatctcaagacaaatctagcttattctaagaaatatagactctaggcatcaagaatactactggctactaggaggcccaggagtgtacacttcagtcattatgttgggaaattggggtcccagagtatcaactggtgagttcctaaaagaagaagtgcccatgtgggattaagtaacattctactgtatggctgtgaggtgtgccctggagcctacctacctgtaactatagctctcagagtactcttagctcaattctcttttctgtgtgagttggagtacaaaagaagtcacttctgaggttagtttatctattcccttcacttcataaatgtataaatgagaaccagagtgggaaataaaatcaaggaactgattacccaagggaataaaccaaggcaagtctagtactgtgacttcaatattctgacctccagttcagacctttttcttgtacttcccgctgcctcccacacattacaccatccttgggcctgcacctagacctctgcccacagccaccccatactgcactcagtgtggccaatcatatgcctgcccatgttccagggcctgcctgagactcagaaccaccccctcactcatctttgagaggtgtgcttttgagagaagcaatgggcaggcgagagtgagctattaggttggtgcaaacataattgtggttttatggcaaaaaccacaattacttttgcaccatgctaatacatgatctatcttttccatgtggctgatgcttccgccaggggtttttgagttgagcgagagagaaactgcatctggtacgttgccaccttcactttgggtcacgctctcttggtaatgttgcaggtaaagcctcatgaaagccctgctatctgtcctggggaaagaatttaggagagtaacattctctaccacaccactgaggtcctgcttaaggtgaaccagttcgtatagtcattcattcagccaagaattaccctggagattgagagatttttgctggacactggagaggcatacagcaataaatgatcaatcccagacctcctgaggggacagataagggaataacttacaatttaatggcaaagatgcataacagattcatgagtcattagcaatgatccttacccaacatttctctttcaggtgcatagcagcctggttggaagcattctgagtgctctgtctgccctggtgggtttcattatcctgtctgtcaaacaggccaccttaaatcctgcctcactgcagtgtgagttggacaaaaataatataccaacaagaagttatgtttcttacttttatcatgattcactttataccacggactgctatacagccaaagccagtctggctgtaagtatttttagatgggatgttctaatcttatgaggtattcaaaagccttgatttcttgttattccttcttttgaaaatctctctattggttctggtttgggcatctgggggaaagccaggtttatgtaaatcaaaggggactacagggatgagattaaggggattacatactaatagagtggaattgaaaatgttaaataaggttgatgatgaaaaactaaaacttactgtttgtagaggttcttaattatcaaactaatccaattttggaggcataaattatgagtttatcaaaatgagaatcttggtacatggagtggtgaattaagaatggaaacagagcagaaagacccaggagatcagaataggccaacaaggaaacagtatgtgtgcatggtaaggagttaatttggtttgagaagacatcagattcagtactaagaaaaagaggataggaaatatgggatgagaagataagggcttcttcttctaatgatcacaataatgaataatactgatcaggtgagaatgcaacattattgttgctttttgttatagctgaaagaagtgtgatatattaaatcaggagataagaaatatagggagatggagagtgtaattgagaatgattgcaggagaattctatctctttggaagaagaaaaataatgaagtttggctaatagaaataatatgtctgaagttgaaagattaaggggcatgtgcatggtcagcaacacattgagagaaaaacaggcaacataagagtaaagggacggctgggtcagtggctcacccctataatacaagcattttgggaggccctggtgcatggatcacgaggtcaggtgttcaagatgagcctggccatgacggtgaaaccccatctctactaaaagtacaaaaactagctgggtgtggtggcgggcagccgtaatcccagctacttgggaggctgaggcggagaattacctgagcctgggaggtggcggaggttgcagtgagctgagatcacgccactgcactccagcctgggtgacagagcaagactccgtctcaaaaaaaaaaaaaaaggaataaagaaattgcagaatatttgttgtcctgcaatcataaaaacaagataagccaagaactcagctggaagatggacagatagaaaggtctggtcaaagtcatgtttgtatagcactcattataaagagggccttgctcccaaggtaatggtataatgagaaaaagtacaagtaaatgaggctgacagcaattggcacagattaatacctggcacagccaattccaccttgggaaaaattctgaagagaaatttcagagaaatttggtagtgataaagtataaattcatgatgggacgattttacattggaaataagagagattctgtcaagtttgcttgctggaacaatttccagtaatggaaaaagttatatcttctctttaactgtgtataaataccacaaaccaaagtttcatgtgatcaaattatttccgtttattatcagatggccagttctgcacaaagaatgtctcaggacagaaatgatagaattcattcttgtgagttggtgttggtgattagcaactctgacagtttactaccttcactgtttttttctaagccttacagttacacccccaaaaaaaagaaaaaaaagaaaaaacaacaaagaaacaacaacaaaaatcaagaagaaatacaaaggggttcagatacatagacagggatgtcaatactaaattttacaaaggacttgcacagtcaaaacctccttgatccttacaaatttctgagaaagaaatgttagtatgcatgtttgatacatgaggaaacaggagctagagaaagagagagacttgtccaggcttacacagctactaagcagtaaaggtgagactggaacggagctgctgattctcagtcctgggagttattacgccactctgctttcttaccgagtgaacaatgtcatcagaactatggatgtctcaaagaagtaagaaataagtgtatgaagtagattagttgatttaattactattcatctccctttctcctctcaaggaaatgagttaaggggttgaattaagacaattgtgaggtgtgggaggagcagttttatcttcctgatggtgtcctttcttcattctctaatggttgaggtggtcttcatctctatggtcacctctcaactaggcatgaaggcttcagctgacctaagcaacatcaatcttttatttcttgactttcagggaactctctctctgatgctgatttgcactctgctggaattctgcctagctgtgctcactgctgtgctgcggtggaaacaggcttactctgacttccctggggtgagtgtgctggccggcttcacttaaccttgcctagtgtatcttatccctgcactgtgttgagtatgtcaccaagagtggtagaaggaacaatcagtcagtcatgagatacacatgggagggcatttgcattgtgatggaagacagagaagaaaagcagatggcaattgagtagctgataagctgaaaattcactggatatgaaaatagttaatcatgagaaatcaactgattcaatcttcctattttgtcagcgaagggaatgagactctgggaagttaaatgactggcctggcattatgctatgagtttgtgcctttgctgaggacactagaacctggcttgcctcccttataagcagaaacaatttctgccacaaccactagtctctttaatagtattgacttggtaaagggcatttacacacgtaactggatccagtgaatgtcttatgctctgcatttgcccctggtgatcttaaaattcgtttgcctttttaaagctatattaaaaatgtattgttgaatcaaacccctatggacttatggctttatttaactgaattaaaaagccttgatttatccaaaattgtattatagagtgtagaatgaatactagggtgataaattgcaattatttgaagaacctggtgatatgctctacttatcttggattagctaagaattctatgtatacagttggaaaaatggcatatatacatctatcttgaacctgattgaagtctgaagacctaacatattttgtttcttctagagtgtacttttcctgcctcacagttacattggtaattctggcatgtcctcaaaaatgactcatgactgtggatatgaagaactattgacttcttaagaaaaaagggagaaatattaatcagaaagttgattcttatgataatatggaaaagttaaccattatagaaaagcaaagcttgagtttcctaaatgtaagcttttaaagtaatgaacattaaaaaaaaccattatttcactgtcatttaagatatgtgttcattggggatctcttgatttgcctgacattgacttcagcaaaagcacggggctgtaaattaccatttactagattagccaaatagtctgaatttccagaaaacaaggcagaatgatcattcccagaaacatttcccagaaaatgtttcccagaaaactagacagaatgatcattcaatggatcacagtgaagcaaaggacacaactttttattgtaccccttaattgtcaacaggagttaactgatttgttgtggtgctcagacttttttatacaggtgctagtgttttatcctatgtattttaactcattagtgcataaaggcaagccccatataatgaagtctcagggtatatgaaagtagctggcttcaaaataaaatttttgagtgc

SEQ ID NO: 248 - DNA, 31941 bp, Homo sapiens
agggctgaggcataaaactgccagagggtctcaaggcaggcaaagaagaaccatgaggctcatcctgcctgtgggtttgattgctaccactcttgcaattgctcctgtccgctttgacaggtaaatcttacttcctgtgttccagtctctgtgtagaagagaattaaaggttgtttccttacagttcactttttttttttcatttgcctccacaaagggagaaggtgttccgcgtgaagccccaggatgaaaaacaagcagacatcataaaggacttggccaaaaccaatgaggtaagcatttagagggatattttatcttttcttactgttctctaaaagatgcttcttcttattttactgtcaatgcccatgggactacaaaagactattgaacataaggggaaagcaggagctatctggataattcagccaatggccaatacttcacctgttctggttttggtcttggtttccaagactaccacttctgtttttcctcccaaaagcttttcaaacaccagctttttcaaggtaaaactatgaaatcaggagctgttcttggcctccttatcagggcatctttctcttgcctacgggtgccattccctctccattctccccactccgaccctcatctcctctggtgccataatttctcttgagtactaactgaaaacgttgaggcactggctaatatcaagatgtgaccctttccaagagcaggtacattttcaaataagacttttaaagttagatcaatcctttaaaatccaacagcctaatataattttatcatgtattcagctgctcctatttatgttgcaccagccaccttatatatgccatttcaaattctccagcagattctcaatgtcagggttataatgtaactcatttgaaacagaagagctaaagtgcaaagacaataaattaaatgaccaagattacacatcaaatttaaacccagaactgggtctgggatttattccagtcaaacatacagttacctctacatcaaatcaatcaaaggccctgcctattctaactcccaaatgtttctcaaatccacacattgccctccattccactgccactgccaagttcatgttcactctacctcttgcaaggagaatttccatagtcccttaactagcaatcagggctctagtcttgactcccacaaagccaactctgcattgcaacctgattgctcactctaaaacttgacaattgcattcctccgtttgagggtcattactaagaagcagcctagtacggaaaaagcattttcttcaaagtcaaacgcttacattcaaatccaagctctacgctagctctgtagccttaggcaacttactcaacatctctgggtctcaatttcttctgctataaaatggggataatagtcatagctacttcctagggttgctacaaagactaagtaagcgtttgatagcacttagaagcaggcctgccatattaagcaccatagaagcgttttttgtttgttattgtttttgttttgagacagagtctcactctgtcacccaggctggagtgcagtggcacaatctctgcagcctccgactcccaggttcaagcgattcacctgcctcagcctccctattagctgggattacaggtgcccaccaccatccccggctaatttttgtgtttttagtgaagacggggttttgccatgttgcccagctggtctcaaactcctgacctcaagtgatccacccgcctcagcctcccaaaatgctgggattacaggcatgagccaccatgcccagtcagaagcattttcttttggtattggtatagcattcaaagcgttttatgatctgccaaactaccagcctcttcaatatcctgctcctccaccttcttccacacccttcaagccccataaacaccaaaatctcacccaccttggccctgtacatcttttctcatgaaaatgtgtttctctcccttttgacctgggtaagtcctacttatttctcaagatccaactcaggcagtgtctcctgcaggacgtctcttctgttcatcaactctcgtgactcagttttggctgctccttgtgctcctggaatacccggttccttcctctggcattggttaacatgtgggaaacatgcatgtatgactctgtgttccacaccaaacctttcacatctcataagtcccttattagtctctacaactgtggcacccagctctttgcctcctgcttaatacatgaaagttcactaagctctaagctcctgctgcacattaccctgctagaacacagaaatgtctattgtgataagatggctctgcctaacttgcctttgcatcacactacatctctcatatgtccaactcatgatgtagctttttgatcaaaataaacattggttggttcatagcagcctcatattgtcacttgattgacctcgaggtagagggggactcaaccaagaaacagccaggcagacctgaacacatacacaagcaggggtggaaattgagcttttccttcacatttcccaggctggggacttgtacttcatttagtttcacaattgagtatgattttgaagaaccacaagaactggaatcttttcaatgtttgcttttgtttttgttttttgtgttttttctgagacagagttttgctcttgttgcccaggctggagtgcaatagcgagatctcggctcactgcaacctccacctcccaggttcaagcaattctcctgcatcagcctcccgagtagctgagattacaggcatgtgccaccatgcctggctaattctctatttttaatagaagtggggtttctccatgttggtcaggctggtctcgaactcccgacctcaggtgatccgcacctcagccttccaaagtgctgggattacagtcgtgagccacaacacccagcctcgaaattattttgatctgaatgctatacttctgagctcatataccaaatttttgaaattgtcagctagaggaagagaaaggaaaaaaaaatctgcacctgttaactgtcttcatgccccagacctcagacctatttcacaatcttcacaacacttcccagtggaccctcatttgccccattatttcaggagagaggagtaaaatttaaagagtcctagtaacttgcccaaggacatattgctagaaaaatgactttgctgggggtctatgccaactgtttgatacaatatcttgtatcaggatttccagagtttatagggacatcaggttttgaggactaactaaccagatatttaacttaaatttccaattagaggcagattctgtggctagatgaattgtgatcccattcaatcccaaaattgtggaagaaaaaaattaaccaaaagatctgcccatcctttttaacttgatagacctgaagtccttaaaaaaaaaaaaagtgatcaggcactaggaaggtttctttcctcctccctaatattcaacagttcttaaatatatttgcaaaaatcccataaacttattaaaagaagggtctgtatcttagttatgctgagccccaaattcctttcatggtgtatgagacatgatcatttcttaatcaataagtgttgggtaagcaaataaactctgactaacattgagcttatctctgcagcttgacttctggtatccaggtgccacccaccacgtagctgctaatatgatggtggatttccgagttagtgagaaggaatcccaagccatccagtctgccttggatcaaaataaaatgcactatgagtaagtccttggcaaatattgaaatttgttggatattcaaagttttgggagccttgaagtagaggaaagtattacaatggacctatttttaattgggccccccagaacgaaagctctttctgtaagatacagatcacagttacttccaaacacattatcgaagcctgtttacagaggtgatagaatcaaacttggcagttcaacatctaccttacatttgctcttagctataagaataacaattacctatatctaccatctccaaaaccagcccctcataagcacagagcccacatgagcaggcatgaatggtttagccacatgtcatcactactgacaggtaatcggcccagatctcatgagctactggcgctggcctccttttatatatttgaattttcctgatacataaaaggagaccaaaaaaaaaagtcattggtatgtcagaaatacagcaattggtatgtcattggtatgtcagaagtacagcaattaaaaatatacaataaataattctttatgaaaaaaattcttcctcagagaaagcacaagcagagcagtagaatacagtttaaatcaaagagaaaagaatctcaaatagccaaagatgcagaaatgagtcattctggccccacagagaagtaagagaaaatctgaatatattgagcagcaaccatgggccatgcccagtctgggccctgggcagtgaatgagaaggaagcccagcaatgaatatcataaatcaatgtgtaatttagaaaataaaatgtgttggccatgcgcagtggctcacgcctgtaatcccagcactttgggaggccaaggcaggtggctcatgaggtcaggagttagagaccagcctggccaatatggtgacaacccatctctactaaaaatacaaaaattacctgggcgtggtggcgtgtgcctgtagtcccagctactcgggaggctgaggcagaagactcacttgaacctgggaggcagaggttgcagtgagccgagatcgcgccactgcactccagcatgggtgacagagcaagactccatctcaaaaaaaaaaaaaaaaaaaaaaaagaaaatgtgtttttatactttcaaacatttcatagtttgatgtacagagggatcccattttaacttccccaggccatgttatgccaggattcccctttgttgagaccctcattgtcaaaacactgctaaacactagttcattttttttttttgaacttgccattttatacctccattacctgacttggtactttaactcaaaaggtctgcttctggctgagataaagaaagagcctgttgatgtcagtgatgttatattgcagagcaggatttactactgctcaccataaacttgattttatttatgatattgccacaatatctcaaataaactccattgaaatttaaaaatcacgtacataagtgagcaaaaaacattcttattcacggctttaaagataacattctattatttgtgatggttattgatgactttttcggttttgttactgtttcaagaaggttgtggcagaaatgtaaaagttaacaaattgaaaatatataattcacgctgtgcacatgtaccctagaacttaaagtataaaaatatatatttataaaaaaaactaattgataccagcttttaacccttttaacttaatatactaagtttttctgtttttataaatcacatcattaaaattagacacttcaaaaatgtaactacaagactgcagaaatttgtattacattatctgtttacattaaggttcagataatgtattgactctttcatctaaaagaaatcaaccctctatcttaaataacccctggttactgtgtctcttgttttgttttttgagatgaagtctcgctctgtcacccagactggagtgcagtggcgcaatctgggttcactgcaagctccgcctcccgggttcacgccattctcctgcttcagcctcccgagtagcttatactacaggcacctgccaccatgcctggcttttttttgtatttttagtaaagacggggtttcaccatgttagccaggatagtcttgatctcctgaccttgtgatccactcacctcggcctagccaccgcaccaggcctactgtgtctcttgattcacttcattgccagctttctagtatatgtgcctaaattattacactcttcactttacttcaataatatagacctggtctggattcctatgataaactaattcttacaaagcattcagcccaaggtaaaataaagtagtggtgtggccaaattttatataatttggcttgaacagcaaggtaaagaattaggtattatgttttccttaatagccctataacgcagttacaatgtagaaaatgtatctagaaaagctagttgcttggcatgagcatgaatagtggagtaaatcactgtaagacacctaggcaggcagctagcatccttccaatttatcaaatagctcacatcagccttttttctcctttggtcctctaggcctcttctatcctgaaatgattctgattcaactagatgtctaaatccagatcctcaaattagtgtgtttttcactctgtcttatgacaaaggagtttcttgctttctacgtcaagtaccaaagtgttaaattacctacaaaaattggttttatcaaattaaaacatgaattctacaaagtggcccaaatcagccacagttatgggaaagccaaataattagatagttacctccctcagaaatataaatatgtaaagtgataagtgcagacaagaactacttaaaatcttgtctccaagtactaattatatagataattttatttgcatattaattatatgcattacttggtgtcagtcagtaacagaaaagagttctaagaacagaaacatctggtcggacccaggcaccaggctgaattaaaccatattaaaaggctggtttgacacaaagatttacttacacacccttcattagacagggtatatcaactactatttagtttaaagcatctgtgtggtttttctttaatttttagaaaattaagttagtaagccagattttattttaaagtagcatacttgtttctttttttacttatttacaaaatcataaaaggccaagttcaaaaaacaaacaacatggatatactaacaaacccaaacagactggcaaacaaatatcaaagggaaggcacgtccatcggactgagcctctggggcagacactatacttggactcagcagttaaaaatcctagtgtttttaacattgttcacattttagacagtcaatttttaacattgtcttttctttgatcaaaggttaaaattagaaaataaagagttgttaatgaaaggtaactcagaaaacaactattaatataataagaaaactcaaatggtacaattaagtaaaatcttacgaggatccatataagattatgtgagaaatgcaaaagagatctatgccaaactgacacagtgataatcaacacctaatattaatgtctaactgcctaataataatgttcagtcagatacaaattcatattccagggatatacacagtcctatccagtgtttcaatcaaatcattctaatgtgtcattccattcatttttttcttctgcttcacatttttacgtattacttacctaagagtataacatgcatgttatactacaacatgctacatggtacaaatgttgaagttacaattggtcatgtgacaaacaggagtgtggaaggtaggaaagtgggttctgaagcaacgctgtctgggtccagtcccactgaagccatgcattagatactcaacattggcaatttatttaactttgctttacctcatacctcatctataaaatgggaataataatggaatctatttcataggggtttcatgaagattgactgggatcgtaaagttgctgtctgcctggtcctttacttctatgaatacacacacacacacacacacacacacacacacacactcacacagaaacagggaataactagaggctatcaccagatgttccattttcctcccagtgaataaatgagtagtattcctcaaactttgagaaatccatgtcagtaagtgtagaatttgatgtgtggtaaccaaattagggagttaccagggggatattgaatcttagggaaacctgaaaccatgctttttgaatagcaccatatcctgatgtaatgtgggcatcaggagaatccagtcccatttataagtcaccctgacagtgactctgccttcctgaaacatctttccccagtgcatgcacgcgcgcacacgcgcacacacacacacacacacacaccccagagcctacgatagtcacatatattggcccatagttctccagtcctttgttgctttctaaaagcagcaaaggatgggagccttgaaactgtcaaagtagaatttatctcatctcttctctgaacctcttacttgctccctgaccttgggacacagacttccatgagagttggttgattgggccaactgtgcaccaacctccgaagactaaggagagtgcagatctgacggcaatacccaaggatttcactctcatgatgaaggcactattgtacaatggctcacagctacggtgctgatgtcagaccctccaggttcaaattccaacttctgtattttaacagttgtgtccattttggaaactggccaaaccttcataaaaacaagagctgataatggtacccagttaatcatgttgagtgataaaatgtaaatacagtgctgagaaaagtgcctggcacataagaaaggttcagtaaacattaaacatttgtattattcaatactcagtgataattatttatcctttcacctatatttaggaattttcttaaacaaattaagcaaattttggagctcaaaataatatttgagaaaaagtaatttggtttcatttgtttatgcctggctgctggttagtagaagggcttgtgaaaataacatctggccccagttcttaatttccagccttaggcttaatttctagtccctatcagcaacaatctggcaccgttctgatgttctcatgcagctacatcatttgtggaaaggttgtacttcaactcacactgttttttttgctttgttttgtttggttttgttttgctgctgttatcataagagctaaattgatatgtgtaagtctaaaaatattcttagatacaagcttcctgtgactaattaatactgccttatgttacaaatcaacctctgggaccataaaatttctcttctgcctggtttctccacttctattaatgcaggtggagcaaaagccacgtgccctttttagagcttaaagcaattagttatgtctgtaatgaccacccaaaatataatttcaaaccttcccgggttttgtgtgagtttcagtgcaacatgctccacctgattccaaaattgctgtcacaagtttattttctcagaaatcctaggttcatcataagtcaaaagcaaagcatacagtgagttagatatgatgtacataatgatgtgcttgtcagtgctgctaataggaatcaatattcatgagcagtacttggtcccatgtgctaaataaactctaattaagggaatacagcgtttgtgttccacatcagaactcagatcagtcagtcaatcagcaaggagaaaccaacaagtagagtggagctcagcagtgtcagtgtcatagctcattattataagaaattgaagaaatcaaagagtcaaacatctacataccatcaaagcctgctttaaaaacatgttatgactgtaaaatggttgtcgattttatgacccaacttcactattattctgaagttcaatgggagcctgaggccaccaagcacttaggttttacttcatttcatcctcaccacaagcctggtcaccacaattgtaaaagttggaaaactgaggttcagagggtaactaagccacccaagatcacatgttcgtattatgtagctgaactggggttggaacccaagaaggtctgaacacaggtcactcactgcttccttatttgataagatttatagtgacggaaagagtacatgatattgtcccaaagactagagtgaatgttaaaaaatagacttcttcctgcacccaggactcactgctaacagcagaaaaaaaaatacatgtgcatttcattaccaaaaggtgagtaattcctttatttatatagagtcaatgagaaatgagataagccaaataagaaaattgttcagataagtacgacttcaagaaatcctttctttttaatatttttattgaaacatttccattataacgataattttctgccctacaaaatagagtatattgaatatggtttacctttgggtaaagaattatcattatcaatatgaattttcatactgtgctatgagaccactgacccatgttttctaagtccttctgtctagggagttttttaacttttctctttttttttctttttgctgtcagctatcacctactgataacagtgtgttcgctgcttgctttcagcaagtcattttccctagatccaatgcattccttctgggttaaacaagatttttagaacagtatctaaaataagacagacaagattttttgtgagggtatttgtaaatctcctacagctgtaaaataatatttaacaaaataaggaatctaataataggttttaatgcaaccatacatcaacggacaataatttgatcatataaattgatactgccatattaatctcaaagtggcattcaacatcattcttaacagtgaaagataagttttcctgtaaaaagcagaaaaaaagaatgccgtctatggctactattatttatcatagttcagagagttttccaatgcaaaacagcaaggaaaaaaagaaatagttattaagaaaattagaaagtatagatattggcagaagaaataacacagaaaataccctaaaaacataactaaaattcttaaaagtataaagatagttttttaatctaataaaatagctaagtgtaatcaaagtaaatggttttttaatatatgaatactgtaataaccaaaaatgtagtgagaaaaaaagtcaaaaaactggtaaaatatatatatatataaatagatgatcaaaatacttaacattttactgaagaatcaaagatacaattatgttatgatccattattaataaaattcttatatttatttataatttaatgtctatcaaaaaatcccattttttctgatcattctaattcctaaaatgattctgataagacattttttttttttttgagacagagtctcctctgtcacccaggctggagtgcagtggcacaatctcagctcactgcaacctccacctcctgggttcaagcaatttttatgcctcagtcacccgagtagctgagactacaggtgcccactaccacacctggctaacttttgtatttttagtagagatggggtttcaccatgttgcccaggctggtctcaaacttctggcctcatgtgatccaactgcctcagcttcccaaagtgctgggattacaggtgtgaaccaccatgcccagccaagacatttatttaaaataggtgaaattactcaaaatttttggaaaaaaagaataagatacattatccagtattaaattttactgtaattaaatatgatttggtttctattaaggcataagaaaaaagattaatgaagcaaatagaaaattcccagacaaaataaataaaatacttgcatatatgatgatgacattttttaaaaataaatcttgaaatgaggcagtttgtattcaaattcccaactccatctcatacactgtgagtatttaaaccttctgagcactaacttccccatctgtaaagtgataatactgacaagattaattaaataatgtgtataaagcagtacctggcctgtattacacatatggatatctgaatccaagtgaaaacgtcatgtaggcagttggatgtgtaagcctagagttcagaggagagtcaagtataagtgaccatcaggtgaccattacagccactggactccataaaatgatgacatgagatggctcagaaagagatgaaaataggaagatgaggccgggagcaatggctcacgcctgtaatcccagcacttcaggaggctgaggtgggcagatcacctgaggtcaggagttcgaggccagcctgatcaacatggagaaaccccgtctctactcaaaatacaaaattagctggcgtagtggcacatgcctgtaattccagctgctcaggagaccaaagcaggagaatcacttgaacccgggaggtggaggttgtggtgagccgagatcacaccattgcactccagcctgggcaacaagagtgaaactccatctaaaaaaaaaagaaagaaagaaagaaaaaggaaataggaagataaggtgtaagccgtaagcctcttgaccctcaacattagtctcctagtgatttttcccacctcttatttcacccccttcaaatcatgttagccattttctagatccatcactataggcacgttgtttcaacactttgtacctcatttttctcatctgtacaataagcataataatctaatgtgaagattaaatgaattaataatgtacatatggaggtcagagcgatgcctggcacaaggtagtgctaagtacctgcttactattataattatcattattattcaagtttctcccagctcagaaggtgtgaaattataaggtatgatctgtagatgtgtgcatgaaagaatcccttgttgcctgtgtttatgtggatgtagatgtgtgtgtgttttggagaaggatggggagtactatagcagtacaatacgagccacatgcataattttaaaattgtggtaaccacattaaaaaagtaaaaagcaacaggtaaaattaactgtagcaatacattttatttagcccaatatatctgaaatttttattctacacaacataaaacttattagtgagatagtttatatcatttttatactatcttcaaaatctggtgtatattttacacatacagcaatctactcttggacaagccccacttcacatgtcctgtatgcacttggggctagagactatcacactggacagcacagctctagataaatggggagatcagaagccagacacatgatatgtctaaaggagatagctagaggagaataatgaagaaacagagcaaacttgattaaagataaaggagaaggaagagaaatttctgcaaatgaaagataactgtgttttcctttctcatgataaaacatgtattttatcattcccctgtcaaacagaatcttgattcatgatctacaagaagagattgagaaacagtttgatgttaaagaagatatcccaggcaggcacagctacgcaaaatacaataattgggaaaaggtacagtaaaaaatgcctgtacttttttttaagttacccttaatatttattgtcattttgttttcttttattctaatttctcaaaattgattttgctcttaagattgtggcttggactgaaaagatgatggataagtatcctgaaatggtctctcgtattaaaattggatctactgttgaagataatccactatatgttctgaaggtaaaaataactcaagaaccactaattcttattactgttgaaaaacatgaatttaaaagttactttgtaacacaactaagctaattctgagctaatacatattatctctgaaagaatatttaagctctagacatccattaaagaatagaaatgacaagcggttttggtggaaccaagaaagtgtctggataaacatttgtcagagattgcacagtggacaaacccaaacaaatatttcatcccacagctttattacaagagtccatgatgtctctggtataaaaaaaaccctcatcccttaaaatgcagtgaaactgatgaatgaatgtcatgaagggaatttaaatatcatagcatcataggactgtagaacagtgtgttaggcatttcaaccatggattgcttgagggttccctatatcagagccaacaatttccactccattgctgctggatttttgcacatccaaagatactgctccctgaagcagccacttaacaagtgagaagcccatccacatcccaaacccccattcattcattatctccaaccactcaaaacaaacctgcactctcttcaaaatgacagccattcaagtatccagtactatttcccttccccactccaacacaacacaagatcttctccattccagggtaaatatccccagtttacacaaccagaaaaacaaaaggaagtggcagaaacaaaagtgactttataataaatttctcagaacacaggatgttagtaataaaataaaaacaatggactacaaatttttttcaaaatcctaccagctgccctgacactagaaaaattttttgaaaaatatgcattgtaatagattatgaattatgtatagacatttaaggatatgtcccatggtcccttctgagaacaatatgtgcatacatggttctcattcaacaatagacaggggaaataattgctttgagaatatgaatgagttattggtcaacaagggatcaatgtgtgagtttgttcaaaacaatatctcaagtttacttttaaatagattggggaaaagaatgaaagaagaaaggctatttttacggattgtggcattcacgcacgagaatgggtctccccagcattctgccagtggtttgtctatcaggtaagtgaatcagaagactcccaattctcctttgactgccaagtctccagcacttcactaagtggcgacatctttccaaacacgcaattccacttagctagaagagcccatacttggtgctgtcagggaagaaacgctctgaattttactcatcattacagtttttatgaaattgacaacttccctccaaacaattcttaaactcaagctaagagtttatgaaactcacacttttcttgggctatcacatgaaagtttttactgtagtcaagtatggaaaatctgaaacaaccttcacataacctacaaatgtaacttttcttcaatgagctcaaaacatagatatttaattttaattcctctttagataatacattggccgcacatgtacttggaattttaatatttaagtttcctttctgagtgaaaaataactcacttttttcttttttttttttttgagatggagtctcactctgtcacccaggctggaatgcagtggtgcaatctcgtctcactgcaacctccgcctcctgggttcaagcaattctactacctcagtctccaaagtagctggaactacaggcatgcgccaccatgcctggctaatttttgtatttttagtagagactggattttgccatgttggccaggctgttatcaaactcctgatcccaagtaatctgtccccctcggcctcccaaagtgctgggataacaggtatgagccaccacactgggcctacaattcacttttttaaaaggtttatctagtttatatattcaatattcctctcactctattgccaatgtattttgactcctaccatattttaattttctctttctgtcagcttttgcacatggcacagtggtgaaatatgtgtaacaatggttttctgggcatagatatttttctagaaaagaatccaccaggaagtgacctgtagttacttttgctctcccaactgagggccaagagctccccctactcaacacataaaggaatgcacatcacaggtctacaaaaaatcttgtctccaattcagatgtacctagaaggacttcccaagagtggtgagagagattttaggtagctacagaaagtgcatgtgattagagaaatttcagtcagatatagaaaaaaaaaagttgttcaatctctgaattcttgggtattttattaatacaattttttatttaatcctgcttataactatctcacaaattctctccaatattttcatattcctgtgcttacagactctatctatatttatgtaaaagatgtgagagaatcaattaaaaataagttgtattacaaattttccatttggcttccaatctttctatgaaacatatctctcatgctacatttggaatgctataagtctcgataattaaatgctcctttaaagactattcatttccattaatgtcactagtctaaataagttaggtttttttcccctttaaactatatggattgtttatttttgttcattttagggaaaatatgcttgaaaacatgtgaccttgggaagtgactcaagttattactattataaccacagctttccacataatagctaaacttcataccaatagcttaattttttttcacctccgacaggcaaccaaaacttatgggagaaacaaaattatgaccaaactcttggaccgaatgaatttttacattcttcctgtgttcaatgttgatggatatatttggtcatggacaaaggtactgctctctactctcttgtttgcatttagatattatttgctggctttaatacacaatgttatgcattcagcttagggtttaggtaactagttaattctaattcagaaaagtatattttttaaaatctcagtttcaaattaagtatgatttcttggttgcataggtatccttgaaataatataaaatttttgctgctgaagctagttatgtgggaaaatgaaataaagtagtaattacagaggaaatgtatgattgcattatatgatatggcatatctagctaagaataaagccaattaattgattttaaaacaaaaacctttgtatttcatcaattttgaatagaatttgaggtagaatcattgtatcaaaaaaaataaaagagaggtacagatacctatttgtctttttacagtatattttattatcctgcttttgctaaataagaactctcaggcagacactgtcacatcaaattattttctgcaaataatgctccaacagtaaaaatttgacctgcattatatctgaatctatatatggtgaacaagctaatgaagttataatttaaattatggttaatttcagaacaccgttagtcatcttctaatactgtgaactaatcaacagtgtttaaaattaactgaattatttcatcaaagcctaaggatataatattaaaaaccatgattctgaaaatactacaaattataagaaaacaatatttttttctttttataataaagggcctcaagttaactagatagatttcaaataaagttgcagacacctgcagagagaatttgaaatgatcaaattgaaaaatgcaaactgatcttgtgtaaacacttacgtcattcaatctggcagaaccgcatgtggagaaaaaatcgttccaagaaccaaaactccaaatgcatcggcactgacctcaacaggaattttaatgcttcatggaactgtgagtagcagacttgctatcaaggaaaattgctataaggaatatttaggtcccaaacttaactaaaacacctacttgttcagtaaaaatagttatgctttgagtgagtgttaacttttgtatctataacatgaaagacaatcatcactaccattgagggatgtcttgctgtgtggaaggaaatgaggaggaagggactgtttatcaaaccatctcttacttactatatctagtttgctaaaaattaagcacaatccaaatgtataaaaattcagataatctgaataaagacctcagattcctctgcttcctgatgtgagaaatgtcagtggctaaaagcaacatacagacagtttttcagatatttagtgaaaagagtcatctggagcaaagaaagtgaaaaagtttaacagaaatacgatgataagcagaggcctgctacatcagacgatgctttagttgctatacaactatgacttcatcactgcacactttcaaggagaaattaccattgccccaatttatatatttcttctgtgcctaattttgttgaaaacatcacctgagcttttaactgtattctaccataatgaacatagaagagcagcagctatctctaattgagagctttctgctgaaaaaggctgaagaaacttgtgcccagggaaggtaattcacaccagcccccagcgcattagagctggggttgaattagaactggagtgtatctggctccaagtcatggctgcttctgatttattactcctgtggccttgggaaaggacaaggaagtaaacaaggcttagaatattccagtgggctaagtctgttacaatctggcatgtgtgtgcaatgttaatctgtagtgactatgatacaagagacattgaagcagccctgtaaacatgagaggcaaaaacatttaaaacattctgtgaatctataatacattagaagaggcaggagctatatggatggggagcagactgtggtctcatccacctatgtcttctgcagccattcctaacaccaatgacccatgtgcagataactatcggggctctgcaccagagtccgagaaagagacgaaagctgtcactaatttcattagaagccacctgaatgaaatcaaggtttacatcaccttccattcctactcccagatgctattgtttccctatggatatacatcaaaactgccacctaaccatgaggacttggtacgtagacaaaagtttgcacttcatgcatcgacaataccattgactttcagtctgttcttcattaacttgggtatgttgaaagaatttcacattttaatgtcaaagaaaagaactaatgaaatttgccttgaagttaaaatcatgatctttagattgatttttcattgataaaagtatatagataataaattcctttaatgtgattctcaggaggaaaaaaaaatcaggaagaaatgtctaggaaaggcataatagaagtctattacaacacagctcattgtggggtttaacatttaccatgggttgtacggtaaaaccatgcacggaaaaagcccaatagaatagcaaagacatttactagtcctgccccccagatatcagatttaagaagatacattgtatttttatcctgatcaacttggaaattatattcttttacaatccaaagaagattataaatgtttgtgaagcttcttcactaagaatatgttatctttccaaaactatgatccattaagcaccattttgtttataaaaactgatttgataatgtgagctttaaaaaaaaagtctgcatatgggttccaatgaatcacaggaagtgacagagtgaatgggtgcatagagggataaatattttgaattgctatagaagaaaataaataaaacagaaaaagtttagtggcccagatcccatggtgattggcaaatatagcactttcagtaatagctgtggtccaaatactgcctcataaaatattttaaaatttttaagaggttacaattttcattctgacctcagtccattgtatttagcacaacagcatttaatgttaattggagcagagacctgaatcagtcattaaaatcatctccatatatacaacaaagaagacataccagcaatatatggcccatagtcatttattatccaatgtaggtgataatctgagggcgtgagttcaattaatgcataccaatgtacagcactgtgatttcaatccactgttaggaaaatgatattatgggttaaaaaaaatacatatccacaaaaaaaaaaaccactttgagtaaaatgagagttcttgcatagcaactaaattgattaagaaaaaaattatttattggttatatacgttatatgtatagtcttttaaaaatctttgtgagtgcaaatatgttagtaactatattccattaaaattcattctgacaatcactctcatagcacaaaacactaacgtgtattaaaaggtcatgacaaaatgccactctgaaagagacaccctaattaacaactattttaaaaagcggtcaaccacccttcttcccttggtatgctgaagtcagatgagtagagaagatcctgtagcaatatgagcctgttagggaccaaggaatgtaaaacatggaagaaaatggagaaactgtcagaagagacaattatctgaagccaaaaaaattgacaggaaaaataatgtatattttatattttagaagaaaggaatgaggagagagagagaaagaagagtagaaacacaaaatgagatatggcattactgtatataatcgactgcatatttaagtcttttttttttttttttttttttttagacggagtctcgctctgtcaccaggctggagtgcagtggcgcaatcttggctcactacaacctccgactccctggttcaagcgattctcctgcctcagcctcccaagtagctgagactacaggcacatggcaccacccccagctaattttttgtatttttagtagagacggggtttcaccatgctagccaggatggtctccatctcctgacctcatgatctgcccacctcagcctccgcaagtgctgggattacaggcgtgagccaccgtgcccggccaagtctttatacttaccacatatattactgaaaataagtttctcgtttaaccatttattttattttgatcttcaaatgccaaatacctggtaaatttgacttttttcatccctagtaatttacatatttacatatatatatgtatgggctttggttttgttaaaaccaggaactgaattccggcttcaccagttgcaactaaccaggaaatagtactgtccatctcatagggttgttatgagtcttgaaactaaagatcaagggataagcacagtgcctaacctgtaagactccattaaaaaattgcatacatacataattacatattccttggtatttacacagtatcctattatttcactctaactttcctttctctccaggccaaagttgcaaagattggcactgatgttctatcaactcgatatgaaacccgctacatctatggcccaatagaatcaacaatttgtaagtcattcctcttatttactgagcccttttccctaattattttttacaaatattaaagaaaattatggaatttgcaatttaggttagagcatctggaattgctaatttaaattctactttttacaggatattctgaattatacgtgaatctaggggatagattctgaccttttcttgggataagatttttctagaaacaaattatactgaacttttacagggttacaaggtcaacggaagctattaagtcaagacagatttacagtttactttatctaccttcctgtttcccacctgtaccaccaacaatgttgtatccttccaggaactaatgagaattcactggagtgagaaaaaaaaaaaaattagccaggcatggtgacctatgcctgtagtcccagtttctctggaggctggggtgggaagatcatttgggcctgggaggtcaagactgccatgagctgtgatcgtgccacggcactccagcctgggcaacagagcaagacctcatctaaaaaaaatcacataaaagaaattagatggagtagagtctacattttttttaaccatttaactttaactggactctttcttacttgccttgtctacatgtaagtatggtcttttccctagctgaaaaacagctaggataggaaaacagatagaaaatcagtttcagctcctctggtcgtgtaaaacaagttatctctccttctcacttgctccttctcactatgttcagccgaaatctgtatggtgaactagaagggagatcacaagactctagttctgtcacttttgtttcatactctcagcaccatttcttactcttccctatttttaaatttatgttgtctttgtgtgtttttaagttattgacttggatttcttggccttgattttcttgtctcttattctatataaaagaaatcagtaatttttttttctgtaaagggccagatagtaaatagctttggctttgtggaggtacagtttctgttgcaggtactcaaccggagaatcatagctcaaaaacggccatagacaataagtcagcaaatgggtgactatgtgccaataaaacctcattcacagaaacaggaggctgaccaggatttgccaactcccatactttatactaaataatatctgcaaatttttatggagtctttacaagttaggcactgtgcttaccccttgattttcacaatctcaagcttcacaacaaccctatgaggtggggagtagtatttcccagttattagtaaccggcgaagctggaactcaatctcagattttaacaaacaaaagccctgatcctgaccactgcacatactgtttgtgcatttggattttgtagctgaaatatccaggattttctatttgcaatgaacagccaaaaaatccatttgagtatcaccgaagacaattaactcagatcctgggaagtgagaccactttctgctcttacagcaactcccactaagcttagtttgggaattatttagtaaaaactaccttttctccaaaccaagttcaagcttcagttcttagtctcaaaatttatacaaaattccccatgaaacttctcaaaagcaagaattatgcttcagatttcctcttagaccctgtaacatatagtacagtgcacggcatggaacaacagcagaattagttcccataaacttgctcaatgataatggtgtcctggcttattcaaaagaagtgaatgtgagttgaaaccacaacagtactggacttgattaagcctgcatcactctctagaccaaatatccaacagtgtttagcattaagactaccatttaacttttaaaaatttcatgaacaacccttccaccaccaaagatacactcatatttttattacacttttagaatctgtgcattaaaaaatacatatgtgcatatgaattcaggattccttgcaacaattttacctgaccacagtttttaagtcactttcgtattccaagctgaaagtataaactttgaactgaaagtctacatcctcagcaattgcgatggaatttgaaaatgccggaatcaacatatacagtttctaggacttacttattagatgcttctttggcagaactggaaaatgactaaaaaatggacaagtccctttcctcgagcacattcattaacaatcacctatcaaccagtcactgttaaggtgctgaagaaaaagtgtagtgatacagatgatccccagcatccacatagatcttgctacaacctagccatgctggggactcattacacatacaggtggatgaccacaagatttcaaaatacatgttatgtacccagctatgtgagtggacaaaaagtaagcaaagtaaagaacaagaagacagactagaagatcagtttaaaatggcagcccacttagtagatactaataaatagcagggccagattggccacccagacaccacatgagagcaattcctctaagcaagaaaaacccacagatagtcttagaggcaaagaacaaagcattccaaacaggaacaaactttgcaaaaggcaattaaagcatcaaataattatccgtgtgtgtgtatccacaaaagtatgagaatacagagctgtgcatagcattgcattaagacctcttaatgaacaaaaatatatggtgtacctagctagcaggctagcactttggagctttcagagataaatgagaggacttaggacacaataaactactcttaaggaagtcacattctaagtggaaggagcggagagccaaaactaccatagctccatgccatcatgtgtcactttcaaaatggaaagatacagtcaagagggattactattctgtttaactgtgcagcattatttaaaatttttattacattatactacaacattttaaaggcattgagatttagaaagaattgcctttgtcacgcagtgctgcagcagcttgataaacgatcaagatttctagaacagactgctttaataaagcatctgatagaatgttaatcaaacatgcatgagaaacagggtagcaaagcagttgacttggtaagaataaaaaataaaaatgtgattaaagtttagtcattccaataacctgattgtcacttaacatgtccccagatttaggaacagcatctagcatttgtcagtgatttcctgtcttcgacttgatgaagacagaaaaaaaaggactgggggagcattttttaaactcaacttatggaggatctctggcctttagaaaaaaatatatatatgtttgctctttgaacatgagaggcaaacatatcagataagttaaaatcataaattttgaaaccagggagaaacataggcaatgatctattccatggttctcaagcctgacttcccattagaatcatcaggaagctggccaggcctggtggctcacttttgtaatcctagcactttgggaggctgaggagggcggatcacaaggtgaggagtttgagaccagtctggccaacatggtgaaaccccatctctactaaaaatacaaaaattagctgggcgtaatggtgggcacctgtaatcccagctactcagaaggctgaggcaggagaatcacttgaaaccagaaggcggaggttgcagtgagccaagatcacgccactgcacttcagcctgggtgaaagagcaaaactccatctcaaaaaaaaaaaaaaaaaagaatcatcaggaagcttttaaaatacatgaatgattatacccccagcccccagagattctgatttcatcagtctgaggaggagctcggcactcaatttttttttaagtaccttaagtgattctaagatgaaactagggttgagaatcgctgatctaagcaaaacttctcatttatagactgaaattcagatacagaaatatttcatcactttagggcagaagaaaaacaaaaatcagcattcaacaccagagttaaaatggtatacctaccactttgccccaaagcagcaatattgagatggcacaaaaaagtaaatagtaatgtttaatgtgaaatgattatatttgcatataaacagcatatccaatccttcatcatcttagaaataactaaacatagtacctagtgagcaagaatagttatttgagttgataagaaccaagattgcattagtaataaaattcatctgtgagtcacatcatgaattaaaaagttaatttcaaagtacatttcttgtagcttcctttgtgtaccaaaattgctagatctaccactgattctcaacccagtgctctttttccatattctacatattctactttttcaaaatttacattctgaaaaagaaaagttaagacttgtagttcataacaccagatctctacttactaagagacattcaaactgatattacagagaaaatatttcagtgtatgcccatgtatctctggcttcagctcttgcttctaatataattttcacttagtattaatataaaagtacaggttattatattgaatacatttaaataatattttttaaaacgatacaatttttcagaaaacactgtatcaagtaagcaataaatgcagcacacattaagtcaccaacgtcactttatatggatccctttgggctgaaatcagatttctagtttggtacggtttcattttgatttgttctcattgaatttgttgcaaccaatattgtgccttgaaataagtaggaaatattttcttaatgttgaacatactcagaatatgctgtcaacaaaaacaaaattatcttatagaactgagtaaagacttggtattggctagtatatagagtggcacataggtagcacagtacaatgattaacaacatgaactctgaagacaccacctgggcttgaatcctgattcgaccatctactagctatgtgtttttcagcaagttgcttaatctctctgagcctaggtttcttcttcggtaaaatggtaattgttacttacatttgggataggaattaattaaatgagttaacatgcataaagcacatagaagggtacttggtatttagcaagtgattattactgtattttataaatgcatacacatgttttagtaggtacacatggagataaagaaaaggctaagtatcatgttaaacaaattaagttctggccaggcacagtgatgcacacctgtagtcccagctactcaggaggctgaggtggaagtatcacttcagcctgggacgtcgaggatacagtgagccatgatcatgccaccgcactccagccaaggtaacagagcaagaccctgtcacatacacacacacacacacacacacacacacacatacacacacacacacacacaaattctatatttttttctcaaagtaaaaacttgcaatgttgtatttactttatgacttgatatagttttgtttgcaaatttaagatctagaagatatgaaatgtattctacttcatagcatcacataattatgaaaaatcaaattccatatattctcaatcaccactattaatcttaatgacaaactccacataaagtaaatctctcaaaatagaatagccatgccctttaacccttggaaatcacagcagtttactcgactgcaaatagagagctactgcaactaggaactggccaagtttattaaaatgtctaacatatcctaaattacaagacataattcctatttactttacctcctttgctaccaagcttgcatcttagtgtgatttctttctcatgaacttaaatccaactagctaaaagtggcaatctgtttgatcactgaagccagtctctatatttcagctcacgtgctccataaattacatgcaatatttgaccctgttaataacttcttgccattcctttggcttccttgactttgaactctactggttctcttcttcctcctcctcctttttttctactctcccactgactgcttctaaaagtagacattttccaaaaaatagggtacaatatatggatacttcctcaggttctctcctcaggtccctcctcttacttctgactctcctcatcaagaaataacctctatccccacaggctggaatccctcatttgttacctagggcaccaggcaatcaccttttacccactaagtgaaccaaccagaccaaaatagcaatgcaaaggctttgaaaactatattgtcagctgagcacggtggctcatgcctgtaatcttagcactttgggaggccaaggtgggaggatcacctgagaacaggagtccgagaccagcctggccaacatggtgaaacccggtctctactaaaaatacaaaaattagctaggtgtggtggtacgcacctgtagtcccagctactcaagaggccgaggcaggagaattgcttgaacctggaaggcagaggttgcagtgagctgaaatcgtaccactccacttcagtctgggcaacaaagtgagactctatctcaaaaacaacaacaacaacaacaacaaaaaaccaaagcaaaactgtctgggtgtggtggcacatgcctgtaatcccagcactttgggaggccgaggtaggcagattgcctgaggtcaggagttcaagaccagcctgaccaatatggtgaaaccctgtctctactaaaaatacaaaagttagccaggtgtggtggcaggcgcctgtagagaggagaagcacttggacctgggaggcagaggttgcagtgagccaagattgtgtcattgcattctcgcctgggtgacagagtgagactccatctcaaaagaaaaaaaaaaatactatattgtcatcagtatcacaagacacaaaagtaggccagggcctgtttactaaacctgaacagggtgattacctgctaaattgaagatttaagttacaatttattatttaatgtaatagctaaaatgtccagaatataatcaaaaatcgcttgtaatactaaaaacaagaaaaattacagcttgaatacaaaaagataatccacagatgccaacactgagatgattgcagtttcaaacattggaaaagaatttcaaagttgccatcattaaaaaaaaaatgcctcaacaaacaattacagatggccttgaaacaaatgaagaaatggaaactatcatcaaagaaataaatataagatacaaaaaggaaccaaatggaaaccatagaactagaaaatgtaataacttgaacaacaaaaaaactggaagggcttaatagcagaataaatatgacagagggaagaatcagtgaacttaaagacagagcaatataattcactcgctctgaagacagaaaataaacaaaaataaataactaaacaaagcctcaggaacaaatggcataataaaatatccaacattcatgtcatcggtccaaggaaaagataaataaagggaacaggagctggaaaaaaaatgtttgaagaaataaaagctgaaatatcctacatttgacaaagacataaactaacatagtcaagtagctgagtgaaacccaaacaggaataacccagagaaactcacatcaaagtacatcataattaaacttctgaaaactagacaaagaaacaagtcgtaaaaggaatcagacagaaatgatctagagttaaaaacagttccagtgacagcagatttttcatgtgaaaccatggaagtcaaaaggaagtgacattttctcaagtgctgaatgaaaacacctatcaaccctaaattcaataaattcaatgtattgcaaaaatattcagaaatgaaggagggaataagacattctcatacaaagggaaatcagcagatgtgtgccccgcacacctactcttaatggctaaaagaaccctctgaacaagaaggaaataatcacagcaaaaggcttggaactgcagagaggaaggaagaaaaatggattcagtataaataaataaattaaataatagactatctttctccacatgatgattgaatcaaaaattgtaagtctgtttgatgtgatgttcaatgtatgtagagaagtactcaagacaattgtactttaaaagtgggaagggaaaaaggatctgaaaggaagtaaagtttctacacctcacttgacatagtaaaatgtcaataccattagactgtggtaagttatgtatgtgtattatagtacctggagcaaccattaagaaaactaagcaagtgagactataaatcaatcaaatggaatcctaaaaatgtcatgtaaccaagaggaaggtgtaaagcaagaaaaaaaagataaagggataaaaacagaaagaacaaaaaaaaaaaaagaaataatggcatgtttaagtcatatcaataatttacctacacgcactaattaaagacacatgggcagaatgaattttttaaattataattcaacaatatgctgtttataagaaactcatttccaatataacaacacagataagttgaaatgagaatgatggaaaagatatactatgccataggaagaatagctacattaagtatcagataaagtgaatttcagagcaaagaaatttgctagtgacagagacattaacaatgataaaaggatccatcccaccaagaaaataatgatcctaaatgtgtgcacaccaatttcacctatgatgtctatgccaataatttaaacattcatttttccaagctctttcttgaatgtctgattgatgttaaacgtatcactttgtcttcctttgccttttctttttcccatcccaatgctctctgagttcccatttaacagtatgttttttccagctacccagattgaaacatcaatcatttttatgaaatcccaatgtttcttatgtagaatccctcagttgtttctaatgtggtgactctaccctagtcaggctttcatttcacactacttcataactggtttctattcttttcaatccagattaacaaacctaaagtactagaaggcctccaaaagaaaatctaaacacctagtcccgattcacaaggttttccaagctttactcacaaactctcactgctccctttgctctggtccagctggatctcgttggtttctaacaatgcctccatgcttttctatccttgtagttcactggctagaattcctttcttccatctccagctgaaaacacactagcctttcttcaaggctctcctccaataccatctcctccatcatgaaggcagtatttgagctggcactgggcatgaaaggccatactcctcatcaagaataatctcttttttcttttaaatcttggtaaaatattgtaccttttctatggtacttagcatattctgctctgcctctattgacttataccttgacttctgcctcctaaattgtaagttactgaagacaccagtggcatcttctgcatttttgtaccctgcaacaattactctccccagtgccaagaaatgtgtcttgtaaatattaaaggtttaataaatatttggtgaccaatttaagagccaacactatctcttcatcaaaatatcccttctctctttcatcgcagctttgaattcttatctttcaaatttttcagatctttcaaactgttattattagttaaactcattacttgtcctagaacataaatgccttcacatacaaaaaaaaccttttatatcacataaagcaaaatgtgagcacataaatgcaattatgatatgtatatgcacttgtatatgtatatagcctctagatgtgagttatatgtatataacctttagatgtgtgtttatatttccaatgtttttaccaaaaaatagaaccttgagttaaatttcataaaagttgacatggaaattttgaattaggagattaaatatgtctttaaaataactaaattacattttcttggtcttttgactatgaaatagtttaccctagcaacatgaaaaacaagagacctaagctattagaagaaatgcaattctatgtatcttgtgtgtatagtttttccctggtggttttcaacgaccagtgactccttagctggtttcctcagctgctagcacttgctctgggtacttgtcctcaacacgtccatctgcaacaatgtgtgcctaggaaataaactcaacttactactcacccaaccaaaatgtaattttttaaacgcagcacacactgggtggattccaaagtcatgattatgctttactatgcactctgtactattcagaccactactctcattcattactgcaattaactgcacacataactattttttattgctaattatacaccactgatttccactttaaaaaaacattagcatttgtctctaattaaatatttactgcttgtgttttacagacccgatatcaggttcttctttagactgggcttatgacctgggcatcaaacacacatttgcctttgagctccgagataaaggcaaatttggttttctccttccagaatcccggataaagccaacgtgcagagagaccatgctagctgtcaaatttattgccaagtatatcctcaagcatacttcctaaagaactgccctctgtttggaataagccaattaatccttttttgtgcctttcatcagaaagtcaatcttcagttatccccaaatgcagcttctatttcacctgaatccttctcttgctcatttaagtcccatgttactgctgtttgcttttacttactttcagtagcaccataacgaagtagctttaagtgaaaccttttaactacctttctttgctccaagtgaagtttggacccagcagaaagcattattttgaaaggtgatatacagtggggcacagaaaacaaatgaaaaccttcagtttctcacagattttcaccatgtggcttcatcaatttatgtgctaatacaataaaataaaatgcacttaatgctttaaaattcatctttttatgataaactatattctctgtatttctctatagcattaataatcaatattaatgccattcattcagtctgttaataagaaataatatcttcaattttc

SEQ ID NO: 249 - DNA, 4481 bp, Homo sapiens
ctcagacaccgtgtcctcttgcctgggagaggggaagcagatctgaggacatctctgtgccaggccagaaaccgcccacctgcaggtgaggcccggacccctgcccaggtatgggcagatggccgtttcctccaccttccgccaccttcctgaaatgtggtgccaggggcagcttggtgtgtgaggggaaggagggttcccactcctgctgggccccggggcctgggctgaagaaaaggccccaccatccatccatggtgaggctcctgggggaggaaggaaggcgagctcccgagggctgaggaggacgggccctggggaatgagagggttgggggcaggtgaggggctggcggggacagctcagctctctccctcccagttccttctccgggatggacgtggggcccagctccctgccccaccttgggctgaagctgctgctgctcctgctgctgctgcccctcaggggccaagccaacacaggctgctacgggatcccagggatgcccggcctgcccggggcaccagggaaggatgggtacgacggactgccggggcccaagggggagccaggtgagtctgctggcctggtttgggggtttgggtctggggcagggatcagagtgtctgtctggggctgaccaagggggcgggggacagcaggaagtgcttgccttgctgccacgcctgccccagggcagaggtggactctcacggtgtgtctggctcctctatcctcagagcccaggcttcaggccaccccagaggtgaccttgggcccagcgcacttccatcttccttctcctccttacccgattatagggagggaataagagcgcctgcccccaaaggtggccaggaggctcacaggagacagtgcagggaaagtcttcttgccctgcaacatgggcacctggggaagctggggcccacacagtgaatatatccaatgcacgactgccagggttcaaatcccagcccctactgattccctctatgtgaacccgcacaagttacttaacctcgcagtgcctcagtttcctcatctgtaaaacgaggagatggtagcacctgcttcacaaggttgctgtgaggattaagttaacttaaatataaaacagccctgagcacctgggaggtctatacaggtgtaggctattttatcattggttttatcagatatccatgctcacctccctccttaggattctggatagttggaggggtggggagtaggaggtcaggatcgcagccagagaaacttctgttggaggtccacaggcaatccttggcataagagaagggggctgaggctatgaatgggtgactggggctggaactggagccctggggggtatgagtgccttgtctgtgagtgagctgggcacgtctcagatgctaggcatgcctggagccggcctggggtgacactgagcggaggtgatggggtgacagaggcagtggaaaggagggaggccagttgagaggaatgtccttaggagtggtcccaccatcatcttccctcctggatagagggaatggcaccaacattccagaaggaattctccaatttagggtgagcttagggtgagctcaaagctcaatgaggcctccaggtctgccattttccaggagcttgtacttcacagctgcctctgaccacctccctgcccagggtagctgatggccacccgtgattgagcccccaagtcccaggtgtggtctcagttttaggaaatgataaaaccgaggccacaatcccttgaaaaagtgattgaccctcattttgcaaatgtcaaagctggggttcagagagattgagcaacttgtccaaagtcacacagtgggatcctgtccaactctcaagtccacattctccaccactgccctcagctgcctctcaagtcccctctgtattgctgtttcctggccccctctcaattggtggtttgaagacatcacgaaggatgagacgctgctctgctcagcatcactggcagccatcacgaggaccagacactccagagcacgcttcctatggtgtgcctggcacagtgcctgtcccactccaccctttcagggactccctcttctattatgcccgtatctcaactgagcaaatacaggctcagggagggaggtcacccacccagggtcacagatgtgaaggccaggtctgctgggtcccgaccccacactcctaatgctgaggcctaagaggttcataagccatagaggatctgtcataaatgggtctgcacagtcacccagcctgacggaagtcagaggaggaaaggaaacatgagggctgatgggagcggtcaaggagggcttcttggaagaagaaactggagtcagcccttaaaagatgagtatgatttagataaggggagaagaatctcacagaggctcagatcatcagggctggaacagagtgagacactgggattctccagacttgagttagagacctgactccacctcaaactggctgcacggccttgggcaagtctctaactcggcttcctcatcggcaacatgagggaagttgaaccaggccagctgtcatgggggctgacgtgggctgaatggggctggggtgagctggagagagcaggccctgcagtggggcggcttctattcggctccttccagtggttcccatgtgctaacctggggaatccatctcaggagcagatataggttttgtgggactctgaagcttgtaaaatgttgagggtcttctttatgaaaaataatacaaactgaaagatgcgcttgattgcagaggtgagagtggttacaaaaatttacacatgtagcaaaattatattggaaccacacacacagtgtatataaaactggtgaagtctacataagctttgtgaattctaggaatgtcagcttcctggttttgacattatactttagtcatacaagctgtgtcactggggaaaactgggtgaagagtccctgttcttttgtttcttcaactttctttgactctatatttcaaaataaaaaagttgaaaaaaatcagaaatacaaaattaggcaaaaggtcttgaaggggctgatgcaagtggacagaacctgaaacttaagctgcctctgaccaaccttctgattttttgtcaagaaggtctgagaatttcaaattttaaataagttctgaatttgttcatgttgggctccaattaaaaattttaaaaaacattgtgcaggccaaacaagatacttgtggccacatgccatctgtccgtgggctgacagtcatggcatctgtgatcccgcccagctctgagctccctacttgcttcatcacaaatgtggaaactgaggccaagagacagggaagtgccttagacaaggtcagagggcaggtcagtggagaagcaggacttgaaccagactctctctctcccctccagccaaagcctaactccctgcaccctgctcctagggagatagcccatctatgagaaggagattctagagaccaaatgccagcgctgtgttccctggaagacaccctcagggtccctcctccctgtcccccaccctatcactttctctctgccttctccatctccaggaatcccagccattcccgggatccgaggacccaaagggcagaagggagaacccggcttacccggccatcctgggaaaaatggccccatgggaccccctgggatgccaggggtgcccggccccatgggcatccctggagagccaggtgaggagggcagatacaagcagaaattccagtcagtgttcacggtcactcggcagacccaccagccccctgcacccaacagcctgatcagattcaacgcggtcctcaccaacccgcagggagattatgacacgagcactggcaagttcacctgcaaagtccccggcctctactactttgtctaccacgcgtcgcatacagccaacctgtgcgtgctgctgtaccgcagcggcgtcaaagtggtcaccttctgtggccacacgtccaaaaccaatcaggtcaactcgggcggtgtgctgctgaggttgcaggtgggcgaggaggtgtggctggctgtcaatgactactacgacatggtgggcatccagggctctgacagcgtcttctccggcttcctgctcttccccgactagggcgggcagatgcgctcgagccccacgggccttccacctccctcagcttcctgcatggacccaccttactggccagtctgcatccttgcctagaccattctccccaccagatggacttctcctccagggagcccaccctgacccacccccactgcaccccctccccatgggttctctccttcctctgaacttctttaggagtcactgcttgtgtggttcctgggacacttaaccaatgccttctggtactgccattcttttttttttttttttcaagtattggaaggggtggggagatatataaataaatcatgaaatcaatacata

SEQ ID NO: 250 - DNA, 2943 bp, Homo sapiens
ataaatggggaggggagagcccactgggtagaaggaacagggagcggccagggtaagtccccactctcagagaccctgacatcagcgtcacctggagcagagtggcccagcctcagactcagagcaccaagacccaggcctgcaggcctggacccaccccggtccccccgtcccagctccattcttcaccccacaatctgtagcccccagccctgccctgtgaggcccggccaggcccacgatgctcctccttgctccccagatgctgaatctgctgctgctggcgctgcccgtcctggcgagccgcgcctacgcggcccctggtgagtcccagccggggtccaccctgcccctcaccacattccacaggtcagggcctgggtgggttctggggaggtcgggctggcccccacacagggaagggctgggcccaggcctggggctgcttcctggtcctgacctggcacctgccccagccccaggccaggccctgcagcgagtgggcatcgttgggggtcaggaggcccccaggagcaagtggccctggcaggtgagcctgagagtccgcgaccgatactggatgcacttctgcgggggctccctcatccacccccagtgggtgctgaccgcagcgcactgcgtgggaccgtgagtctcccggggcctggaagggtggggaagggctggatgtgagccctggctcccgggtgctcctgggggctgcccagggccctgagtgggatcctccgctgcccagggacgtcaaggatctggccgccctcagggtgcaactgcgggagcagcacctctactaccaggaccagctgctgccggtcagcaggatcatcgtgcacccacagttctacaccgcccagatcggagcggacatcgccctgctggagctggaggagccggtgaacgtctccagccacgtccacacggtcaccctgccccctgcctcagagaccttcccccccggggatgccgtgctgggtcactggctggggcgatgtggacaatgatggtgggtctggggacagtggaggtggggccagggtcttagccacagcccagcccctgggctccctctgggctccaggtgggggttgcccggccccctcctgaggctgcaccctcttccccacctgcagagcgcctcccaccgccatttcctctgaagcaggtgaaggtccccataatggaaaaccacatttgtgacgcaaaataccaccttggcgcctacacgggagacgacgtccgcatcgtccgtgacgacatgctgtgtgccgggaacacccggagggactcatgccaggtgggccccgcctgtcccccgccccccgccccccaacccccactcccaggcctgttcggcgagcgctgacctctgaccttcccagggcgactccggagggcccctggtgtgcaaggtgaatggcacctggctgcaggcgggcgtggtcagctggggcgagggctgtgcccagcccaaccggcctggcatctacacccgtgtcacctactacttggactggatccaccactatgtccccaaaaagccgtgagtcaggcctggggtgtccacctgggtcactggagagccagcccctcctgttcaaaacaccactgcttcctacccaggtggcgactgccccccacaccttccctgccccgtcctgagtgccccttcctgtcctaagccccctgctctcttctgagccccttcccctgtcctgaggacccttccccatcctgagcccccttccctgtcctaagcctgacgcctgcaccgggccctccggccctcccctgcccaggcagctggtggtgggcgctaatcctcctgagtgctggacctcattaaagtgcatggaaatcactggtgtgcatcgctgtgtttctggttgtggatgtcactgggagagaaggggtccaggtgtgctgaggacacctgccacagtgtgaggtcctagccctcaaggcacagccagtcaccgtgggacggggcctcctgggcagccctggtccccgaggctggcttctccccacacgatgcatccagcattcgggtcacacagagccactcgggcaactcagttgattataaaggacagccaggtccctgcaaccgggtcaagacagagaatggtcaccgggagccccagggctgcccatcacgagcccctaccccacgcttcccacgagctcttctcccggcccctccgtccactgcttgtgctttgcctagttgtttgctttgagacgggatctcgctgtgtcatccaggctgaagtgcagtggtgtgatcagggctcactgcagccttaactcctgggctcaagcgatcctcccatcttggcctcccatatagctgggccacaggagtgagccaccacgcccagttaatttttgtattttcagtagagatggggtttcgccatgttggccagtctggtctcgaactcctgacctcaagtgatccgcccgcctcggcctcccaaagtgctgggatgacaggcgtgagccaccgcacccggcctgagtttgacattttcaaattcattttgaggtctttctctacatcaataggtgagccctctgcgtctggcgagtgttgcattttatcccgggctcttgtttgcattttatatttgaacatgattacactcaggaatgaaatgcggggctgttctggttgaaaacaactctctaaagaaacattcactctttccttccaactgttagatgcagagatgtgcatttagtctcccgaatctctgcaaatgacctctgtcctcacaaggggtggactcaactcccagtgccctctccagccccacgtgacctctgcctctgcagcccctgaaggcccatccctcggctcctgttctgcaggcccagcgtcttgttaatgaagatggacctggaactcgggcccttctt

SEQ ID NO: 251 - DNA, 110066 bp, Homo sapiens
gtcgccgccgccgccggccgcccgccggccgccacgaccccagtccccggcgggcgggcggaggaggcgaccgccgcgcgctgctgcactcatcctgccgccgccgcgatgcgcagaggggccgagccgcctgggggccgccgccgccgccgcgccgcaccatgaagctccgcagcaaggcggcggcgctgctcttgctcgcgctggccgcgctgctgctggcgctgctgtccctgcgcgctggccgcgctgagcccccagcgctgcccgcgcgccccgcgtccgccccgcagcgccaccccgcgcctgtccccgcgcgctggccggggccgggcgccctccccggggccagcccgggagttcggaggcgccggcccccgcgtccgcgcccccgagcgggccgccggggcgctgcgagactggagaagttggcgaggtgagtcgtggcaaccccagaatcccatctgcggacccgtgtctcgctccctacacccgtgccaagtccaagggaggctttgcgctggagagacagatttccaagtttcacccacgggctgcccacttctgtttcttaacccgatagaaaagaagacccaccttggtggagtccccctaacagctcggtgttgataatcacgtacattttttgaagtgtcaaggaaagtggtttcgtacattacattttttaactgtcaaggcaaggcgtatttttgcactcttgcaaacatgcaccctttgtttaatttgtcaaaagccatcacggtgcaagaatgttttatctaattctcatgtttcactggagaattttaccgaaaccttagatatggttgagttggaaaagttagatgtttaccaaggactggcagcctctcatttaacctcgagtacccccatgcttagaacagaagggacacttgacctaagtttattaaaaagaagttttctccttgaaaggactgatgcgtggcacagaaaagacagagtgggggtttccagatcctcattctgtttcaggctcgagtgtggtcaaagggtcctcctacaagaaaaacaacttaaccttcgaccttctgtttgatactctctttccctacacaaagcctaacacgcggaggcttttcatcagagagctttatttttggcctcagggttgctggaacgccccgcaggttagggatttgagttcatttcctttgttgtggagggcttttcaacaatccccttgtcttgtagcgagtctgtttcatctgccctttcaaaactgttgtttctaactgccattgcaacgtccttgtttgctgggctccttaatttcaacctgaaaggagttgaaaaattatttttgaccataatgactaaatctctttggtgcctttactgtaactaaaagacacgaaacctcaagaagtagctgtgtcagcctttgtttcccttctgtctcagtacaaatgggtactgacaagttttagggggaaaaaaccccaacaatctgtcgctttaaagtacttataacactttacagccctttctggatgtatacagtctttaaggatatctttgttaggaaattaataggatttcccctcttctatactggagtttcttgtaagagattaattagggtttaactgcaagtttaatatgattgctaagtttgatgggacaactggtaagataataataactgtcatccttaacatcgctaacctattgccagggacagtgctaaccgcagtacatacaaatagtcacagttaacacttaacatatacaactacataatccacaccataaccttcccccccaccgctgtttttcttttggttttttttttgttttttttttttttttgtgacaaagtcttcctctgtcgcccaggctggagtgccgtgctgcgatctctgctcactgcaaccgctgcctcccgggttcaggcctcccagattcaagtgattcttgtgcctcagcctgccaggtagctggcaaacaggcgtgtgccaccatgcccagctgatttttgtatttttagtagagagacggggtttcaccatattggccaggaactcctgagcccagtgatccatctgcctcagcctttcccaaagtgctaggattacaggcgtgagccaccgcgccgggcccaaccataaccctttgacagtggttctcaaagtgtggacttcagaccagtggcacaggcatcatctgggaacttgttagaaatgcagattcctgggccccaccccaaccctacagaatcagaagctttggggggtcagcaaccgtgttttaacacgtccctcccattgtttctcatgcacaacaaagtttgagaacctgctctgcaaagtaagcaccaatggtatccccacttttcagatgaggaaagtattgcacaagggttagcagtttgtccaaggttcacaggtaacctggtagagaaggataaagatccaggcagtgtgggctcaggttgagcacttacctgctatgctgatgtcaggccatagacttgcctgcaattcgtaattttactgagatgtcttttaaagaaacactgtagatttttggatctgtctcattcttcaaggtgtcgagaacagtggcgcagcatctttttgtgtctatctgaacaaagtgtctctgactaggaggagatcatgaacagaatccaaatggatgttttagggaaggagtgtttctatttccaggagtaacagtacccttgaagccatttttcttttgaacatatctcttagattatcgtggaaattatggccaacaccataggaatacagaacaaaattttaaaactggggaaggagtaaaaaacaaaagccacaggaagtctcaggctcaaatgcataaacagttgacattttctgggacttatttattgtttctcttgctacctccacagaaatggcaacagaagattctgaagttgtgagggagcaggaggaaagatctctgctcggtctcctttattgctttcctaattctgcttgggttaaatttttgtggtttaggaggaatttcatttagggagggaagagaaagcctcgtgttttcagaaaacgagtgctttaatctctttacatggctagaatccagaagagatgaaggctacgtgatctcatttctctggcctggggagggtcaggcttgtggttgtagttagctgagagcctggagttggatgtgacacagtccaccacctgcttaccatccacagcctgtgctgcctcgcctcccacagggggctgctgtaagtgaaattctgccacgtcaacgcaggaaacatagcactctccttccacatcttgttttcatttcacagaagtttccaaggatttgcctcgttagtaggcagacccttcaattttgtaactagtcatttgtatgcaatctgccctgtggtggcctccttctctataaatataaagccaagaggtaagtaaggtctgagcttttctgtcaaggggggatttgaaaatggacaccattctggaagcagcagtcccagtgcacaaaacaaatgaaatcttccttctattttggcttattggtgatttacagctggctgacttccaaaaagagtctaagacaacgtatagtaaaagacacatatacaataagtccattgaaatggtataaaaaatgaaaagtcataaagaagaggggtaaataaatactgtttgtcaaaaataaacagtacctttgttagtaggattaagtgttcaatttaagcctggcagccatttcaaaaagggaaccatgatgggctgcctcattttcactgaacaagaggaaaggtttatcaagagagatttttttttttcatgaaactgaatgataaaatgagaattgtacttgggaacagattttagacattagaagactctagcttgcttctgaaaactcctccttgagcctacatacagaaaaggaaggttaactgctaatcagtgcaatattgaaaagaatttggcatgtggagtccagcaaattgggttctagtccaaagccatttcaccttattttcttcatctgtgaaatgagcaagttaatccaaaagttgtctaagatatcttccagctcagacatttgatgatcctatgatgagatcatcaagtttagcagcaaaatcccaacaatggttattgcatggccctttgtgctaactcttgcaaaatcactgtttctcatttatgggctccatcctagcgctcttactgattactcaaccgcaaccctgtcctgaactttattctttttttctgtgttggcctggatattgttgtttctcttaaaatatggcttctaagggagacttaagatacctctaagccctgtagttttcctctgccattttattccatagtcattcagcaaacgtgattgcacatttactctgccaggcactcctggtacaatggtgaatggagttgctgccctcccagaatttgagggaaaggagacaatacagaaacacattacacttggcagcctccccagctgctccaatgaaaggaagcatgtgtctcatcaagaggcaccatttcctgcagttccctttagtgtctgagataagtcttctcagagtgttcaaacctgaataaaggtctcgctaaaaagagatggtgttctgtagcaaaatgcttcatctatggccatcctataattagctaatagccccagagcacattaaaggtgtctggatcttgagtaccatctatgatattatgtagtgtgagtcttgattctatccacaattcatttttgttgattggtccatgaatcccctcgatcaccctccacacctactcagtcagtaagccctattggttctgtctcaaaaatatgtccccagttccaccatttccactccatagttacttactgagctcctaaccaccatcattccctagctggacacctgcaggtgcctactctctggtttgtgtgggtccactctagcgccctctacagtccattttccttacggccgcttcaataatctgataggtagaccagatggggtccacctatttgctggttaaagccctccagtgactgacttcctgtcacactaagaataactttaagtttcccagtgtggcctttgagcccttgcctgatctcaactccatttagttttctggcctcctctcctaccactctccattcacttgctctgcttcagccacactgggcttcaaatacaccaagcccattcctgcttcagcagcatgcatctctctgtgctggaatgtttgtgcacatcctaacacggctaactcctccatttttttcaggactatgctcaaatgttttctcctgagaggggtcctgctagccgctcgagtactcctctccatcactctcttcttccttaccctgtgtagtcttttgtttttcacagcactcattgtgtgaatattgtatgttatttgctcctgccccctcatgtacacttaacagtgatctccttaaatcactgtttcactaactcctaaaacagagatagatgatctcatagcagatattcaataaatacttgttgaatgaactaatgaatgggtgcaggacctgcctgtgccagccgtgttccaagatttacttatagtattaagttccttattatctaataatattcaaaatagtcccataccctttcgaagaatagtgagggtctttaatagtaacaccattaaaagagaggaatgtttttccttttaaataggttttattttttattacttttattatttgggtttttttttttgagatagtgtctcactgtgtcaccccaagggagtgtctaagcccaccatcatgatccatgcctttcatagtgtgagcttcttgtatccagtactaagcctgtcaatacattcatttctctgccaacagctattggtccacaggtatgtcatatgacccaaactggcccaatcagccagaaggaaagaacttattttacattattaaacaaaagactccatcttctagatacaaccaaggaaataaatagccccagctgccaccatattcataagggaatcgcctttaggatgaagccatctgtttgggcagtagaaaaagaaaatacaggtccttgaggacactgctgagtcccagaatcaaggcatcctgaggtctaacgtttcttgggccctgtgttggagttgagggttctgttactgcatccaaaatcatcttagctgaactagatggttcttttaaatcaaaatcttgggactattgatggagagaaaggggaatagttgggtgggggcacccaggaagtgagcatccaccacaccctagagcagccgttatgtgcacttgactttatcaaaacctgcgggtgacttaccagaggtaggttcctgagcaaaatcagacttttcttaaggatttttaaaaattgggatcagagactatatggtaaatgtacctgatagcaatagcttgagcatacccttagaatgaccctgcatgccagccgcacctgaatgtgtgttccaacctagggaatcctggagtggccaacccagagagtcagtcttacattcagtgaggaacatctgagccctcgtcctgccccgtggaacacgggctatacaggggattaaggccttgagttttgggttgcatgaagattgccaggtggaggttgttgaggggaggatggcaagtgaaaacgctataatatgtaaactgcacaccttttgcaaacaattgtggttcttctgcccagcccttccccactgggctgtgcagtcatcttgtccaacccactgccactggactgtatgtaaggcggtcctcctgcccagcccattgccactggactctctcccctgtatggaagcccccagtaaaacgccaggtctcgtttgctggctctgggtcttttcttcagcctcttgaacctggtgctttccccattgaggttaataggggtttggcacaacagagggctaagggaacagcgtaagggcaaactgtttctagtggctgaagctttacattatgcaactcagggattgcaactgtatttctgccagtggagaaggctgttctgcaataggagctcatgaaaaccaagatgatatggagagatgagaagtgacgcagagcaacccagatggggtagggcggagtggggtcaggtgggctggtggcggggttggggggcagctcccaacactgttcccaaggccagcttcttgcctttcactggctgtgctgtctcaaccttttctagattctgtgatgtaatgagttcccctttttttcttaatctagtttgacttgcatttgttacttgctaccagagagtcctgactaatttgaatatgtagcacctgcttttaacacctttactaaattcagtaaatattggccatattgacacggttccttttaaaactcacaggtgagagtctttggaagagaatttgagaacagatttgttttccttaggaatacttcatttataattcactgtaaagaaaaaaaagacaaaattttatgttgtatgtattttagcacaattttacaaataataaaaagaaaagagacttctgttgaagatagaattcatttattcattttatgtttcccttaaatattccccagcatttatttcaaattatgaagttccgaaaactcctcttggaaaaagaagttttttgacatgataccttcattgggagttgctgattttgtgccagaaaagagtaaccttgatatatttcaagtgacttttagatgatcccccatctcttttagcaacatgagagactgtaatctcatatggtacaatttataatccaagctttacataagacaatagagaatacataatccaaaatatggctctcttttatgagtcagaaaactgagatccgagaggtgaaataataatgtacataaagcacctagcacagtagattagctcataggagtcaccaaatgatttgctgttctgggtactattattatccatcattgcattaggaattgagccataactagacccagctaagtacccgcgtgactttgaacaagtcggtcctcagcaaattgtggctttctcagaaataagctcagtgacaaaatgagacaatgcaggtaaagtgctgacaccgaacatgccacaccagaaactcccagcaagtgttagcaagggctaagctacagattcaaggctgggcctggtggctcatgcctgtaatcccagcactttgggaggctgaggcaggaggattggttgagcccaggagttagagaccaccctaggcaatatagtgagacacccatctctatttcagttttatatcttttaaaaaagatgcagattcaagcagccttttcttgtgggggtaggtatgacttgaggaaactgagactcagcttctatatataataaaggatacaccaatctcagtctcctggtactcattaaaagctgaaggagtgtggccaggcgcggtggcttaagactgtaatcccagcactttgggaggctgaggcgggcagatcgcttgagatcaggagttcgagaccatcctggccaatatggtgaaacctggtctctaccaaaaatacaaaaattagccgggcatggtggcaggtgcctgtaatcccagctactctggaggctgaggcaagagatattgcttgaacccgggaggcagaggttgcagtgagccgagatagcgccactgcactccagcctgagtgacagagtgagaccttgtctcacattaaaaaaaaaaaaatgtttactagcagttcaaatccgttttgtagtaaggtagaatgttgacacataaaataacatgctttttgctgccctgcctagcctggttttggcatggatataacatatttagagaaaaatgaaggcttttgatgaatgtcatgttaatagtaataatgatgatgataactaatattgaatgatgacttaaaatatgccacgtaccttattaagcacttcactgcattatttcacttaatcttcataataacctaggaggtaggaactcatattggatagggcagaactctttcagttgcacgtgatagaataccagctcatctgtttgtatcacttagtcataaaaggggttttaactggctcataaaactggaaagtgcaaagagataaagcttcagtcgcaagtgaagccaggatttctaacaatcttgcctccttttagctctgcttccttctgtgtgggtgacactctcaggtaaattttctccatgtaacaattcccaataggtctgggtgtgcaacctcctcttctggtagcccctaagggaaaaattccatccagcaaaagtcccagggctgcctctgttgacctcacttgaataacatgtgtttccaatcaccgatggctacaagtgaaatgtgcttacagctggtggggtgaggggcagctcattcatcccctccaagcctcatggactgagaacagaaaaagagtggtgtccccaaaataaaattaagatgcttttaccaaaaagtcctaaaaatggatgccagtaagaaaccccaaaacccaaagcagatgtccattatcagtggtatgcccattttacagatgaggaaactgagggctaaaggtggttaaagcacttgcccaagataggacagtcaagtggcaggcctagaatttgaagccaggtccatgtgcttttacagcaaaattgctaaccaccatgctgtagctgagaacaaatctcacaatttgaaccatttgatagctttctagaacctctctagttttttgttagaacctctctagttttttgtaattgttcagatttgtaaggaaaaaagcaaggtatgaaaattatcctacttcaagtttaaaagtttttatatatttacatatttatatacacacacccacatatattgggtataactctggaagacagtataccaaaattttaacagtagttatgaaattggaattgagtgcccctcatttttgctagtggtatttaaaattttttctatgatatatgcactacttgtatatgcattaagcaatttaaagtatataaattaccataaaaattaaaaatcccttgatggcctgaggcttaggaagctggaaattagttggggagaccatttttcttcgtttcccccctctaagctttaaagtctttcatgttctttttcaggaaatgagacagaaatgcccctttgtgaaatatgtaatcctcatctaattcttctccctcgtatgtcaacagccatttatttcaaactagcgctgcagattcatattttaaaatctcaataacatgttaatttggaaagaagaaggagatggagaaatagaatctcctatatgtcaggaacaatcataagggaaaaaatgaaatgagaatagtccaggtgccttcatagaattctggagggggaataaatcaacacaaatgtgaataacctctgcgaatggcagatggggtgggttaggaaggtagagttggcaaaggtctgttgtggagatcgttccctgcacccgagcacccggggaggcatgggagactgaaatccagtccatgccaggagccttgcgtaggggcttcatctgctcagagagggctctttttcttttcttttctttttttttcagatggagtttcattcttgttgcccacgctggagtgtaatggtgcgatctcagctcactgcaacctccgccttccgggttaaagtgattctcctgcctaagcctcctgaggagctaggactacaggcatgtgccaccatgcccggctaattttgtatttttagtagagacagggtttcaccatgttggtcaggctggtcttgaactcccgacctcaggtgatccgcctgccttggcctcccaaagtgctgggattacagacgtgagccaccgcgcccggccagagagggctctttttctaacttacttgtatgtggttccaaatacaacataaagattaaaggcatggcctcttaagtccccctctctgggtttgaatccttgctgtgacacttactagttttaaagcttatgtatgtgcacgatgatgtctaaaagcaaacacacacacgtatacacatagctgtaattaccaactttaggctctgaacacctcccatgcgttagacctagactttgtttaagaatacagcctcatttcagatatcatgagccaagctaaatatgtactattaataactaaatgcatttatcaaataatgtcatgaagcccccttcatggagttttttggcactctcttggcattattcatgtaacaccatgacttcaaggcaaatgccagctcttctatcttgaaagatttatgatatttgatttaactcgaaaccatgggtcattaaaagtgatttaactgttagcaaagtccttagtgtcatgtgtgggttctgagcgaagagtctaatcatgacgtcaagggagaaaatttttgtcgggattcatgctttccaaagcctgtggtttgcagggaactttagtagtaactctcaactgccaacacttgacatggctataattatccatcgccggactcttcttctaggggccatatcaaggtgttgtttctgcttcctgaactgccactctctcctcatttgcagactttctccttgttaaaatagcaaaaacggtttcatcttgcaaaatactccactagggagggggacatcactaatctattcttcccataaggtgagggtattcagcttcttaaaattcatcttctaccatttttcccccacatatttctgtttccttctgtaagtaaaactagtggccaacagcatgggttagggctgtatttgaaagaagtgcgattttccatccaacttaccctgctagtctgtatggcagcctcaggttcacctgagttaatttagcttgacagttcaggagaagcgctgataagagaagtagcaggagatggcagaaaagagggtctgagtagaaccaattactcactttaataattcagtgtgttttgcagtaataggctacaaagtaaatagcactacacataaatgccgtatttcattatttatacactccagaaattgaagtttaattaagtcgcacgtttgagacttttaagcgattaaggagacgcttgtctcaggcaccctggagaggaagcatggaagttgcttctccctcctaggcttctgtgttattctgaatatcatttttcatttgagcatggggaacacttgagccaggacaactagggcaacgttttacaaacttcactcattcccacatggcatcacaattttattttttttttgagacggagtttcactcttgttgcccaggctggaatgcaaatggcacaatctcggctcactgcaacctccacctccccagttcaagcgattctcctgcctcagccttccaagtagctgggattacaagcacccgcaaccacacccagctacttctttttgtgtttttagtagagaccaggtttcaccatgttggccagtctggtctcaaactcctgacctcaggtgatccacccgcctcggcctcccaaagtgctgggaatacaggcatgagttaccacacccagcccacaattcttataatattgctatactaccattacctgctttaaaaatttttacgacatctatccatgttataaatgttaagtgcattaatgtatttatttatttaataactttattgcagtttaactcaagtacattttaaaagtatacaattcggcccaggtacggtggctcacgcctgtaatcccagcactttgggaggccaaggtgggtagatcatgaggtcaggagttcaagaccagcctggccaacatggtgcaaccccatctctactaaaaatacaaaaaattggccgggtatggtggctcacccctgtaatcccagcactttgggaggctgaggtgggcagatcacctgaggtcaggagttcaagaccagcctgatcaatatgatgaaaccccgtctctattaaaaatacaaaaattagctaggcgtggtggcaggtgcctgtagtcccagctattcaggaggctgagacaggagaattgcttgaacctggaaagcggaggttgcagtgaggtgagatcatgccactgtactccagcctgggtgacagatctagactctgtctcaaaaaaaaaaaaaaaaacaattagctgggcattgtggcacatgcctgtaatctcagctagtcaggaggctgaggcaggagaattgcttgaactgggacccgagaggcagaggttgcagtaagccaagatcgcaccactgcactccagcctgggctacagagcaagactttgcatcaaaagaaaaaaaaaaagtatactattccatcgtttttagtttattcaaataattgttccatcatcaccatagaatttcagaacattttcgcttttttttttttttttttttttttgagacagagtctcactctgtcgcccaggctggagtgcagtggcatgatctcagctcactgcaagctccgcctcctgggttcaagcaattctcctgcctcagccacacgagtagctgggattacaggcatgcaccaccacacctagctaatttgtatatttttagtagagatggggtttctccatgttggtcaggctggtctcaaactactgacctcaagtgatccgcccgcctcagcctcccaaagtgctgggattacaggggtgagccaccgcacccagcctcattaatctacttcctgtctctgtggctttgcctattttggacttttcatatatgtggaatcataaaatatgtggctttttacattgtcattatgttcacaggtttactgttttcaaggttcatttatgttgtagcatgcatcgttatcatacttgattcctttttattgccaaatactattccattgtatggatataccatatttgatgtatcagtttaccagttgatggacatttaagttggactttttggctattgggaataatgctgctatttgaacatttgtgtacaaccttttatgtggacacatgttttcaattcctgtaggtatataactagaaaaggaacttctgggtcatatggtaccttctatatttaacattctcaggaactaccaaactgttttccaaagtggctgtaccagtttctaatcccaccagcaatgtttgaggatcctagtttctccacatcctaagtacatttatttttaaaagaaactttatatcagaaagccagaaattgtcagtgataacataaatagaagataattgtcaaatcaaacactaagaacactgaatgttgtcatttttagcttggtattctttcctgctgaaggttacagtgtcttttcaattgaaagggaggattagataatatcagaaaagtgttcaagacatgtaagcagcaagctgagccgagtgcagtggctcacgcctgtaatcccaatactttgataggccaaggtgggaggatcatttgagcccaggagttcagtctgggcaatatagtgagatcccatctctaccaaaataaataaataaataaataaaataaataagaaaggccaggtgcggtggctcatgcctgtacttccaggcatggtggctcatgcctgtaatcccagcactttgggaggccaaggcaggaggatcacgaggtcaggagtttgagaccagcctggccaagatgatgaaaccccatctctactaaaaatacaaaaattagctgggtgtggtggtgggcacctgtaatcccagctactcgggaggctgaggcaggagaatcgtttgaacctgggagatagagttgcagtgagctgggatcacaccattgcactccagcctttgccacagggtgagactccgtctcaaaaaacaaaacaaaacaaaaaataataggaaaatattaaaattcttaaaaagcatcaagctgagactttattgttgttggtgttgttgaaaaagcactgaaaatggaatagctttctccctgtgtgactcagtgttatttgctgcattggagtctcaatgtttactagcacctatgcatcaccccattggaatacatggaattaggaggcaataggtcttacgcaagaccatttccacttacataatacaagtaatccagagatggctagggtagtgtttgttacgctttttgttttcttctcatagtctgatgctttcctttagaacttgggtaaacttgagaaactatcaaaattgctactttcttgaaaggatcatagatattaacccagtaattccatttctgggaatgtaagtcttaaggaaaggaggagaggtgagatttgagctcagatccctggttcctgaccatagctgaactatgggtggtgtgtagtacaagtgtgttaatatgcagactccagggcctcacccaagacccatggaatcagaatctctgtgagttgggagtctgcaaaataacaaacactgcagatgattatgatgcatggccaggtagggaatcccctgccctacatggtgtttggcatctcttccagccacaaaactggaagaatggtcaggatttgggtaagggtcatagcagtgagcaacaaggagggaatgggttcagtgggcatttcaaaggataaatcaggtgaatatgagcgaggcaggaagagtcaaagttgattgggaacatctttttaggaccttcgttacgactcttattttgattgctaagttgtaagtttgtttcaaattggtttaagcaaaagggagtttattggcttaataactaaactacctaagattagggtcagatgcacctagatccaggtggtatcaccagagatctgccctgccatcatctgactctgcttttccactgtgataagctgactcctgttcaggctgtaccagcatggttaccaggatcgttgccatcagcccctgccttagcaacaggtccttaaaattcctggacagcaaatgttcactccagtccccttttataaagtaaaaataagaacgttattaaccatcagtcacagcagtgctagaattccctatcacccattccctgcccaatcctagtcattcaaggggttaagaagtcctaggtccctagactgcactcctcccctggatcctcacaatcttgattgacatttgagagtgccatcagtaggagctggtgaaaggcacaccgtgccagtgcccttaaactttattatgcattgtgactgcacagcactaacactgattacctaaagcctgagatttttcatgtaatgtgagaagtaatagggtgaggccagcaaaggtctcattaaatcccaaccactgatacttgaactggcaccaggagaggttttatttttctttagtacctgtcaccagacactgtgaatgattgtcgtccctagcccctgctttttgtactgtgcagacccaaatcactgaagcctgcaaagaagagaagaggtggcctgctgtcttgcagaacagtgcatgctttttttttaattaaaaaaaaaaaaagtcaaatggtttggggccacaaaaaatatagataataacaaaatgaagtgcccaccacttggcttaaggaataagattttaatcagaaataaccactatccggccaggcatggtggctcacccctgtaatcccagcaatttgggaggccaaggtgggcggatcacttgaggcgaggcattcgagaccagcctggcaaaaccccatctctactaaagatacaaaaaaaaaaaaaaaaaaaaattaaccaggtgtgatggccttcggtttgtagtcccagctacttgggaggctgaggcatgagaattgcttgagcctgggaaatggaggttgcagtgagctgaggttgcagtgagctgaaattgcaccactgcactccagcctgggcaacagagtgagattctgtctcaaaaaaaaaaaaaaaaaaaaaaaaggaaagaaaagaaaaagaaaataaccactgtcctgcatttgttttctttgagacagagtctcactctcacccaggctggagtgcagtggcacgatctcagctcattgtaacctcagtctcccaggttcaagcaattctcctgcctcagcctcccaagtagctgggattacaggcacacgccaccacaaccagctaatttttgtatttttagtagagacgaggtttcatcatgatggccaggctggtctcgaactcctgacctcaagtggtctgcccgcctcgaactcctgctgggattataggcatgagccaccgcactggcctgttgtttttcattctctttggccttacgttggtacatgccagtctggtttattttttttcactgctatatggtattcactttaaaaacatagcaaatatattcacttttctcctttgcatagtcactgaagtttatttcctatttttcattttcaataaacagagctgctgtgaacattcttgcataggtcttgtgcaaatgtgcaagagtttcttcaggttatatatgcaggagttggactgcgggggtggaaggtgtacatccatcttcacctgtgctctatgttgccaaatggctctccaaagtgttcagtccaacttacactgcccccaccagcgcctgagctgttccctgccccatatccacatgaaagctcaatatggtgcagcttctattttactttgtagtttttgccaatctgaaaataaaaataaatctctttattatttggatttgtacttccctgattactaagattaaaacttgttatccttggcagaagcccaatatgtaaagctaaactagatggagtcattctgtttgggggcaggtgagggtattcatatttaagatatctaagtgattgcctttatggtgttagtccatttgaatcatatgcatatccctaaatattgggcataatttttcgtagtgtatttcagctagtgtcttgactgatttttagaaattgactgtcattttagcattatctttaacatctccacatccctttacatgtgacttgggagttgacttaaatagcaaacatgaaaacccaaccatgaagccaaggaagagaccaggcctgtgagtcttgcaggcgggggtcctcactttgttcaggaagatccctgatttagtgcctttgttctgctgtcccctctgcgtggcatgctcctccccctagacgtgcacatggctcgctacctcccctcctgcaggtcatttgcagagctcaccttagtgcggccttttccaacttggcactgtagggaatatactgccccagcccgccagccactcctggcacccccatcctgcttcactatgtattaccttcatagtacttattactgtctagctttctatataaattatttagttaccatccactttgactcttacttatttttgtgtttcccttattccctgcagaacgtaagttcttccagtgcaggcgtctttgttttgttcactgtcttcctagaataatgcctacacataacagtacttagtaaagatttgttgattaataaatggtctgaagttagcaaggaaaagagggcaaagaagagcatttctgaaataaagagagacaggcaatgtatgtgccaagacctggagccaacacagtgtggtcacctgcactggaagtgaaacagaatatgactatgattatgaatggccgtctctccaggttggagtgctgtgggcagttgtgagagatacaagtaggagccatagtcagcagcttggacttgatcttggggacagcggggagcccttgcatgattttaatcaagagaataacacaatcctatttgcactttagagaaacatcaccctggcaccaaccaggagaaagcataggctgggggttaaagataagattggagacaggtggaccacccagagggctgtctcagtgatccaagggaaggcagatggtggcctcaccagataatggcagggagaatggagagaagtggacaatttccagagatacttgggatgtctctactgtcttttcctgtgatccccgaagtaaatggaatccaagtaactctccgcatctggtcttagctgagccatgaggctgtgcttctactaagcatgctcataagtaatcaaactgggagcctttccaaaatgctccacccacatcttcaactttcctcctggtgaaagaaatctggagcaagactgccattattcaaccatgcagtgaataatggagcagcaagctgattgaactcgaagtttttggaaggaaggtagcatttgacatccaagttcccctggtctccaaatcttttgtgcaagtaaattagtttcatttgtctcagggcaccttttccaggccaacttcttccaacttgactgcaaatgtttctcagtggtgtgtttgaggcttggctgcatcccttcgtctggaacaaatcttttattactaggaaatagctggatgatgattctggacccttggaccctatccctctgtcagctgttgactcaatatttgataccttgatcattttcagattaacctaccccctctcctgcctgtttctcattaatgtgaatttcatactggaagatgaatttcatacccaccacctcaccagtattggcgagacggtcaggattaacacctgtttcttcaagactctcctgagatgtcgtcagggcgcatatgttgttttctttgctcacctcccagacttgcatgacttgctttggtccagtggtcatgcattccaccccaacctaaaaacatccagatgatgggaatatcatgttgctcgtttcacatgggaaagccacaacccacactcctcttgttcaagttgcattcaaatctaatttccacggcctgtgcgagtgggagctccacagcccttgtgtcagctgtcgaagtttagcaatactatttccaaacatgggccagtaggcagccagcaggcaccagacagctgagtgctggcagaaaaagcctcagacacctatagcagtccaaacagtgactcatcctgctattgccaggataaatatgggaataaatggtatttttctctaagcaggaagaattgtcaaaatgcttatcactttataaaatataacagattgtgcctgatcatgttttgaaatgttctaaccattcactcgccggttttttgttgtttttacttttttgagtttagtaatagctttcacttgttttccctctttctaggaggcctggagaacccaggagtttccaagctgtgctgccacccgagctctggatccacctggctgtggtggcctgtggcaatcggctggaggagacgctggtcatgctcaaatcagctgtgctttttagccacaggaagatccaattccacatcttcactgaagactctctgaagcccgagtttgataagcaggtgaatttgcagaaatcatggcacagtgtttactaagtacaaacagactacattttaggaactgcatattctgttaactaatgtattttgctgcatgttcaattgtgtgactttgaacacttgactctgagcctcagtttttggtaaaacagggataattatacctacctcatagagacatggtgaggattgaatgagacgagggtctcactctattgccaagggtagagtacagtggtgcaatctcggctcactgcagcctcaaccttccaggctcaagtgatcctcccgccttagcctcccaagtagctgggactacaggcatgcaccaccatgtctggctaatttttgtgtattttttaatagagacagaattttgccgtgttgcccaggttggcttaagcagtctacccaccttggcctcccaaagtgctggggttataggcatgtgccaccatgcccagcccccgttttttccttttctttctttctttcttcctttcttttttttttttttttttttttttgagacagcggctcactctgttgcccaggctggagtccagtggtgcgatcttagctcattgcaccctctgtttcctgggttcaagcgattcttctgcctcagcctcccgagtagctgtgattacaggactgtgcccccatgcctggctaatttttgtatttttagtagagatgggggtctcaccatgttgcctaggctggtcttgaacttctgacctcaaatgatccacctgcctgtccctcccaaagtgctgggattacaggcatgagccactgcgcctggccggtttttttttccccatatatagttgtctgtctatgtttgtacatatagacatgcatatgtataattacatacatatgtatgtatcctgattaaattgtatttcttttacgaaaatcaggattgtactctgtatattgttgtggaacttgctttttgcattgaaaactgtatcatcagcattgttcccagtcagtactcctacattcttacctcattctttttggtgactacatagtattttattatggggctgggtcctcatttatttgactattcccatactgaagaacaggtaatgagttttttccagtacacaaaaagagctttggaaaggtctcttcccccagcgtaggtacacacgtgacctttgcagatcaagctttgttttccttgagagttttctcttgctgtaagttctcaaatggtggcagagcgagaagctggtttgctttgtgtctaccaacttgagtcaacagtgctgtatcctgtcaccaggctagctggactaatgagaaatgcccaaaaaaagcatgttgggcagagaaaggctaataatagaaagatggaaaatgtgttatgtttgagtaggaaaaaaaaagtaccttgacatctttaccaagagaaaccatggaggaaatagtcttggggctttggaattgattggaaaatgccttgtaaaggatctgaatcaggggaagggtgaaggaaaagggctgaaactctatatagttagctcagagggtgaagtataagggaaatgataatgagaatatatagcatttgttaagggcttatgatttatgagttcatctcatttaatcctcataatcttcaaaggtaacctttgaagaaggtaattattatgtcccaattttacagactgagatcattgagcttagagaattttagtgatttgctcctcagggttcaggtcaagtttatggctcacccttccatggaattaatcgatatgccataccacctcctcaactagtagacagaagactcaaattcaaaactcacctccactatgtacttgctatatgaccttgggttagtcttttggcctttttgagcctcagtttccccatctgcaacttgaggctagcgggtttgctaaaagagatggtagatctgtaatatggataggtcaggtcaggcttcagtaacaactcccccaaaactcagacacttttcatgtgcctgcagcttgcttcccaggggacagagcctccattctgtacagcctcttaggtttgggacggaagtagactgaggctattcatgtgttagctacacttgccagagcatttgacatctgtagttcgtgggatgccatggcaggaaagagactagagagtcataaccccgcctttcattccctcagtgtggcagtgacacaggtctttccatgcatgtttaactggctagtagtcacaagcccatccaactgcaggggactgagaagtgctctatgtggcggaacaaagggaagctggctatgtgcaaacactactcatgtcttgtacaatatctgtctacccagtacttaatgagtacctgctgcatactaaaaagcaaggatgtggggatggagcagaacaaaatacagacttggactttaaaaggggaagggaagggccaggcgtggtggctcacacctgtaatcccagcactttgcgaagctgaggcgggcggatcacctgaggtcaggagttcgagaccagcctggtcaacatagtaaaaccctgtctctactaaaaatacaaaaattagctgggtgtagtggagtgcgccatagtcccagctactcaggaggttgaggcaggagaattgctcaaacctgggaggcggagttgcagtgagctgagattgtgccattgcactctagcctgggcgacagagaaagactctgtctcaaaaaaaataacgaaagggaagggaaggaagatgtatacgtgcaaccatatctgtttagcaggttgtactttccaaggaggcccccaatggtcccaccttctgttattctcatgctggtatacttccctcctacattgtcccagggtcctctgtgtaactaataggacagggcagaagggatggtatgtcacttctgagattaagttacaaaaggcacttcaccttccatctcggatcagtgggtctgggggaagccagctaccatgtcagagtagccctctggagaggcctgcatggtgaggaacagaggacccttgccaacacttgtgtgtgagctggatggaagatcctccaaccccttcaagccttcagatgaccatagtcctgtaatctcatgagaggccctgaaacagaacaacccagcttgtacattctcaaccctaagaaactatgtaaaatcatacatgtttgtggttttatttacttttatttttatttttttgagacagggtctcactctgttgcccattgcagtgacacaatcatagcttactgcatccttgaacgcctgggctcaagcaatcctcctgcctcagtatcccctccatgcctggctaataaaaatatatattatatatacttaaatgtatataatatataagttgggtgtgtgtgtgtgtgtgtgcatgtgtgtgtgtgtgtgtatatatatatatatatatatttttttttttttttgagacagcgtctcgctctgtctcccaggctgaagtgcagtggcatgatcttagctcacagcattctccgcctcctggattcaagaagttctcatgcctcagcctcccaagtagctgggactacaaactgcgccaccacgcccggctaatttttgtatttttagtagagacagggtttcgtcacattggccaggcttgtctcgaacacctgacctcaagtaatctacctgcctcagtctctcaaagtgctgggattacaggcatgagtcactgtgcccagcactggctaatattttattttttgtagagatgcggtctccctatgttgcccaggctggttttgaactctgggctcaagtgattctcctgccttggcctcccaaagtactgggattataggcacatgccaccatgccttgcctgtttgtgattgtacgttactaagttttgaggtaattggttataaggcaacagttaatatattacatatatatgtacatacacatgtacatacacatatacatacacaaacatatatgtatgtatgaaatacattatgccaaatgtaatgctatgtgacaaaaaaaggatacagcttctgcctggctctttgtgaggatgcctgcccctgaaaagaactgaggcctccagccaacagccagccccaacgtctagacatgtgagtgaataagctttcagaagattccagccgccagccttcaaggcttccagctgaggccccagacactgtggagcagagtcaacctgtcccctcctctgccttgtctgaattcctgatccatgaaatctgtaagcataataaatgattgttttataccactaagttttggggtaattttttatgagctgtaagaactggaacattataaattaagagctaaattatatgggaaaattattgcagatagttgtgaagttgtgctaggtgttgaattttcctgatgactttatccctttgatggttcatttcctcaggttttttttttgtttttttttttgttttttttgagacggagtcttgctctgtggcccaggtgggagtgcagtggcgcaatctcggctcactgcaagctccgcctcccaggttcacgccattctcctgcctcagcctcccgagtagctgggactacaggcgcccgccaccacgcccggctaatttttttgtatttttagtagagacggggtttcaccgtgttagccaggatggtctcgatctcctgacctcgtgatccgcccgcctcggcctcccaaagtgctgggattacaagcgtgagccaccgcgcccggcctcctcaggtttttattaaaccagtgaagctcatctaatgaaggaaattatgacagggtgttaaaaactaggcaggggatgggcatgatggctcacgcctgtaatcccagcactttgggaggccaaggccagtggatcacctgaggtccggagttcgagaccagtctggccaacgtgtcaaaaccccatctctactaaaaatacaaaaattagccaggcttagtggtgtgtgcctgtagtcccagctactcgggagtctgaggcatgagaatcacttgaacctgggaggtggaggttgcagtgagccaagattacgccactgtactccagcctgggtgacagagcaagactctgtctcaaaaaataaataaataaaaataatttttagaaaaactaggcagggtgtatactaccgtcactttcttgtccatgcagggattatgttgccagtttagctgcatactgcctttgcccttacgtaagccatagaatttcctcagcctcagtttgtcatctgtgtcgtggggcaaatgataccctgcttatggtggtgaggccaaatcagataaagaatttttttttaatcccacaaagattctctggaacatctcctatattttgggcactttgttaggtctaaagaaatagaacagccgttttgggtcctgccaagccactggcacatgctgaaggggtgggctctgtcacccttctccagggcattgtgggcaacccagggttttttttgggataacttctgggaagctcagggccacatattttttacctcagggtgaaaacaaaacaaaatgccagtaccgtcatgattcctccgaaggctgcagtatgggcgagttcttctgtatttaattagactttttaaagttgcatatgtacaggatgtctggtggtatttgccatctatgtggtagatacttcatattttaaagtttcatttattttcgtcatctcccaacagagaagtgggagatgccagccagttggtttcctaggcttttccggcagcttgggatcaggcatgtggttgagattcggctaaactgtgctactgcccaactcagaatcaggaagtagtgggacacacaaataaggaggctaccaatccattctggtggtaggggcggccagtatatatatgtatgtttttatatatatatatttacatatatatgtgtgtgtgtgtgtgtgtgcgcgcgcgcgcttgcgtgcgcatgtatatgcgcgtatgtgtgcccatgtgcgtgtgtgtgagggggtggcaagaagagagctgccatgggaagaattgtcatcaggagctttcagtgcctggagtcagtggggcaaactgtggcacttgtggtgacagtagctggggtttccttaccagactggcttgtggtaggctctaacagattgaaaagataccgacgccatagagcctgggtctgtctcaagctggatcagggcatgacccctgagtctggttctccagccctcccactggtcttctgagctacctaacatcctttcattaaattctttttggcttaaagagcctgaattgggccagacgcagtggctcacacctgtaatcccaacactttgggaggccaaggcaggctaaggccaggagtttgagcccgtctctactaaaaatacaaaaattagctgggcatggtgacacacacctgtaatcccagctacttaggaggctgaggcatgagaatcgcttgaacccgggagtggaggttgaatgagccaagatggcaccactgcactccagcctgggcaacagagtgagactccatctcaaaaagagcctgaattggttttattgcgagcaacctagcatcctgagagtaacacaaagtaactaaaacatggtgaggagttgttttttttcctttaaagaaagaaaaaaaagcaccaaagggctgcttttaaatagtaccacgtgcttttagaggacggggaccatgcctcttcgttacccatttccttttttttttttttttgcgggggggggggggatttaggaaaaatagcccatagaaagagatgataaggtattcttcagtaatttaaagacgtatacaatcggaattagattttttccgtgttgctctgcagaacaaaacgaggggtgatgtgggggaggtctcaggcagctggttctaattccatgcaaggagccctttttaaaggtattgagggagctgggcgcgggtggctcacgcctgtaatcccagcgctttcggaggccaaggcgggcggatcacctgaggttgggagttcgagaccagcctggccaacatggtgaaaccccgtctctactaaaaatacaaaaattagcccatgttgtggcatgcgcctgtaatcctagctattcaggaggctgaggcagaattgcttgaacctaggaggcagaggttgcagtgagccaagatcgcgccactgcactctatcctgggtgacagagggagaccctgtctcaaaaaaaaaaaaagagagattgggtttctcattactagaggaacaagctgaggctggcccagcagtgtcagggatgtccatggaggacttgggaaaggtaacggctgcacttcactgtccctgtgtggtccttgttgtcttaccttcgtggtcattattagatgcatggtccatgatccttttagatgcatggtcatttggcacctccctgactcctctgaagttgggtgtgattgtgtgatttgctttggccaatgaaatgtaggtgacagtgatgagcgtcacttttaacatgaaatatgtcacttcctggtggaaacttaagatctagtatgtgttttgccacacttccttctcttgcatctgcgttcactgatgtgagttgagatggagcctccatgagtttggcccctgagtgagaatactgagcacagccccttgccagtctgaagatgtagcaggagcaagaaacaaactttaggaaaaaaaaaaaagaaaagaaaaacaccttaaaataaacttttttgggggtgggggtagagatggggtcttgctatattgcccaggctggtccctaactcctggtctcaagtgatcctccaaccttgacctctcaaagtgttgagtttataggtatgagtcaccacacctggccataaattcttgataaccctagtttatcctgactgatgcaactgagtttgtttgtttttgtttttgtttttgagatagagtctcgctctgttgcccaggctggagtgtagtggcgtgatctccactcactgcaacctctgcctcctgggttccagtgcttcttgtgcctcagcccccctagtagctgggattacagtcgtgcactaccacacccagctaattttgtattttttagtagagacgggggtttcaccatgttggccaggctggtcccgaactcctgacctcggcctcccaaattttaggattacagatgtgagccacctcgcccagccgcagttgagttttaacagcttcattgtatctagtgtgttattgtaaaccagccaaacccttgtgaaagcaatgtaatggatttgagatcctaaaagtcttctgttctataacatttgtagatgctcaaaaatattttttataacttgaaaagaatgaatgaacctgcaagaaaggaggagttacctactgaggtaaaggatgaggtgggcggttagattgacaaaggtagttaaacctttcggaagataggatgctaacaattagagtggcaaggatttttttgtttttgtgtttgtttttttgagacagggtctcacattgtcatccaggtggagtgcagtggtgccatcacagctcactgcagccccaacctctcagactgttagaggatgccgagagctaagggagcccgtgaaccatgtgaatttcccatactttttcgagggctgattttgggctgttgtgcggtggtacaattgtactggtatttgtgcccagtatttgtgccagtgttcattctgactggtcagtactgtcatactgagagtttatgcctagcgtcagttctaatgggatctgtgcaattatactgggtaaatactaggtaatgcctggtgtgggttctaattggtcagtacccttcatatatcaaatgtcaaatactttgtctgtcactcctttcctattaagaattttaaagtatttccaatcatgtatttcaaaaaatgtttatatcccagcctgggcaacatggcaaaaccttgtctcagtaaaaaatagaaaaattagccaggcatgatggcatgcatgtgtggtcccagctacttgggaggctgaggtgggaggatcacctgagcccagagagatcaaggctgcagtgagccatgatcgtgccactgtactccagcctgggcaacagagtgaggccccatctcaaaaaaaaaaaaaaaagtttatatggttatataaacaatatatgtacattgtaaaaaccagtaaattcataaataataaatggaaaaaaaacccattacactaatgctcagggagaacagttttggtgtatatatataatacttatttccattccttttcttttcatatcaccatcagaaatgggatctcttttatatcactgatgcttatattactgagtttcctctaaagtgagttgaccaatgtttcctggaaaacgccagatagtaactattttaggctttgcaggctgtatggtctctatcccaactactcaatgtgctatttagagtagaagcagccacaaacaatatataaacaaatgggtgtggctgtgttctggtaacattttacttatgggcactgagatttgaatttcatataattgtcacaaaatattattcttgttttgattttttaaaactattttagaatgccaaaccattgttggcttgtgtactctttgtggcaggctagatttggctctggtactaccataatttgctgaccccagttctatgacattatcactaatgactacattgcattctgttatatagatagactctggagcttacttaaccaaactcttctttagattgtttctaatttttcattgttacaaacaacactaaaacaaacaaccttgtaataaacaagtatccatttttgaaatttttccttaggaataattcttagaattgttgtagcaacgggaaggcattaactcaaaaaaattgagaagggccagccacggtggctcatgcgtgtaatcctagcactttgggaggatgaggcgggcggattgcctgagctcaggagttcaagaccagcctgggaaacatggcgaaaccccatctctactgaaaatacaaaaaaattagctgggcatagtagtgcgcgtctactcgggaggctactcgggtaggctgaggcacaagaattgcttgaacccgggaggcagagagtgcagtgagctgagatcatgccactgcactccagcttgggcaacagagcaaggctctgtctcaaaaagaaaaaaaaaattaagatacacagatggcaaacaagcatatgaaaagatgttcagtgtcatatgtgattagagcattgtaacttaagataacaatgaaacaccactacacacctatttgaatggctaaaatctagaaccctgacaacaccaaatgctggtgaggatgtggagcaacaggaactctcattcattgctggtaagaatgcaaaatcatgcagccactttggaagacggtttggcagtttcttaggaagctgaatataggcttactatacaatccaggaattgaactcctaagtatttacccaaatgagttgaaaacttatgtccacacaaaaaccggtacacagatgtttgtagcagctgtattcacagtttcccaaaactggaagcaaccaagatatccttcagtaggtgaatggataaacaaactgtgatatattcataccatagcatacagtattattaaatgattaaaataaaatgagctatcaagccacaaaaagacatgtaggagacctaaatgcatattgctaaatgaaagaagccagtctgaaaaggcaaggtactatatgattctaactatatcacattctggaaaaggtaacatgaagagactatataaaaagatcagtaatgggctgggcacggtggctcacgcctgtaatcccaacactttgggaggccaaggcatgtagatcacctgaggtcgggagtttgagaccagcctgaccaacatggtgaaacctcatctctactaaaaatacaaaaagtaactgggtgtagtggcagtcacctataattccagctactcaggaggctgaagcaggagaattgctggaacgtgggaggcggcggttgcagtgagctgagattgcgccattgcactccagtctggatgacagcgcgagactctgtctcaaaaacaaaaagaagttcaggtgagagggcaggcaggaatgttgaaaagttggagcagagaggatttttacggtagtgacactgttctgtatactgtaatgatagatacatgatgtgcatttgccaaaatccatagaaagagtgtacaacagaaagaattaacactaatgtaaactgtggactttagttagtaatagcatattgatattgacttatcagttgtaacaaatataccacatgaatgcaagatataaataataggggaaactgtaggggagggagaagagagaggctatctggaaactctgatttctgctcaatttttcttttttcttgtttgttttcattgttgttcttgtttttactttttttattttttatttatttttttattttttgagacagagtctcactctgtcacccaggctggagtgcagtggtccaatcttggctcactgcagcctccgccttccgagttgatgtgattctcctgcctcagcctcctgagtagctgggactacaggcgtgcctcaccgctcctggctaatttttgaatttttagtagagaccgggtttcaccatgttggccaggctggtcttgaactcctgacctcaagtgatccacccgccttggcctcccaaagtcatgagattacaggcgtcagccaccactcctggccttgtttttaatttttttaagaggcaggtcttgttatactgcgctggctggtctcaaattcctgggcttaagcaatcttcccaccttggcctcccaaagtgttaggattacaggcgtgagccaccaacacctggctgactttctgtaaacattaaactgctctaaaatctaaaagtgtattttaaaaattttgttataaaattaatatatgcaaagaaagtaatatatactcattgtaaaaattctaaagaatatggaaatgtagcccgaggaaatgaaaccaccatcaccagctatagagtgcccacttttaataatttggtgcatatccatctaggtttttctttacatataaaatgtacatgcatatatatatatatatgtatttttttttttttttagtcagagtctcactctgtccgtcagactggagtgcagtggcatgatctcagctcactgcaacctccacctctgcctcccggattcaagtgattctcctgcctcagcctcctgaagtagctgggattacaggcgcccaccaccacgccagctaatttttgtatttttagtagagacggggtttcgccatgttggccaggctggtctcaaactcctgacctcaagtgatccccctgcctgggcctcccaaagtgctgagattacaggtgtgagccaccacgcccggcctcatgcatatattttttcctataagacagaaccattcattcagacagtagtgaagaaataaaaaaaaaaaaatttatagtttttttgcactttgctttttccaaaacccaactatatgttataactgttttccatgtcagtacatatctacataacagaacacaatgcagtcattagtgacaatgatatagaactgaggtcagcaaactatgggagtacaagagccaaatccagcctgccacaaataacacaaaagacatctactttattctaactgtacattattctatttttctttttcaatttaatttaatttaatttaatttttttgagacacagtctcgctctgtcacccaggctggagtactgtggcacgatctcactgcaacctccgcctccctggttcaaagcaattctcgtgtctcagcctcccgagtagctgggactacaggcatgtgccaccatgcccagctaatttttgtgttttttagtagagatggggttttgctgtgtggccaggctggtctcaaacttctggcctgaagagatccacccacttcagcctcccaaagtgctgggattacaggcatgagccaccatccctggtccctctaacggtacattattttattatatagttctgtcatacttaattgtcccaattccttattattggacattttgattgttcccaagtttgttgggtttttttcctcttccaagctgcaaagttctcaagtcttgttattacaaactaggttgtggtgaatgtccttgtacctctgtcttttggggtgttgttaccagtttccaagttaaccttttggaagtttgttcaaatctatactcccctctgcagtttctcaacactgttgccaacggtgaatgttattttttaaaatcttagcaattttagtaggagcaaatactctttcatttagtgaacattcatagtggtgatgaagttagactttctgtgtaagttgcctgaataatttccatttgaccatccagaagcttcgcaggcattttccatatttcctagggcctaatcacccttcccttgcttcccatgtttttcagttacgccagtggcctgactcatatacaaagaagtttgagcacagaatctaccccatcacattttctgttggaaaccctcaggagtggaagaaattgttcaaaccctgtgctgcccagagactctttcttccggtaggaacacctgtttttaataagttgtagcttgctcctggaaataaggtaaaattagctgagatgtgtgtagaaacatttaacttaacagctgaaaacctgtgtctcttggattctggagctgatgctctaagtctgcagcatgtagagaggatccctgtgttctggaggttgtcataccgaaagactgagggactgtgagcattcaaatcctgtcttggatcattggtctttgtgactatggttccattatttactggctcctgtgaacctcgttaaatcccccaactttactaacttcagttttatccataggcttggcacatagctggccctcaataaatattagcctggattattgttatttctcttatcacaataacaactactagttatggccatactaggctatcattccaaaagggtccagaattttggtttagtcttttagtttaatgaatttttaaattgcatgtttttggttgcttttttaaaatcttgaggccggcatggcggctcacacctataatcccagtacttggggaggccaaggcaggcggatcacttgagcacaggagtttgagaccagcctgggcaacagggtgaaatcccatctctacaaaaaatacaaaaattaggcggggtgtgttggcttagacctataatcccagcactttgggaggctgaggcgagtgagtcacctgaggttaggagttcaagaccagcctggccaacatggtgaaaccctgtctctactaaaaatacaaaaattagccaggcttggtggtgtatgtctgtaatcccagctactcaggaggctgaggcaagaaaatcgcttgaacccaggaggcagagcttgcagtgagccaagatcacgccactgcactccagcctgggcaacaagagctaaactacatctcaaaaaaaaaattacctgggcatggtggcgcatgcctgtagtcccagctacttgggaggctgaggtgggaggatcatctgagctcaagaggttgaggctgcagtgagccatgatcgcaccatcacactccagcctacctgacagactgagaccgtgtctcaaaaaagtaaataaagaaataaaattttaaaaatcaaataataataaaaatattcaatagaaaaagatatttcaaaagtgagaataatattgcacagggatagcaactttgaattgtcagttgctgccttaatttttgtgagggattcatgccttcagtagacatttgttgagtgcccaccagggtgctgggccctggctcagtgatgatgacatggtaataagacagccatggtcctgtttccttgaagcttgagtctagtagggccttgaacaaataattagaagtatgaccagtactaagaggagataatctcatggatgtatgtaacatggggttccatcctggtctgagagagatcatagaaggttctcctgaggcagtggcatatttttttgtggagatggggtctcgctatattgctcaggctgatcttgaactcctgtgcttaagtgatcctctcgccttggcctcccaaagtagtaggattacaggcatgagccaccatgcctgtccagcagtggcatttatgcagacatgaatgaaggagaagtaagggttactaggtgacaagggccttgggggtaatgagagaaaagaggggtccaggcagatggaacagtatatacaaaggccctaaggtgggaagggccatgtttaagaaaataaaagaaggtcatagtaaccaaaaaatagaaagtgagatgagaatgaagcaatcagcagagactggagcttgcaggctcagcaagccatctagaagtgtctggtctttgtctttttttttttttttttaagagataaggtcactctctgtcgcccctgctggagtgcagtggtgcagtcatggcttactgcagcctccaactcctgggcttaagtgatcctcccacccgagcctcacaagtagctgggactacaggtgtgagccaccatgcttagctaatttttttattttttgtagagatgatgtcttgctatgttgccagcctggtcacatactcctcacatactcctgggctcaagcggtcctcccaccttgacctcccacagtgctggaattgcagatgagagccacagcactcagcccagtctttttcttaagggcagtgggaagccactggatgattttttgcagcaagtggcatgttctaacttgtgttttagagaagacactctggtttatggcagcgcagacagggttggtgaagccaggtcactaacttggtttgggctttgatggttgccttagagatggataatggacctgcctgaaacggaatttaccaaccttcatgattggctcgttgtaagagttgaagggggagtgacatgaaaaggattttaccagattttttttttaacctgaacaactgttaaggttgatccatttgaaattgccagtattcaaccattaatgacctacaaaaaggtaatttcttatggctcaacgtaagaaataaatggcagaatcatttagggatagaaaagacagggaaaagcagttttggtaaaggggtcaaatgagtttaatttgggtcatactttgattttgaggtggctgaggatactcaagcagaaggaatcgtcacatctatcggtctggaaacactaactggggagtagcccttttggcatttcctacgcagagacctgtgagcagaataaaccctggatgaattgttggcagcgatcagctgcccaagctcacttgctcattatgtcatctatttttctttttctttcttttttttttttttgagacagagtctcactctgtcgcccaggctggagtgcagtggcacaatctcagctcactgcaacctccacctcctgggttcaaacaattctcctgcctcaatcccccaagtagctgggattttggcgcataccaccatgccccgctaatttttgtatttttagtagagacagggtttcaccatgttggtcaggctgatcttgaactcctgacttcaggtgatccgcccgcctcggcctcccaaagtgctgagattacaggcatgagccactgcgcctggccacatcgtctgttcttcacatgtcacagacctttatatataatcgcataaaaactggggtaggaaaagactccctccaattgacacgaaaatctctaggttggtgatataaaaactgattactctttgaggtgagagaaaatgttaggtttgttgcttgtctccatttttgcaaaaaataagtattagaaaaccaaaggtaatgttgggaaatggtcttcccattctatccaaaatattagctacccaatggaactacatttgaatttttgttgaccttgaattgtgactttattaccattatttaaaaaaaaacaaattcatcacctaatggccttaattctttcccagctaagtaggtgcttggttttgaatgacaaatgggtgctggcattccttatctgcttctgataatggaaacgagccctctttaaaaataataaagagagattgtggttgacaggacatttaccttttcctagttgtatatcacaacagcagattatgaacatggcatttttgggcatcagtgagatgtattgatcttgagggtaattttaaagtctaggttgtgttttccttggaattcatctctttaaaaccatatcaggtgtgctgcctcaggagcacagagaaaatggagatcctaaagtgcaaacattctatcaggtagtcagttgactgaggaccatggtcccacccattttccaagaggctgtcatctacccaaaactgtggaagagaccctttctcaactaagattttactatctgaataatatcagagcataagtctttgcaactcaagccaattagattctcaggtacaattagtgtgattcagatcccaccaattcaaaatttatgaactcctacaaatcagtggacatttactcctctacttctgtgactaatggtcctatgacatgggatcattatgaatgcaaactaaactgcagatggcttggttaagcgttctaaaatgcatatttcaggtaattcagaagcttaaaatatttaaaacaatatgccaattacaaataaatcaaatgtgttcattaaaattgattctggaatacttttattttcttagtacaggccagaaatcctttacatctgtaagagtaattgagttgtatgaattcacatcacctttcccccaattaattggaagtagtgagattttataatagatctgtacattttgctacacgctgtgaggagagaaattatgaagatttctctcctcaataactgtggtcttctgggaatcctagagataggtaaaacatgacagacatcactggattgcagaacctttagagacattattagtgagtggtacccaatatggtaatttgaggtagggtaaggttgtatccagggataaatgtttttggttttgtttttaccaagttttaataagctccaaggttatgataatgtctgatgtcttttttgctcccaacattcaccatagatagccatatttaaggaaggagttagagagggtctcactgtgttgcccaggctagagtgcagtggtgcaatcatggatcactgcagcgtcaacctcctgggctcaagtgatcctcccacctaagcctcctgagtagctgggaccacaggtacacaccaccatgcccagctaatttttaaaatttttgtagagacaagagtctcaccatgttgcccaggctggtctcaaactcctgggctcaagtgatcctccttcctaggcctcctaaagtgctgggattacaggtgtgagccaccgcacctggccaaattagttatagctttaacctgtaaatgtattctgaaagttttctgactccatatttccaagaaacttgtcccactccttaatatttcaaaggactaccatgccaaataaagataaatctttattttatgtagtgaaagcaacaatgtataatcttctcttttctacttacggcttgttaaagagaccggtaactggttctaatgttttgaaatctgcatgcttaccaatgatgtcttcatgagttagctgtaggctaatggaaaaaggaagcttatcatactttttagaactttttataattaaggtcagacctctatattattattaatattacacctcagtatttgcaattaacattgagacatccttgcaacaaaccctttggatattaacaaatattgacacacatataggaatatattaaaaatccttattaaggggaacaccaattagaatcaccataaatgatgtttatacatttcatcaagcaccaagaggccataaattatttggatgagattagccacctaaatgattacatgaaatgaccttagataccaattttgttgaacaagctttccacagtacttatcatttactcatacactattaaaagtttgacattcaggatattagctacaactcttggttatatgtgagagaaactcaactccaactagcaaagaaggaaattaatttattggcttatctaactgcaaagtccacactgtagggctgattccaagcacagctagatccagaggctaacataatgtcatcaggactctgtctctctctttcagtcccttgcaaggctactccataagcataatgattgctcaaagcagcctgaaatccaaattctagcagcttagcagctacggcagaaaaagagcatggcaaggtagcaacttccaaaatggtgacattaggagccctgtggaattgctccccagtgaaacaagcataacttgtgaaaataatttttaaaataactatctaaatactttggaaattgtcctaaggacctaggcaaatgaaggaacatttattcaagaaaatctactaaaacttggtaagaagagtgagaatcggtgacatttgaaccacagcctccctccttcccccttccagttcagtgtgataaaaattcaccttctacctgaagttcattcaagaacacagggattcctctctctccagctcccagttgaggaacatggtatctccttgggaggcacaggccatcagcatttcttattgctactagctagctatgtgttgcagagcctaaattccatggaggtgtggcctagaagccagggtgtttcttaattaagaggaggcttgcaccttaatgagaacagcaagctaaaccataggccagttagtttacaagggagagccagaggacaatgcaggtaaaacgtgccctcctggagtcataacagatatcacagactagcctcaaaaattcaaatggtccttaatttaattggatcagactgtgggggcaatttgtgctccactgaggaaataactccaaaaaaaaaccccataaaaaaataaattaaaatgctctattagaaaatattcactttgccagacgttcctcgccgggagtcgtcggggtttcctgcttcaacagtgcttggacggaacccggcgttcgtcccccatcccggccggccgcccatagccagtcctccgtcaccacttcaccgcgccctcggtaccgccccaaggcccgccgccgctccagcgccgcgcagccaccgccgcctctccttagccgccgccgtgacgaccgcgtccacctcgcaggtgcgccagagctaccaccaggactcagaggccgtcatcaaccgctagatcaacctggagctctacgcctcctacgtttacctgtccatgtcttactactttgaccgcgatgatgtggctttgaagaactttgccaaatactttcttcaccaatctcatgaggagagggaacatgccgagaaactgatgacgttgcagaaccaacgaggtggccgaatcttccttcaggatatcaagaaaccagactgtgacgactgggagagcgggctgaatgcgatggagtgtgcattacatttggggaaaaaaaaatatgagtcagtcactactggaactgcacaaactggccagtgacaaaaatgacccccatttgtgtgacttcattgagacacattacctgaatgagcaggtgaaagccatcaaagaattgggtggccacgtgaccaacttgtgcaagatgggagcacccgaatctggctcggcagaatatctctttgacaagcacacgctgggagacagtgataacgaaagctaagcctcaggctaatttccccatagccatggggtgacttccctggtcaccaaggcagtgcatgcatgttggggtttcctttactttttctataagttgcaccacaacatccagaaaaaagaaaatattcacttaatgcaaaataaagcagaaaagaaagaatagaggaacaacaaaaatattagacatatagaaaacaaatagtaaaatggcagacataaattcgactatataaataatagcattgaatgtgaatggattcgacaatcaaataaaaacacagagttgcaggcccgctgcagtggctcatgcctgtaatcccagcactttgggaggccaaggcaggtggatcacctgaggtcagaagttcaaaaccagcctggccaacatggtgaaatggtgtctctactaaaaatacaaaattagctgggcgtggtggcgtgcacctgtaatcccagctactcgagagggtgagccaggagaatcacttgaacccaggaagcagagggtgcagtgagttgagattgcgtcattgcactctagcttgggcaaaaagggcgaaactccatctcaaaaaaacaaaaaaaaaaacagagttgcagttatagttgataaagaatacagtcgaactgtgtgctctctataggaggtgttcatgcctgtaattctagctgatgcgggcagatcacttgagctcaggagttcaagaccagcctggccaacatggtgaaacctcatctctcctaaaaacacaaaaattagctgggcgtggtggcatgtgcctatagtcccagctactcaggagactgaggcaggagaattgcttgagcccaggaggcggagattgcagtgagccaagatcatgccactgcactccagcctgggtaacaggagtgaaaccctgtctcaaaaaaaaaaaaaagatataaataagcaattcatcaacagtagtaggagatatgagtgcccctcttttctttttctttttcttcttcttctttttttttttttttttttgacacagggtttcactctgtcacccaggctagagtacagtggtatgatcatggctcactgcagccttgacctcccaggctcaggtgatcctcccacctcagcctctcaagtagctgggactacaggtgtgcaccaccaagcccaactaattttcatactttttgtagagatggggtttcaccctgttgcccaggctggtctcgaacccctgggctcaagtgatccacctgcctcagcctcccaaagtgctaggattacaggcatgagccactgcacccagctgccttactttcaataatggattgaacaactaggctgaatgtcaacacggaaatagaagaacaacaccataaaccagctgaaccaaccgacttctttaggacactccacccaacaccagtagaatacgttcttgtgagtgcacatgaaactttctccagaatggaccatatgttgtaccataaaagaagctgtaaaaagcataaaaggattgaagttatacaatgtatgttctctgaccacagtggaatggaattagaagtcaataacagaaagaaatttgggaagttaacaaaaatgtagaaattaagtaacatacttctttatttttttattttattttctattttttttttgagacggagtcttgcactgtccccaggctggagtgcagtggctccatctccgctcactgcaagctccgcctcccaggttcaccccccattctcctgcctcagcttgccgagtagctgggactacaggtgcccgtcaccacacatggctaattttttgtatttttagtagagacggggtttcaccatgttagccaggatggtctcgatctcctgacctcgtgattcacctgcctcggcctctcaaagtgctaggattacaggcgtgagccaccgcgcccggcctaagtaacatacttctttctaaatagccaattgctttaagaagaaactacaagggaaactacaatgaaaatgaagatacaacataccagtacttatggcagacacctaacacagggtttagagggaaatttataaacttcagcagtacaaatgaggaaaggcctcaagtcaatagcctaaccttccactttacagcacctcagaagagcaaactaaatccaagcaagcagaaggatggaaataataaagattcaactgaaaattaatgatacagagaagagaaaaaacagtagaggagtaacaccaaaactaaaaattggtactttgaaaagatcaacaaaattgacaaacctttaggtagactgagctagaaaacaagggaagactcaaactactaaaatcaggaaggaaagagggaacataactaccaacattaccaaaataaaaggattataaagcaatactatgaataattgtatttcaatcaattaggtaatttagatgaaatggacaaatttgaattctgtggattgtcttttaactttttttttttttttgagatggagttttctggagtgcaatggcacgatcttggctcacaccaacctccgccttctgggttcaagcaattctcttgcctcagcctccccagtagctgtgattacaggtgcccaccaccacgcccagctaattttttgtgtgtatttttagtagagatggggtttcaccatgttggccaggctggtctcaaactcctaacctcagttgatccacctgcctcagcctcccaaagtgctgggattacagacatgagccaccgtacgtggcccactttaatagtgtcattggcaacacaaaagtatttaattttgtttaattcaaagttatctatttccatttttgttgtacttttggtgtcatatctaagaaaccattgtttaatccaaagtcatgcttatttctgaaccaatcattatgtccaggaagacaggatactcagattggcttgacttgaatcacattctcctccatgggccacaggggccaacaacatttaagccacatggattgggttttaccacaagagagtggctcttgtcaggagatggagaaagatatgaaggggagggcaaacaataaacatctgtttggcttaacaatgaatagttatataacatttcttctcaggccttcagagaggtccagttactttgttaagatgaggaatatgagataatatacaaagtgtggcctttagaaaatgtaatagccacagtgttaggaagcatttaatggagacaaattaatttgagatattattatatagagacagtatggtatagttgttaagaccccaggctctggaagcagcccaaatacatttaaatcttgtttctaccacttaccactttgtaaccagaagaaataatttcaactttccttgcctccatttactcatctgtaaaaagagaataataatattgcctatctcatagtgttgtgaaaattcaaattagtgaatacatttaacacccttggaaacaatgcctggcacatagaaagtgttagatactatttttattattatacctatttttttaggactgatatgtagcatgaaactactgagacagttaattctctttccgaaaaggactttatcttgattaatagcaacatcattttttttgacccagtcggccaagccataactaaccatgaacaattgtaaacatgtcccagcaggtaacgctcctattaaaacatcagtcacattgtagggaattgtctttttgactccagcataattagcatcatagtattagatgctaatagttgcagtagttgctagtaaatgctaatagatgcaatagttctacaactgaagagtcattatatttcttacgaagcctagtgtaagaatcacaataatatatgttgattacttactgtaacgtagttctttggttgaaagtgatcatatatgatgttggctatagtaagtacaaatattaagaaaaaagaaaaataaatgaacgtgatcataattgattcaggctgagttaatcagaagagaatttgattgaaaggatgttggggctggacacagtggctcgtacctgtaatcccaacactttagaaggccaagatgggaagatgacttgagcccaggagttcaagaccagcctgagcaacaaagtgacaccctgtctctacaaagaattaaccgggtgtggtggcacaggtctgtagtcccagcagcctgggggggccgagcttggaggatcacttgagctccaggagatcgaggctgcagatgagctgtgatggccccactgcactccaactcgggcaacagagtgagatcctgtctcaaaaattaagaataataataataaagaaaggaaaggatgttgggagttctcagaatgaaagaggagcttagccagctggacttgtgttggattaaagatggcaaggaaattatttgtatttgtattcattctttcctaaaactatacaaaaattgatagttaattttaattttattctttttttttttttttttttgagacagggtcttgctctgtcacccaggctagagtgtagtggtgtgatcacagcttattgaagcctcaacctcctcctgggttcaagtgatccttccatctcagcctctggagtagctgggactgcaggtgtgcaccaccatgccaggctaatttttgtatttttttgtagagatagggtcttgctgtattgccctggctggtcttaaactcctgggctcaagcagtctgcccgcctcagtctcccaaagtgctgggattataggcaccagccaccacacctagctgataattaatttttttaatagcataaatatattctaggacaaccagaatagtatttaccaaccttgacttgagacagctaaatctttaaccagcagtgggaaaaacgcagaagcaaatgatatatatggcaaaaagacccccaaagccaatgaattagcggcatccactatgtctggagatggcaatgaagatgaacctaaaatcaggaggtgtagttacatttatgtttgaaaagcagttacgccttcagattgcctgtttcatactgtttaacttggaatttgattctcccttgggcaaaatattggaaattcagtttctaaagaaagtaaaacagggggtctctggactaggagaatccaggcacagttaaggatattatgttgaaaacatgagattcagtaaaaaacttacacatgaatgttaagaccccaggcctgtttctaccatgtagagcccagaaccttgcaaagaaaattacagagatttggaagcatatctatggagatttaagaacactgacatggaaggattccccattagagtggcccacagatcttcctccaatgatgtgcatagctgacaggcttactccacctacttccaaacagctggaatatgaatagagatccagtgattgctagacatttgaagaaaccctctaataggaaagacagggttcaaaacaaacaaagggagcttatcaacctacagaaaatcatatatggaagatgaataaaacttctaaagaaattattattaggatcctagaggaataaaataaaacacaatatgtattaaagaagcatgggattctatgtcaagaatggaatatttagaggattaaaaaaacctcttgtacattaaaagtacagcagaatagaactcaatagaagaactgggaaaattgaactctttctgaaagtacagcaaaaaacaaaaactaaatagaaggagaatagcaataaaatgatcagaaacttagaggactggttcaacatctgaacaataggagctctggaaagaaaaatcaacgcacaggatagggaatcaaccgtgaaattaattcaagaaaatttcccagaacaagcagacataaattcccagattgagagaatccatcagaagacatcacatataatggaaaaaaccataccgtatcaggcatattgactgaactttcagaacaacaggtgaaatagaagataatattagctatcagaaagggaagaaaaagtcacattccccaaaccagaaatcaaaaggacttcaaactcttcaacagtagtgggcaaagtgccaaaatattggagcaatacctttaaaattcacaggcaacattattttcaatctagaattctatactcaaccaaactacaaattaagtgtctaggtcgcaagacattttcagatgtgcaccgcttcaaaatatttacctcctgtgagtcttctgtaattccttctgtgagtctaatgtactccactgaaatggagtacattaagaaatatgaagatgtgagatcctagaagcagggaatactactcaaaggggacgtgaaaggagtatcaggggaaaggagatgatagctgcacagcatcctggttggagaaaatcaggaagcccgccgggcgcggtggctcacgtctgtaatcccagcactttgggaggccaaagtgggtggatcacgaggtcaggagatcaagaccatcctagctaacacagtgaaactccatctctactaaaaatacaaaaaattagccaggtgtggtggcacgcgcctgtagtcccagctatttcccgaggctgaggcaggagaattgcttgaacctgggaggcggaggttgcagtgagccaagattgcgccattgcgctccagcctgggtgacagagcaagactccatctcaaaaaaaagaaaaaaaaaaaaaaagaaaaagaagagaaaatcaggaagtcgtggaagaaactttaataaacatagaaaactggccagcacagtggctcatgcctataatcccagcactttgggaggccgaggcagatgaatcacttgagactagcctggccaacatggtgaaactctgtctctactaaaaatacaaaaattagccaagtgtggtgtagtatgcctgtagtcccagctactcgggaggctgaggcaggagaatcacctgaacccaggaggcagaagatgtagtgagctgagatcgcaccattgcactccagtctgggtgacagagtgagactccatctcaaaaaacaacaacaacaaaaaaacaacaaaaaaaaaccgaaacaaattaacaacagcaaaaagagtcattaattccaggaaaaacacttgtacagagagggaaagtattgctactcattttgtggcttcactggaaataatgttttcatggccatcataatactgtgtattgatctaaatgatattttgatacaattgtattgggggatgggaaggtatatgtgtggggttgggaatttgtgtgaaagagagctaaaacctattcttccagggtaggaagttaatagataaggtatattatttagacacacagaggtatatacctacagaatcaatttaaataattggaattggtggttttctctgggaagaaaatagtagagaatatggtggaggacatagaggaaggaccatttttacttctttttccatatgtctgcctacctatctatgtatattatttactaagttttggttaactatttgactattctgagtttcccctaattgcgaggaataacccaccagtgactcttggaaccagtttagtggattattatcagcttttttttaaaaaaagaaatagaatagaataaatatgcattgcatttagtaaaaacaagtattctttttgacatttctgtcttatatatttatgtatgcataaactagaattgtgatgaaaatgcgttttttactatgaggtacagttgaaaatagtttaagaaatgctgctttaaaatatgtcttcaggacataacactgaaaaaagggaaatgtatggtaggtggccaatgaccacccaatgcctactgcacttaacccaggctgcgatctttaggtttatgatttcattaactcttccccaactctttgaggaatatgctcatttgcatcctctttacaaatgaggaaactgaaattgaggaaaactaaatccttttcctggggtaaatcttggagtctggattgaagcccaagattctcctaaagaatagtcattctgccctacttcttagaatattagtgacagcattttctcctctacttgtagaagacattcctaaagtgttcccaaaatacctccttaggaaaattcccctgaaccttccattctttaactgttaaatggataaagaaaaaagaaatagaacatatgtctttgctcagactcgccagtttagtgaggtgtttgtatttatcattgctccccatccctgctttagttttccatatcctaccatcttcaaagttggaatactacacactttactcatttattttttcgcttttctcaggagcatgtaagccctctcagggcaaggatctttaatcttggccaggcatggtggttcatgcctacagtcccagcattttgggaggcagaggtgggaggatgcttgaggccaggagttcaagactggcctgggcaacacagtgagatcctctctacaaaaatttaattttaaaaaaagaaaaaaatgtaaaaggtctttgatcttctgcacctacagaaatatttggtacatactaacagaaggcactctgtaaaactcttttgatggatgaatgggtggaaggaaagatggatgtatagatggatagggggatggacaatggatggaaagacggacaaatggatggatggtcttataaaaagggctttaaccactgcttcaaaaagtgacagagaggatttaaagatataacttataaaagtgctgagccctgaacccagtgtctactcagtaaatgttggctatattagagtctcaaatataagaaaagggaaaagcttctttgaaaatcagtctaatttgagtaaagagctacagttccttgtgatccaatgatcctgttttcagcaacacattctctggggaggcaccatctgactaagaaactagactctgctttaaatgacagttgccatggctaacggaatgtctacagccaacaaggaaagatactgtgtgcttgctggctgggattgcaacacctgataagaggaggaagcaagccaaaagcaagcatggaagcagatggaacatcttagagagccattatctcagaacatgccggagaaaccagatacttttcagttacgcaaggcctgtggaaaacgtcctgcatgcagttctaacagttggccacacagctgaaatgatgaaatcaaagaccaaacacaagtttaatgagccagaattttagaagaaccatcttgaacaaagccatcattgctttgctcaactcagaagcaatcagaatcttgtttgcaaagactaaactgatcagaagaggctacttcattgattggtgcatgcctgaatgcagccatgacattggtacaccctgctctttgttagaacgtcacaaaaatgaatatgtaagttatatgtaattccacaagggggcacaatagaaacaaaaataaaaattgataggctttaattttctcctgtgccaccccattttaaggtaataatttaacaaaatgagcaatcttaaaatctcagattaaaacagtgtggaacactacttaagaatgcatatttattttattacaaactcccaattatatatatattttaaaacagaaaagatcatgaccagcctggccaacatggtgaaaccctgtctctactaaaaatacaaaaattagccgggcgtggtggcacccagctacctgggaggctgaggcaggagaattatttgaacccaggaggcagaggttgcagtgagccgagatcacaccactgcactccagcctgggtgacagagcaagactttcaaaaacaacaacaactacaacaacaaaacagaaaaggaagcattatatagcaacattattttccaagtattcattattctctaaactatcttaaactatttcaagaatatcaaagaggatacttgagaatatgcagcatcaaacagaatgttctttgttgtctgcacacataaaattaaagggaagtatctcaaagtagacaattagaaagtatggcatgtatagtatgattctataggtagtcttttctttccttttttttttttttaaacatgggtctcagtctgtcgcccaggctggagtgcagtggtgctatcagagctcactgcagcctcaacctccccaggctcaggtgattccctcacctcagcctcctgagtagctgagactacaggcatgcaccaccacacctggctaatttttgtattttttgtagagataaggttttgccatgttgcccaggctattcttgaactcctaggctcaagcaatccactccgcctgccttggcctcccagagtgctaggattacagacttgagccactgcactcagccagtattttttaaatgcaaagaaatggccaggcgctgtggctcacacctttaatcccagctacctgggaggctgaggcaggaggattgcctaagcccaggaggtggaggctgcaatgagccatgattgtgtcactgtactccagcctgggtgacagaacaagaccttacctcaaaaaagtaaataaaatgaaaatgcaaaaatgtatgtgttcgtgtgtgtttataaacatttacacatacaaccatttattcggtaatatttattgagcctcagttatgtgactggccctagaagtatgactgtgaataagatatccaaatatcctaatctcatggagcttatatccaagtcagaaaagaatgacaaaaagcaagtaaattagttaatttcaggcagtaataagaattacagaaaaaagagtttaaagagtgatggattgattgagttgagatctgacttcctggccatatgaagaccccatggaacagactgggatgaggttcactgttaatgttggttaattctgaagagagagcgggggttggttatgggggtttggagtggtggtgtggtgaggataaggacaggtaaagagcaacttgaacttactctgttgattgctgaattgtttgtatgtttttacaacacacatgcatgaatttgtgtattgtggaattcagacaactcgtgttttgtttgtttgtttgtttctgagacagggtctccctctgtcatccaggctagagtgcagtggtgcaatcatggctcattgcagcctccacctcctgagctcagaggaccctcctgtctcagcctcctgagtagctggaattacccacccaaactaccacacctgactaattttttaattttttgtaaagattggatctgtatgttgcccaggctggaactgaactcctggcctcaagcaatactcccacctcggtctcccaaagtgctgggattacaggcatgagccaccgcactggcccaatttttaaaaatagtaaaccagtaagaaagagaaaaaagacaaagagcatcagagctttacgtaatgtatgcaagctatctgttcacatttgcaaagacattcgcatgcaccagaagtacagagccgtgaaggtataggcctctttctgaccatgtgttctgggtctgcatgtatttacaattaagacaaaaaataaaggtggcaatgataatagagaaaagggttattatattatcctgtttactcatctccctgctacatgtgtctctattctcctgttactactcctgcatttttggtttttgaatgctatcctcatcagatggattctggcccagaatcctcctagagtccctgttgcagagtcaagtccaggcctctgggcctgatgttgagggccctttgcattctgagtttacatactaactttcagcattattccaagtcatgaatttcccattccagccactctagtgtgtgtcactctttcccagatgctgtgcacattaccctctgccatactgttgcctggagacaataacctggccattctacgcccctacctccagcctcacttattaaaatcacacctagtaatcttagcccaacaccctagtaatctaagctcagaattctctttgcctttaacaaattatttctcacaggcagacacacacacacatacacacatgcccgcacagtcctgagatcagtgtcaatgtggactcatgtttttttaaataaatatataggtacagataagtaaagaagtaattatggatactcaacatctgtgaaaaaaaggaaaagataaaaataagaaaaagaagtaattatggatatgtatgtatacatgggtttgtatacatacatgtatttcctagctctgtctactgttaggaggctagaagcagtgacacctgagtagcaatgaacacacctagcacctagatattggtttctgaattccatcctccaaaggaacccagggctcctgggagaactgttcattcctggctgaaggcagggaaaatgcaagatgcccctggagttaaccttatggtgccagaaggtaaggatgtgctaaaaaatattttttaataataaaaataatttttaaaaggagggggttcatattggaagaggtaggagccaacctgaaagagctccaaatgacttgagctggaacaacttgagcaacaaaataaataatgatagtatttaattataacacttaaaataatttttcataagtccacaccaatctaaataaataactgaattaaaaaaataaatacataactgaataaataaataaataaatggagaaaaatcacacctcttccttatagaaaattccagttaatacatgtagaaagaaggaggcaaatagaaaatcattgttagagcaccatagtaataattactgcgggtaagatctacctgtgaatgctaaaattaaggagtgaaagtttaaccagaaacatgatatttgtatgatttttaaagtatctcctccaaaatatttagtaaagaaaaaggggaaatccttagttgactgtggagaatattgtcagactccacctttgccaagcaatcaagactgatatcacttggcccggtcaacatcgtatatgcccaggcgtgtttcacctctgttcttcccaataaagcataacctcaatctaaacatgcgaaaacatcagacacccaaattgagggactttgttctaaataaccggccagtgttttcaaagctgtccaggttataaaaaaaaaaaaaaaggaaaggctgagaaattgttacagattggaggagactaaggagatgtgacaaataaattcagtgtttggatcttggaactgaaagaggagatttgtggaaaaactggtgacatctgaataagttctttagtttatttagtagtatttataccagggttaatttcttagatttgattactgttctcttgttatgtaagatgttaacacaagagaaagctgagtgaagaatatatgggaactctctgaactttttacacctcttctgtaaatttaaaatgatctcacaataaaaaatttaaaaacacagccagacacagtgggtgaaaatcagcacagtcaagcagctttgacaacacattttacccaaagagatgtgtgtttcagaaatgatggatgcttcaaaaaggaaaagggggaaaaaggaggacagggacctcatataattacagaaattaagtattatcttggaataacttctcaaaatgtatttggcttaaggaagtgaaaatttacaaagataaaaatgggtgaataaatacaatagagtacacataaagcaatctttattttaactgaaaaaatgcagtaatggtatctgtatttctctttttccttttttttttttttggagacagggtctccctctgttgcccaggctggagtgcagtggcatgaacatgcctcactctagacttgatctcctgagctcaagtgatcctccctcctcagcctcccgagtagctgggaccacaggcacgccccaccacgcctggctaactttttatttttttgtagagatggggtttcaccatgttgcccaggctggtctggaactcctggcctcaagtgatcctcctgccttggcctcccaaagtgctgggattacaggcgtgattacagcacccagcctctttttcctgttctttattatgataaatagaaatcacataaaatgtaccattttaaccatatctaagtgtccagttctgtggcattaaggacagacacactgttgtgctaaaatgtttgcatcttcccgagctgaaactagtgtctgtattgcttgcacctttccattgagagcatcattttttttttttagaggtggagccttgctatgttgcccaggctagtctcaaactcctgggctcaagctgtcctcccattttggccttccaaagtgctgggattacaggcgtgagccaccatgcctggctgggagcatcatttctttagttataatttgattttttatacatcaagactgtgactttctgattctgtatagattaatagttgatattttcattatattcaagtctttttgtttgtttgtttaaagacagggtctctttctctcacccaggctggagtgcagtagtgtgatcatagttcactgcagcctcaacctcctgggttcaagcaatcctcctgcctcagcctcccaagtagctaggaccacaggcacatgtcaccacacctggctctttttttttctttttttttttgagactgtctggctctgttgcccaggctggagtgcagtgacacaatctcagtttactgcaacctccaactcccaggttcaagtgattctcctgcctcagcctcccgagtagctgggattacaaacgtgtgccaccatgcccagctaatttttgtatttttagtggagatggggtttcaccatcttggccaggctggtcttgaactcctgacctcgagtgatccgcccgcctcagcctccaaaagtgctgggagtacaccgcacccggccccagctgtttgttttttatgtatgtaggtgatatcttctcttggcacaaaaagagtgtttctctttttcttctgaaactgttgtttgctcttctctgtttccacctcctgaattaatcctctttaatatttcctctctctcctgattatcagcaggctcattttccaaagtttccctctctgaaattcacttctgcttgaatctgaatgacaactttgtctttgcttctgttcttttcctcccctagctctctttctagccctttagtttgcagggcattttcgaaatgcatgagaggtaaggaagtggaatgatgtgcgtagcaacctagctgtcttgtcaacagaggcctagagggtgacgtcccagacatgcaagcaaaagcaggatattcccgtgattggcaatgcagtggttttccttcatgaacttgagtcttctgcacttcatttgttcacagatcttctcgtcacttagaacctgtccttctcttctacaatcagcctcaaagcgtatttaaaattatagtggttatccatcctggctaacacggtgaaaccctgtctctactaaaactacaaaaaaaaaaaaaaaatcagccgggtgtggtggcaggcgcctgtagtccctgctactaaggaggctgaggcaggagaatggtgtgaacccgggaggcggagcttgcagcgagctgagatcgcgccactgcactccagcctgggcgactgagcaagactccatctcaaaaaataaaaaaataaaaataaaataaaataatagtgtttctgagtgagctcaacagttgaattccttagcttgtgtaaatatttattggatgcctagcatatattatgtcaggcatgggccaggcacacagactttagatgttacctagatacagaagatcccagccctcaaggggtttctattctagttagaggaggcaagcaacagatgagaaaataatttaaccaaaggccattgactgtgagacatgacggaaggaaggaagtcgggtggtatgatgaagagaaaatggaaggaaggaagggggagccctctgggaaaatctttctaagaagggatgagtcagacctgagtgttcaagaataatgagtgaagtgctctgcctggcatttgggaagcatttggtgacacttcaccagcaggcctgggaagttgcttatcatgaacagcaggagctccctgaagctttacctgcagtctcagggaaagagggcagaatgcgcagtgactgctaattcacctacatcagcagatatgattgggaagcattaattttcacactaatcacagttttaatactgcactaatcacagttttagtactttaggcaatgatcaaaaacaagagttcacaaacctagaaactgactaaagcatcaggggcaatacatgtatttcataatcaataaagatgccatttcttttggctgggtgtggtggctcacacctgtaataccagcacttttggaggccaagatgggagggttgcttgagctcaggagtttgagatcaatccgggcaacatagcgagaccttgtctctccaaaaaatttaaaaattagctaggcctgatgatatatgcctgcggtcccagctactggagaggctgagatgggagggtcagctgaacccaggaagttgaggctgcagtgagccacgattgtgacactgcactccagcctgggtgacagagcaagaccctgtctgaaaaaaaaaaaaaaaaaaaaaaaaaaaaggatgtcattttaaagtacatttgagggccttatcatcttaatgaacttaggaaataaagtgagagagaagacatcccagtcgtagagaagactaagtcattccagaaggcatgtcttagttcaggcggcaagaacacaagaccataagttaggtagcttataaacaacagaaatttacttctcggttccagaggctgggaagtctaagataaaggcaccaaaagattgattcagcatctgtctggtgaggacctgcttcctgattcatagatggtgccttctcaccgtgtcctcctgtggtggaaggggtgagagagctctccgaggccttctttataagggtgctaatcctattcgtgagggctccacccttataaccttatcaccttttaggactctacctcttaataccatcaccttgtgggttaagattttaacatatgaacttgggggaaacataaacatttagtccatgataagatgattcctttgttaaattagaaatttatagctttaattttgtttttatttgtttaagagacaggtctccatctgttgcctaggcctctgtgcagtggtgtgatcatagctcactgcagcctcaaactccagggctcaaatgatcctcccacttcagcctccgaagtagctaggactacaggtgcacagtaccacacccagctactttattactattattgctattattactattattaatattattgaagagatgaggccttactacatggcccaggctgttttcaaactcctggcctcaagcgatcctcccacctcctgctcccaaagtgcccgatgagctaccacacctggcctattgtttcaattttgtgttttctttctgacagaggggacttaaatatttgtttctatctaagcaaagacaaagatagaaacaaatatttaagcgcatctcagatagagaagaccctggctgtagacggggagagaattaggagctcattggctttctattaggattatttagctccctatccactgctgactttgacggtaatagagcagtaatgaaaggtgtaaggccctggagccaaaaaaaaatggattgtgctacgcggtggaggaacactggtgacagcaaactaagttggagaggtagacggagtgtgtatatcctatggagcctttcatagactatggtacaggtgtgactatttgaaatgcagtgaagaccgggcacagtggctcacacctgtaatcccagcactttgggaggtggagatgggtggatcacttgaggtcaggagttctagaccagcctagccaacatggtgaaaccttgcctctactaaaaatgcaaaaaagtagccaagtgtggtggtgggcacctgtgttcccagctactcaggaagctgaggcaggagaatcgcttgaacccaggaggcggaggttgcagtgagccaaggtcacaccattgcacttccagcctgggcaacaggagcaaaactccatctctaaaaaaaaagaaagaaatgcagtgaaaggccttggaggggtttgaggataaaagtaggatgatttattgtaggtttttgtttttgtttcaaagccctctggacattgcataacgatgtaaggatcaacccatcaggaaggcgtaaccatctcaaatgagtgtacacttcataacaaagcttccagttccacgaagcaaaaacattcctagacaaatagagaaaaagataaattcacagagttggagattccaacattcctcttttaataactaactatcattagtgggaaaatgattaatgattccctaattatacctgttgatataaatgaatttgcagtaactccacatttctccatccctttttctttgtgtctggatgtaaagctccatggagctcgtgaaaaccagtgaggatatagaagaccttgacaacactatcaaccaagtgacctcatcaacagctatagcatttatagactactcctcccagcaactgcagcataaacttttttttatcaaatgtacagggaacattcaccaagataggccgtatcctgggccataaaacaagtctcagtcaattcgaaaagatggcaatcctgcagtgtgctccctgactacaagggagttaacttagaagtggataacaaaaagatatctggaaaattccaaatatttggaaattaaacaagacacttgtacagaactgatgggttgaagaacaagtcacaatggaaattaaaaatcccgggccaggcgcagtggctcacgcctgtaatcccagcactttgggaggccaaggcgggtggatcacgaggtcatgagatcgagaccatcctggccaacatggtgaaaccccgtctctactgaaaatacaaaaattagctgggcgtggtggtgggcgcctgtaatcccagctacttgggaggctgaggcaggagaatggcttgaacctgggaggtggaggttgcagtgcgccaagatcatgccactgcactccagcctggtgacagagcaagattctgtctcaaaaaaaaaaaaaaaaaaaaatccctttgactgctctgtgaggagtggattggagggggcaagtgcagacacagggagcccagggaacagaactttacagaattctaggagaactgtcatggtgccttggacttcgggtgaggaagcagagaaggagagaaatggacagactcagacattttggaggtagagcctgtgtgacttgctgaggattggatgcgggcagtatgggtaggcgaggaagcaaggatgacctagaggtgtctgggtcaagtcattgaacatatcttcctgttgctctcaggattaagtccaaatttgtcaacatagttcctgatcgggcacctgcccacttggacagcctgatctctcacccctcctcccactgtaaactccagccctggagcaactggcagtcctccctttgccatgccctctcttttcacatgctcttccatgtttgccctgctctccgcttatttatctcttagcttagatgtcacttctgctgggaagctttccttacttttcctccagcctggcttaagggctctgctttgtgcttctgtgctaaccttctcatcatcactttgctttgccccttttctgtctcccccattaaagctcctgtgaacagggaatatgtatcattctttctttctttttcttttttttttttttttttttttttttttgagatggagtcttgctccatcaccaggctggagtgccatggggcgatctcagctgactgcaacctccgcctcccgggttcaggcgattctcctgcctcagcctccggagtagctgagaccacaggcacgtgacaccatgcccagccaacttttcttgtatttttagtagagatggggtctcaccacgttggccaggatggtctttatgtcttgacctcatgatccgctcgccttagcctcccaaagtgctgggactacaggtgtgagccacagtgcccggcctcattctttcattactactactaccatagccagttgctggttacctgggctgtcagtcaggaaacctagccctcatgagagtgggatgagaataagatcacatagcatttattgagtccttgctgtgtgtgtgccaggggcttcacacacatcatctcatttaatcatcctggcagcattatgaaatgggttatcaatcccatttacaggaagaggaaactgagacttagaatgcttaagcaggccaggcatgtaatcccagcactttgggaggccaaggcaggaggatgacttgagcccaggagttcaagaccaacctggcaacaaaccaagagcctgtctctacaaaaaaacaaaaaaattagcagctgggcacagtggcttacacctgtaatcccaggactttgggaggctgaggcgggcgaatcacttgaggtcaggagttcaagaccagcctggccaacatggtgaaacctcgtctctaataaaaatacaaaaattagccaggtatggtgtcacagacctgtaatcccagctactccagacgttgaggcaggagaatcgcttgaacccaggaggcagaggttgcagtgagccgagatcacgccattgcactccagcccaggcgacagtgcgagacttcatctcaaaaaaagaaaaaagaaaaaattagctggccgcggtaactcatgcctgtggacccagctacacaggaggctgatatgagaggaacacttgagcctaggaggtcaaggctcagtgagctatgattgcaccactgcactccaacctgggtgacagagtgaaaccctgtctaaaaaaaaaaaatgggccaaaagagcttgttcaagatcacatagttagtggtggaaatggaatttgaacgtaggttgccagatttcaaacctaaaacttttaaccaccaagtcatactgtcaaactcagactagaattacaacaaattgaaaatgaatttgaaggtgcactggtgagcccctgatcgtcttgctgcccatggccagtctttggctcacacttggtgcagatggctgagcagggttcactggaggtgggtgcccaggttagggtggtgcatggagcaggagcaggaagatccattacattatagccagcagcatcgggtacagagtactattgtgtgctgccttttaaccccgcccctcactctaaaaaaacaaaggcctcattgctagtgctggctaatttccataaaggaattagaatggctaattttatatcctttcgataaatatcccacatcccattataacatggccaacaatgatcctcttcaaattaataccagcagtaattgctgcagaattagcctctagagatgcaatgttatcaaaaagtgattttttttttggtcttttgttttttcagataaagagtaaaaagtccttatgtacttattttcagtccaggtactgagtggatcatattaggaaggttcaaaaacttcattgcactgcttgactctgactacataaaaggctttttgtggttgacacgtgttttgaagtgctgtgagcattgatgcgaatggtaactaattatacttgacattttaaaagcgaaaacacagagacttcttacaaaaccactatttattgagtacttactatgtgccagccactgtactgagtacttcgtgggtttcatttcactgcatccttttaacaacttgggtgggtggtaaactgaggaacttgtctgaagtcacgagggtattacctcaggctgccaagacttgaactcaggaataccagactcacgattcttaagtgctgttttctcacatttctctgagatgtacccttagggctacttttgtgtgttcctttgaaatatgatctacataccaaaatgagcatgctgaaactttaaatgcttagtttaagaagcagtcaatattcagaattcttcctaattttgaaattagaatcttcaaattctgtttttttgttttgttttgttttgtttatttttttgtttttttgttttgttttatttgtttttgagacagagtcttactcactctgtctcccaggctgcagtgcagtggcacaatctcagctcactgtaacctctgcctcccgggttcaagggattctcctgcctcagcctcctgagtagctggaattataggcacgtgacaccatgcccagctttttttttttttttgagacagagtctcactctgtcacccaggctggagtgcagtgtcatcatttcggctcactgcaacgctcacctcccgggctcaagcaattcttgtacctcagcctctcgagtatcttgaattacaggcacacaccacaacccccggctaatttttgtatttttagtagagacagggtttcagcatattggccaggctggtctcaaactcctgacctaaagtgatctgcctgcctcagcctcccaggcaccgtgcctggcttagaatcttcaaattcttaaaatggatgttaagataatcttcatttatgaaatggtagatgatcagtatttttaatttcattttattggtttgcaacatccatttctctagtaggtgaagaacaaaagataaatcctgtggctaattctgtgggcttcagaattactcaggtctgaagttcctttgatacttgtatcgtgtagcacccatgttcatcagttttaaatattggggatcccagtggcatgttatactagtctgcttgggctgccgtaacaaaatacaagactgggtggctgaaacaacagaaatttattttctcatggttctggaggctggaagtctgagatcagggtgtcagcatggtcaggttgtggtgatggagcctcttcctggcttgcaaatggccaccttctccctctgtcctcacatggcagagagagagagagcactctctggtgtctcttcttataagggcactgatcccatcttgagagccctatccttctgacctcagctaaacccaattatctcccaaaggcccctttccaaaagccatcacattgtgggttaggacttcaacatatgaatgttggggacacagacattcagtccataagtgttatggtgttgggatgatgttaggccaaggatacaggaagattcaaatccttccttggttaagctaccccaaagtttgaggaacaatggcaaaacaaagcaaataatgctactactagctaaggctttgaagtctcaaatcacccagcaaagctctggaaagctaagcagttcgcacaggagaactaatttacctaaggtggcttgaatcatccaagcagaggttagcaaaccacagcctgtgagccaggagtggcttttacatttcatatggttgaaaaatcaaaagaaggatgttttgtgacatctgaaaattatatgaaattcaaacttccgtgtcctgaaataaacttttattaggacacacagccactctcttaatattattattgtcattattattattattttgagacagagtctctgtcgcacaggctggagtgcagtggtgtgatcttggctcactgcaacctctgcctcccaggttcaagcaaccctcccaccttagctccctgagtagctgggactatagacgcatgccaccatgcctggctaatttttctattttttgataaagatggggtttcaccatttgcccaggctggtcttgaactcctgggctcaagctatctgcctgcctcggcctcccaaagtgctaggattgaaattagaatcttcaaattctgttgttttgaagaaactgtgcccggcccactctcattgtttatctgttatcagtggctgctttcatgttacaacagcagatttgaggagttgcaacagagcctgaaatatttactatctggccctttagaggaaaaaggttgccgcatgctgatacacaaacaaagctagccaatgacttgcattgcctaatcccaagaccaagtcttagctaaaaatacattttaggcgggtcacagtgactcacacctgtgatcccagcactttgggaggccagggtgggaggatcacttcagtccaggagtttaagaccagcccagacaacataacaacacctcgtctccacaaataatttaaaaagccaggcatggtggtgtgtagctgtcgtcctagctactcgggaggctgaggtgggacgaccacttgagtccaggagattgagagtgcagtgagccaagagcatgccactgcactgcaacccggacaacagagcaagaccctcatctgcaaactatatatttttttaattttttattttgaaatggagtcttgctctgttgccaggctagagtgtagtggtgctatcttggttcactggaacctccgccccctccccgggttcaagcgattcttctgcctcagcctcctgagtaggtgggactacaggcgcacaccaccacgcccagctaatttttgtatttttagtagagacagggtttcaacatgttggccaggatggtctcgatctcttgacctcgtgatccgcctgccttggcctcccaaagtgctggaattacaggccactgctcccagcctgtgtgtgtgtgtgtgtgtgtgtgtgtgtgtgtgtatttgtatttatatatatttatatatattttaaaagatgcagggccccccattaacactagaagaaatggatccaaagatggagagtatttacccccaaggcttggtatgagctgctttagagattgtccacttcaggttgcagtaagccaagatcaggccactgcactccagcctgggcgacagagtgagactccatctcaaaaataaataaataaataaataaataaataaataaataaatagagattgtccacttcaggttttctaatgccacactggatgttccaaggaaaacctaagagagaaaaacaagtggccttattggaagatggaagaagtgagagccacaataatttgctgatgttttcttttttttgtaagttcaacccttatcaaatatagtccagggtcccagaattgggctaatccagaccaagatttatcttcttttaagtctctacctcttgattgacactcattcctcaagtcaaaggagaaggaaggaatggaagctaagagtggtacctttccagaatttaatacgaatcaacaaaagttggtagcattatttacctatcaggctacttcctttgtttctgacctgtttttgttttgttttcttccctcctctcccctttacacccactccttacacacaaaggtgattttaaaggatgtggactcacttctctacgtggacaccgatgtcctctttctgagacctgttgatgacatctggaagcttctgaggctgtttaattccacccagcttgcagccatggcccctgagcacgaaatccccaagattggctggtacagccgctttgctaggcatcctttctatggctctgcaggagttaattcaggagtcatgttaatgaatttaactcggataagaagtacccagttcaaggtaaacgagtgctttaaaattccttgtttaaagactgggagttggtcttgtcaacagtggcactaccagagtgtcaatatgctgattttggaaattgggtggcctataggtgaggataaaaggaaccagagaaaagtatttagaaaattatagaatatttgtttattcaggaaaagctcagatggcaatggaatttaaagcttcagcaaagtcgccattcaggaatactatgttgcatttctgaattccataatgtttgaacgcttcatacccaatgcttcaaagactatgtaaaatttcttcaaattaccctagggattatttatgtaagtccgtgacgatatttgtataaggatgttcgtgatctcatcttttatcctagcaaagaagtggaaagaagctaaaagaacatcagtagagaactagtcaaaaaaaattatcctcctggccaggggtggtggctcacacttgtaatcccagcactttggaagaccaaggcaggtggatcacttgaggccaggagtttgagaccagcctgaccaacatggcgaaaccctgtctctattaaaaacacaaaaattagccaggaatgatggcgcacacctgtagtcctagctattcaggagcctaaggcaggagaatcgtgtgaacccgaacagcagaggttgcagtgagccaagatcacgccactgtactccagcctggcgacagagactgtgattatttgtatgccttagaaatttccagaagaattaatggggcatggtgtcacgtggctgtagtctcagctacttgggaggctgagatgggaggatcgcttgagcccaggaggtcgaggctgcattatagccactgcacttcaccctaaacaacagagtgagaccctgtctctaaaaaaagaaagaaagaaagaaaaagacatgtccagaagaatacctaagagaccattaattgttaactgtggatacgtctggggaaaatgggaatgggatatggaagaagaatatttttacttttttattttatatttttgtgtgctgtttgaataattcagtctgtgaatatgttacttttattttaaaagtaaatcattgtttaagacaaggaaaggtgtttttccttaagatacctgaactctgttatctgtattttgttccttcacctcacagtgaggaaataagcctaagaaagatgttcacctaagaaaggtgaagtagagtagagaatcctgaagtagagactgctgttgagaaagacttcgcctcttaggtgtggggactcacgcctataatcccagcactttgggagggaggtgggtcactcgaggtcaggagtttgatatcagcctcgccaacagggggaaaccccatctctactaaaaatacaaaaagttagccgggcgtgatggcgtgcacccgtagtctcagctgcctgggaggctgaggcacgagaatcgcttgaacccgggaggtggaggttgcagtaagccaagattgtgccactgcatgccagcctgggcgacagagcaagactctgtctcaaaacaaaaacaaaaacaaaaacacaggaaggaagggagggagggagggagggaagagaagaaaggaaggggttcaattccaggcatggttttctgagtagaaaccataggttcaactttcagtccctggtctatctagtatccgtgtgtacagctgaaaaaagcgatacaatcaacagcccaaattttgctttgttctgtgacctgagaatagcaggacccctcctgtatttgtttccctcctctgaagggaagaaaactagtccctttacattgtttctcagtggacaaaatgtatttgctttgcttcagctgttctgatggttttcttttttccagaacagcatgattccaacaggcctggcttgggaggacatgttgtaccctctgtaccagaagtacaagaatgccatcacgtggggagaccaggatttattaaatattattttttatttcaacccaggtaggttatctttggagaatgccttttgtgtaggagtacactcagcacaccccacggagcacattccatgcccgggttgctattgactaggcttgaattgtgcacagaggagcctgtgttccccagcgaagtttgccctttcatccgcccccctgggtatctgatggaggcggggccttgcactactgacacaaaaggccaaatgttgaaacttccaacactggactcatttttagagagtatcttttaggttttgctataccattcttctaagaagtgcagttaaaattgatgtgaggcgtgaaactaaatggaaatattataatctaggcgggagaccctgtagcctgaacaattgctagattgaagggaattgattctcagggtccttggagttcaggaacatattcagggtcaaaacatcctagaaaaagaactcagatccccaaatccgttttgcttttcatctgaggcaaaagaaattcttcttatattgttaggtggatgatttggtggggtagagggaaaaagggagatgaacatttctggtctgtgtgtttatattaacacgtaaagctaataaaattcttttttcctcttccttgttaaaactttattcttattaaaaattaaaactcccaggcacagtggctcacacctgtaatcccagcactttgggaggccaagttgggcggatcacttgaggtcgagagtttgagaccagcctacccaacatggtgaaatcccatctctactaaaaatacaaaaaaaattagccagatgtggtggtaggcacctgtaatcccagctactgggaggctgaggcaggagaatcacttgaacccgggaagtggaggttgcagtgagccaagattgctccactgcactccagcctgggcaacagagcgagactctgtctcaaaaaaaaaaaaaaaaaattaaaactatgttttcttcttgagagagatctttgggcaaaaaaagcaatccttaccctacccttttcaggcctttccttttgatttaaaaatcctgaagtagagactgctgttcagaaagactttgcctgtgtttgtttgtatgtcacccttggaacacatattgtgtacctttttaaaaaaaattctggaataaaactcaatttcatatgtctttggatcaaaaaggatcaaatcctcgaaaagaaaaaaaagcaggttgatacagagtttcttggaaagattcccaataccaatttagtagaggaaaggggaatgtcttagctgttcacttgtggcttttttttttttttttttttgggacagagtctggctctgtcgcccaggctggagtgcagtgacacaatctcagctcactgcaatctctgcctcctgggttccggtaattcttctgcctcagcctcccaagtagcggagattacaggagtgtgccactatgcctggctgatttttgtatttttagtagagatggggtttccccatgttggccaggctggtctcgagctcctgacctcaggtgatctgcccacctcctcctcccaaagtgctgggattgtaggcatcagccacggtgcccaggtatttttttttcttttttttttttcttaatgagatgaagtttcactctgtcttgcaggctggtgtgcagtggtgcaattatggctcactgtagccttgacctcctgggctcaagtgatcctcccacctcagcctcccaagtagctgggactataggtgtgcatcaccacacccagctttttttttttttttttttttttttttttgagagggagtcttgctctgtcacctaggctggagtgcagtggcatgatctcggctcactgtaacttctgcctcccaggtttgagcaattcttctgcctcagcctcccgagtagctgggattacaggcacccaacaccacacccaactaatttttgtatatttagtagagacagtatttcaccatgttggccaggctggtctcaaactcctgacctcatgtgatccacctgcctcggcctcccaaagtgttgggattacaggcatcagccactgtacccagccaaatttttttaattttttatagagattggggggcagtctcattatgttgcccaaggtcatctggaactcctgggctcaagcgatcttccggcctcggcctcccaaagtgctgggatttcaggcatgagtaaccaggcccagcctcttagttcatgccttaatccatttcactgtgacagtaggtctgcatctcttcctttttcttcttaggtaggtttcatcttttttttttcttgagatggaatctggctctgtcacccaggctggagtgcaatggcaccatctcgtctgactgcaatctctgccccccaggttcaagcaattctcctatctcagcctcccaagtagctgggactacaggcatgcaccatcacccctggctaatttttgtgcttttagtagagacagggtttcgccatgttggccaggctggtctcgaactcctgacctcaggtgatccaccctccttggcctcctaaaatgctgggattacaggcatgagccaccatgaccggttttgtgtttgtttgtttgtttgtttgttttgagacggaatctcactctgtcacccaggctggagtgtggtggcacgatctcggctcactgcaacctctgcctcctgggttcaagcgattcttctgcctcagcctcccgagcagctgggattacaggcacctgccaccacacccagctaatttttgtaatttttgtattataggcatccgccaccatgcccaggtaattttttgatcctcctggtggatcacttgagggattataggcgtgagccaccacacccggcccttttctttaaatactgcattttcctctttgtcatgtggccaaaacgatctaatttaagtctccctgtccatattcccaaattgaggaatccaaaagattcacacagttgcctccccagttcctcttagcctgttgctgattatttgaggatgtgattagtgagtaaataaataatacccgaaggcagtcgtaagcagctttgcaattaaacaggagtcccttgtctttaactggggctgaaaccagaggagtttaattgcttcttcactctccatctgagatccattgagtaaaacaggatattggaaaataatcgtgacgttgttctaaatcctggttctgcacagtatcaagtaaataaccaagttttctggttttagatgagtgattgttaggttaactccctgactgtccttcgtacagcctgcatttgatcttcctatttcatactttacccaggtacttgattaaacatgggatctttgaactgagatccagcaatatctatcacattgtaaggtttctcttcatgtatattgattgcagagtactttccacaaaccagaacaaactgtatttgaaaaaaagatttgtcacctttatccctggaaaggagagagggagacagtattggccacggcacagcagataaacatgtttattgttatggttcttcaggttgccatgggtgaaccaatgcacataaaacctgtagcacacatcaggaaatgttgtcattattatagtgtcttgtatctgataacaccgctttttaaaatgtgtttaaaagtcattagctagaaagtgttttaaaactcttgctataattagatagtaaatgcctgtgggtgcataattgcagtgctgggtaatagactgacttgagatagctgaaacgcgtgggggctttcaggacagttcacaggacatttcctggcaggtgagccaacgcagcttcatcaaggggtggaaaactgagttcacactcttaaaggtgagtctgagtcaagagcagagttctatagaagggataaatctgacaggaaccaaaagagaattctatataggaagatgtgtttagatgaatgcacttaggtttcagggaacacagctccactcaggccagctaagtgagggcagatactgtaagaggccaggggcagtctcatgatcacacgagtcaaatcaagccaggcttcatgagaactggccttgggaagttgccaaggaccaaagtagtttcttcatctctcagaggcctcatggtttctgtgatctttgcttctctccgtgccagtctgattctattctgtctctcagaccacattctctgtttgcccatggcccaacctgattgtcaaccccaagtgaatacattttcacaagtccacaatcaatgatgatggatctcctctgtttcctaatttgaattcttagcaaaaaaaaaaaaaaaagagagagagagagactggcccagcccagctgcgactgaattctctttaatttgggagaccacccttgatcaggctctagaagggcaaagtcatgaggcattttcctctctcaaacgtgaccacataggtctgctccttctacaagggcaatttctagaaaactgagatgtgggtagggaagaaaatgaaaccagccaagtataagtgataaggcagggcatcaggctagcgtagaggcagaattctgcctgagggaagagagaagagctgaaatgcccatggagtacacgtagattgtgagtcaagtgtgtgatactagggaggcaggaggagttcatgggaacctcaaggagcaggactcactcacatgggacaagtctcttcaatggctccaggagggccttattctcatcctgcctggggtcactggagccctgcccttgagcgtgcaaccacactgtatattcaccacaccaaagcacccagcaacaggcagttatgagtgctgcattgtgggattgacaagcccagttatttcatattgggactgttctaggaaactggtaacaaatcactgtttcaggagtctaggaagttcatgagccctgatgtaaaacgcaagagaaaaggataaaaattgtatggtctgtgtgagaaggggttgtgtcaactttgtgtctttcacagtgcaaggctcagtgctttaaatggagttggtgttcagaagtgttgtttggttgaatgaatggaattaagagaagggagtgaaggggaaaagtattaataaatggaagagaaagagccacagcaaggaaaatgagagaaaagagaagttcaggagagaaaggagatagaaagctggagaaagggaaaagatgcatttggtgaaaggaggtataagttgcatttcattcattcattcagcactagtttttgagcactatgtgccagccacagggctaggtcccaggaatatggcaacagatgagttaaacaaagttactggtttcatgaagcctaccttttgttggaggaggtagaaggtagactcctaaagaataactagttgttcaaaatcacaaattgtgataaatgagatggaggaaacaaatgaggggttgagagagagaccctcaaggctggagagagaagagcttccttagattgtgtgatcagaaaagccttctcaaaaaaagtaattgccttttttggaacaaggagcattctgaaataaggaaaaagagaatgctaggaaatctcagttccaggatgggacattaaaaaaaaaaaacaaaaaaactattagcagagcagttgaacagcctccgttctattgatacagagtattaagcgaggccgggtgtgggagcttatgcctgtaatctcaacgctttaggaggctgagcagggagtattgcttgaggccaggagtccaagaccagcctgggcaacgtggcaagaccccatctctactaaaaaataaaaatacataaaaaataaaaataaaaatgtagcaagcctgtattaccatgaagttaaaatgatcaggcataaactagttcataatcttagagatcccaagagtatgaaataatcagaaatataaggagaggagtaggctgggcacagtggctgacacctgtaatcccagcactgggaggctgaggcgggcagattacttgagataaggagttcgagaccagcctggccaacatggcgaaaccctgtttctactaaaaatacgaaactctggctgggcacagtagaggcctgtaataccagcactttgggaggccgaggcaggcagatcacctgaggtccggagttttttgtttttttttttttgagacagagtctcaccctgttgcccaggctggagtgcagtggcacaatcttggctcaatgcaacctccacatcctgggctcaagtgagtctcctgccttagcctcctgagtagctgggattacaggtgtgtaccaccatgcctagctaatttttttttttttttttttgagacaagagtttcactgttgttgcccaggctggagggcaatggcacgatcttggctcaccgcaacctctgcctcccaggtccaagcaattttcctgcctcaccctcccaagtagctgcaattacagtcatgtgccaccacgcccagctaatttttttgtatttttagtagagacagggtttctccatgttggtcaggctggtctcgaactcccgacctcaggtgatctacctgccttggcgtcccaaagtgctgggattacaggcgtgagccaccatacccggacaaattttttaattttgtagagacgggagtctcgctgtgttgcccaggctggtctcaaactcctgagctaaagcaatcctcccaccttggcctcccaaagtgctgggattataggcatgagccaccatgcccggccttggcttctctttactgctgttaaatcgaggtgaaatgtttttctaacttaccacgattatagagctagatgggggtagaagccagatttacacctctgcacttctgattccagagtctttgccctttctgtttgttttctgccttggagtgcccctcactgggctcagtcctctaaggaggttgcaaagagagaaaaggtttctctctttttttttcttttcttttttttgagacagagtcttgctttgtcgttcgggctggagtgcagtggtgcgatctcggctcaccacaacctccacctcccaggttcaaacaattctcctgcctcagccccccgagtagctgggactacaggcacatgccatcatgcctggctaatttttgtatttttagtagaggtggggtttcaccatgttggccaggctggtctcgaactcctgacctcgtgatccgcccgccttggcctcccaaagtgctgggattacaggcgtgagccattgcacccagccgagaaaaggtttctttttgtaagccctaaactacttggaaagaggcaaaaactctcatcactaatctaaactccatgaaagcagggactggatttttctattatttgtccacagtgcacacagcagacactcaacaaatagtcattgattcaatcaatcagtgtgtttacaaaaacagactcaagcacagtttattcaactggaaactttagaaggtgcttaaacaagacaatgtaaatgcttgggtgagcatcattaatgagtgatatgacccattgggtgacaaaaggaagcagttgggtgtggccaggcacagttcaaaagcacttttagatattttcctttatttaatcctcacatccagcctctgcattaaattgcagaaaggtcaggcagctaatagaggagttgtgattcaaatctatatagggtgacttgaggatggccactactccatcccacttagggactatgtatgtgcaaatgttcaggtaaatgcaagtaagggaatgtcatggtggaatggagttctcctgagaaaagagaaatgtcacagtgtgttatgagcaattagaaatttgataaaggatgcctaaatgtcactgtcctataaaagactgagccctgaaaacatacacagcctgccagatgggatgggtgacaatcacttcattatttgctttccatcttgaagctttctgtaagtaatcactaagcaatgatttttttctgtgagacaggaatgccatcaacccaatgaacaagcacatcttgaagttgcttttccaatggtggtggtgttactgatttgctgtaatcctctcttgtgctctctcacagggtctttctcatgatcagcaacacacatttgcagagagctttgatccatactcctctgcccccaaccctgaaaagcatcaagccgagaagccaggaagctagggggtcatgaatttattgctaattgtataattctggtcaccaagaggaaattttctgaatccaataggattagggcagagtttctcaacatcagcactattgctattgttggggactgtcctgttcattataggatgttcagagcacccactagatgccagtagcagcctcccccatgtataacagtcaacagtgtttccctccaaatattgccaaatggccctggggtagaggagtagggagggggcaaaattgcccctggttgagaaccaaccagggtttagagatacaaacacacctgtgtacatatgtgcacatatggccatggtgcatatagttaccttggcacagggcttttttttctttgctttttgctttggggtttttctctttcctgttgtaggtggggtttttttgttgtgttggtttttgtttttgagatggagtcttactccgtcacccaggctggagtgcagtgtgtgatctcagctcactgcaacccctgccttccgggttctagattctcgtgcctcagcctcctgagtagctgggtttacaggctcctgcctccatgcctggctaatgtttgtatttttagtagagacagggtttcatcatgttggtcaggttggtctcgaactcctgacctcaagttatccaccaacctcagccttccaaagtgctgggattacaggtgtgagccactgtacccagccgaaggtgggggtttttgctgtttttttttttttctttggttttttgtttgttcttaatctgaagcagaatctttactttaatcttgactcctcttttttagttctgtccattttataaaacctttccaaagagttgattacaactgctaacactatttttgacatttttttgtgtgtatctttttttttttttttttttttgatacaggatctcactccgtcacaggctagagtgcagtggcatgatcatagctcactgtaacctctaactcctgggctcaaggaatcctgccaagtagcttcaagtgtgccaccatgcctggctaatttatttttgtaatttttttggtttgttcgtttttttttgttttgagacagtcttattttgttgctcagggtggagtgtagtggtgcgatcttggatcactgcaacctctgccacctcctggctattctcccgcctcagcctcccaagtaggtgggattacaggtgcgtgccaccatggctggctaatttttgtatttttagtagagacaggtttcgccatgttggccagactgatctcaaactcctgacctcaggtgatttgcctgccttggcctcccaaagtgctgggattacaggcgtgagccaccatgcctggcccagctgctaatttttaaaatttgtatggagacaggggtcttgctatgttgcccaagctgttctcaaactcctgacctcaagtgatccttccaccttggcctcccaaactctgggattacaggtgtgagccaccacacccagccagtgcaactgctaacattattgaaccactactgtatgtttgataccctgctaatcattttacatgtatgtttaaagtttaatcatcaaaataagatagaggttgtattattcccatttacagatgagaaaacagaagtacaggaagttaagtgactagacatggatttcagtggttttgagtgagagagttgagatttggacccaggctgcctcgtgcctgtgtttgctttcttatttaagatgcaacactctcttctttttttggatgaaacctacatcatcactgtgtgccccttcaattcttgatctcagaattttgacaaatggggcaaaatttgatctatgagtaaaaaatcacactcctgtactttgaaattacatgctgtgtacagttagtggaaacagtttaatcgtgccacatgtgcatgagagctggcactaaccgtggacatatatgtctttctctttttaccaccagagtgtctctatgtattcccctgccagtggaactaccgtcccgatcactgcatgtacggaagcaactgcagagaggctgagcatgaaggtgtgtctgttctgcatggaaaccgaggcgtctaccatgacgataagcaaccaacgttcagagcactctatgaagcaatacgggatgtaagtgtgcccttgctgctgttagcagatgtgcttatcagcatgaagcaatattggcgctttagtcacctgtccctttgaaggccaaatattcccaaagcatagagttataccagttattcccgacctcagtcacgctctgtcactatatcctcttgccaccttgtactatgtcatatctacttgacttatttccacgtacaccattcattatcttttacttaaccaaatttactttaggaggaaatttctgttttttgtttttgttttctgagatggagtcttgctctgttacccaggctggagtgcagtggtgggatcttggcttactgcaacctccacctcctgggttcaagtgattttcctgcctcagcctcccaagtagctgggactacagacacgcgccgccatgcctggcaaatttttgtatttttagtagagatggggtttcaccatgttggccaggctggtctcgaactcctgacctcaagtgatccacttgccttagcctcccaaaatgttggtattacaggtgtgagccacctactttaggaggaaatttcatgtcacaaagacaacttctgtgccttttgccatagtgtaaggtaacacataggatcaagattagacaataaaaagaaaatgatattactcagttctagctaaatacgttgcctggttgccaactccaatctgttactcaatcaggggtcaaggtgttcagttacaacaaggagccaaactaaaagtaacaatcaagcctttatttgcttaactgcagaagtgcatgcaagcagcagaaagaggccctgactccccagtcttccatttttccccaccaaagggtacaagataagagtcaagtgcatacagcacacatggcaggaaccttctcactgccaaggggcactgaagaaaaggttcttggctggatgcagtggctcatgcctgtaatcccagcacttggggaggccaaggcaggtggatcacgaggtcaggagttcgagaccagcctggccaatatggtgaaaccctgtctctactaaaaatacaaaaattaggcttggcgcagtggctcatgcctgtaatccctgcactttgggagggcaaggttggcggatcacgaggtcaggagatcgagactttcctaacatggtgaaaccccatctctactaaaaaatacaaaaaaaaaatttttttttggtgctgggtgtggtggcgagcgcctgtagtcccagctactcgggaggctgaggcaggagaatggcatgaacccaggaggcggagcttgcagggagctgagatggcgccactgcactccagcctgggtgacagagcaagactccatctcaaaaaaaaaagaaggttcttgcctctttatggactcgtgggctagggatgggaaaagagaggagaaaatagggtgggaatgcaggtatgtgtatgaacatggctgtctggagccctttatgcaactttctcaagaaaactacaacatagtaagaccccatctgtacaaaaaatttaaaaaataaggcaagcctcatgctgtaatctgagtgacttgggaggctgaagcaggaggatcacttgaccccaggagttcaaggctgcagtgagctatgattgcaccacttcactccagcttgggcaacagagcaagaccctgtctcaaaaaaaaaaaaaaaaattcacgacagaagaaaactatatgaaattcaaatgtcagcactggtaaataaagtcatattgggaaccagtgacacctattcatttatgtattgtcatttttcttttggtggagatgggatcttgctttgttgcccaggctgatttcaaactcctggcctcaagtgatctttccatcccagcctcacaaagtgctaggactacaggtctgagccatcgtgcctggccatttatgtattatctatggttatgttggcactataataacaggatgattagttgtgacaaaggacatatggtctacagagtctaaaatatttaccatctactcctttacagaaaaagttagccagcccctgacataaaacatgtagaatttattaggctttgttgttaaagatcgaattctctaagtttcatgaacaggctttggtagaagtgaggtagggggtaaatcctgtaacatagtaacaattttttgtgtatgaaaatgtgcatttgaaaaaaaaaaaacaaaaacatttaaggcccagcacagtgactcatgcctgtaatcccagcacttcaagaggctaagaagtgagaggattgcttgaggtcaggagtttgaggtcagcgcagccaacatagtgagaccccatctcaaaaaaaaataaaatcggcctggtgtggtggtttatgcctgtaatcctagcacattgggaggctgagacaggcagatcacttgaggttaggaattcaagaccagcctggccaacatggtaaaaccccatctctactaaaaatacaaaaattagccgggtatggtggtgcacgcctataatcccagctattagggaggctgagacaggtgaattgcttgaacctgggaggcagaggttgcagtgagtcttgattgcactactacactccagcctgagtgacagagcgacactccatctcaaaaaaaccaattaattaattaattaaataggcccggtacagaagctcacgcctataatcccagcactttggaggctgaggtgaggagttcaagaccagcctgggcaacatagtaagaccctgtctctgaaaaaacaaattaaaaaaaagaaaataaatgaaaaaaagaaagtatgcatttgctagggagagtcctggagaattctaactctgaaattcgcagagttggctgagcgtggtggctcacatctgtaatcccagcactttgggaggccgaggtgggtggatcacctgaggtcgggagttcgagaccagcctgaccaacatggagaaatccccccgtctctactaaaaatacaaaattagctgggcgttgtggcgcatgcctgtaatcccagctactcgggtggctgaggcaggagaatcacttgaacctgggaagcagaggttgcagtgagccaagatcatgccattgcactccagcctgggcaacaagagtgaaactccatctcaaaaaaagaaaaaagcaatttctagagttgacttctgtacagggaaagtgtttagcatgcatccaagcttttccttctgcatttcctgctatttggttttcaaaggccaggtgatttaattatgcagaaaatttgttctgtgcttaatgatatcctcacatttaaatattcaaacactgactccaggggcaaactcattcaggagtacgagcagaagttaaataagtacacagcagccgtgtgtctatcagagccactcttgggtttcttttgtgatctgtcacccctggtttggagttgagcagttgtggttcttgagttgcaactcatcttgtttgttttctgggggatcagaaagagggctgaacaactttgtttcataaatgattctgcttagtacactccatgattttcctcagttgggcctgaaaatatagttttcattcaggcatttcaatcagaaaaatgactaaccctgacccaaaatgtgagtaaatgtaaagagactccatcataaaagatgtatttccccattctctacaatgctgtgaaccattgtgtagtgggtcagagcttggctttgggcctggacagacaggttcaaatcccaattttgccgctttctggtgatttgccattaactgtgcccttaccttgctgggcctcagttttttcatcagtcaagtgtagataataagattatctacctcaaacaagtgttatgaaaattcaacaaaatgatagtctttatgcttttagtacagagcctgacatacagtttgtgcaataattagaagttgttttggccaggtgcggtggctcacacctgtaatcccagcactttgggaggctgaggcaggtggatcacttgaggtcgggagttcgagaacagcgtggccaaaatggcgaaaccctgtctctactaaaaacatgaaaattagccgggcgtggtggcgcatgcctgtaatcccagctacttgggaggctgaggtaggagaatggcttgaaaccgggaggcagaggttacagcaagccaggatcgtgccactgcactccagcctgggcgacagagtgacactccatctaaaaaaaaaaaaaaaaagatataaggaagttgttttgatgataacaatttcacactttctctagctttttcacatttctctctctcttcttgcttataaacagtttctctctatatacctttttctttttctcccttcatctgtctctgaaaatattctctctctttctctctatttctctctctgtttcaggtgctcatagacatcctaacctgtgtgtttgtgtgtacgtgtttgtgtgaaagggcagtgcagcctccccacaagaaggcatctatcatatagacatttttgcagtaattctcttgacagtcacttatgaagcatctattttatgcaggaacaattctagtttctaggaatttggaaggtaataagatgaacaaagccctagtctttaagaagcatatattctgagctgggcgcagtgggtcacacctcccagcactttgggagaccgaggcaggtggatcacctgaggtcatgagttcgagaccagcctggccaacatggtgaaaccccatctctactaaaaatacagaaatcagccgggcgtggtggcaggcacctgtaatcccagctactcaggaggctgaggcaggagaatttcttgaacccaggaagtggaagttgcagtgagccaagatcgcaccactgcagtccagcctgggtgacagagcaagactctgtctcggaaaaaaaaaaaaaaaaaaagaagcatatattctggtgggggaagccagacaatactgattgagaaaaagaaagaaaaattcagcctgggcgacatagtgagatgcgtctctacaaaaattaaaaaaaaaaaaaaaaaattagcctggtggcacatgcaggtagtcccagctactgggtggggaggggttggggctggggtgggaagatctcttgagcttaggaggccaaggctacagtgagctaggatggccccactgtactccagccagagcaagactttgcctctttaggaaaaaaaatagtaacaactgggcgtcatggcaagtgcctgtggtcccagctaattgtgaggctgagatggaggatcacttgagcccaggagttcaaggctgcagtgagccgtgattgcccctctgtactccagcctgggtgacacagcaagaccctatctcaaaagaaaaaaaaatcctctgagatagtgaaaggtgaaaggagttcaaaaggtgtaaaaagagtgggctgatgggtccaaagtcctgggctggagaggagtgttctaccagctgggggaggggcaccagggaggctgcttgtaagtcctagacttatcagatggaggcagcccaggggaaatctggggaaaatcccgtgaaacagaaggaatgaccaggggaaagtcccggaggcaggaatgaatttggtgtgctggaaagacaggaatggccagataagaggagagaggaggaactgagaggggagagtttccaggtcaccttgaacctttagaacaagggaggagttggaatctcattctaatggcagtggaaagccccttcgggaaagtgataggctctgatttatgatttagaaatatcaccttggtaatgtggtggaagggatgcaagagtgaaaacacaaaggctatttatttgtgagactaatcgcagccacctgggtgagcaatggggccagcatgggcttgcgtggtggcaggaaatgggaagaagtcgccatatttgggatatgctgttgagatagagtttacaggacttgctgatgaattggatgagggttgtggggggaaagagaggaattgagggtgattccaaggttttgacctatcctgttcccattactggagctacagtggtgaaaaggacagattcaggactggcttcaaggggtttatcaatgatttaaatttcatgattaaagaaaaagtatcccaaaccaacctggtctgggagagaaccttcttgcattacataatgcataatctccttccgagaagaaactggcatctctgataaacctgtgtaagcagtatttctgattaattttaaaggattaacatttgttctaggaaaccagacacccacctctcctgttaggcaagagtgtactgatctttaaccattcttctttcatttctcactagtctttccatataaaatgtcctgaccaagagtggatctttgacttgatctactaccagacttttccctttcaacaagattgtaataaaactttgatacatgtgcgtaactaagtggtctgaaagatttattttgggttatactgctcatagacgtattccatgaagaaaacaaaagaattttaaaaaatggcagtgatgatctcaaaagcccaatattaagagggaaataaacaaccactaatatttggtacctgaattattaaaatctggtttattgccaataaattttactagtaattgttaaaccctgaacttcacgagattaccatagacataccctaaagtttcttcattaaggtcaaaaaagatgaagaattcattgttttgttgtagtagatttcaagtgagtatcttgagccttccttctactcagcgtaaacatgctatgatatatggactttcctgtccttagagacatgcatcatttttagattgtaagacccttaaggacccaaatttttttttaattttattactattcttttttaatgagatggggtcttgccatgttgctcaggctggtctcaaactcctgggctcaagtggtcctcccacctcggcctctcaaagtgctggggttacaggtgtaagccaccatgcctagcctttttctttttaaagaggtaaagaaactgaggttcggagagtttaaatgattacctggggttgcacagctgagacaggattttaagttagatcctcaaaggtcttttcacttgtccaaacctgtgcctgtgggcttatcgtaattcctgtgtcatttcttagtaaaaatgatctgcatttaaaatggcatttccgttactaaataaactttttttttgtcatctttcagtttccctttcaagacaatctctttcaatccatgtattacccccttcagctgaagtttttggagactgtgcacactttatgtggacgaatcccgcaagtttttctgaagcaaattgagaaaacaatgaaaagggcttatgagaaacacgtcatcatccatgttggccccaaccagatgcactgaatattttgtcttgttgcaagtcaattaggtgtcttgtgaccaaggaaatactaatctctaagctgcctgggtctttttgtgtgaatatttaatggtgctccatgactgttgagttttaaaaacctcgttaaattttgccaaatcagttgcccccaaaagggaatatgcttttccttatttttttttctaaaatgctatttatctctaaggaaaaaaaaaaaagactattactcatttaacattgtttaagcaggttgagctagctgtgaaaatagcttttgtgagccttctaattcctaaacgtctgagaccatttcagtggcacctgaggtgttatattgatctagcattcctgagactctttctatgcaactgactcccccacacccgtgttataaaagtaatacacacttttgaaacagagagacacacttgtagagcatatgggtcaagggctcaacatcaagattagattagccataatcctattgaccagtggaaaagattgtttccattttaaagcagttccttacaaccttttttctctacttttgcattttccactctaacacacatctaaaacaggtaatctcagtaaaagctggcctttttgctgagatttttatgtgggagactaaaatattagatgagatgattatgtgtacagaattttatttaaaatacatctgagagaatcattcagatacttgggtagtgttaaaggatgaagcatgtatctgggggtatttcttctttttctttctttctttttttttttttttttttttttgagacggaatctcactctgtagcccaggctagaatgcagtggcaggatctcggctcactgcagcttccacctcctgggttcaagtgattctcatgcctcagcctccccagtagctgggattacaagtgtgtgccaccacacccggctaatttttgtatttttagtagagacacggttttaccatgttggccaggctggtcttgatctccagacctcaagtgatctgcctgcctcagcctcccaaagtgctgggattacaagtgtgagccactgcactcagccaatctgggagtatttctaaagaaaaaaattactttgatttgtggaggactaaatcataatacatttctatgcaacaatagcttctgagaggaaattcaggaatgtttgtgtttaccacagacaaaaacatttgatctgttaatcatcagtagctgtggtcatctctctttcttaaactcttgggcaatgggtggaaatcagagaccaacttcaaatttaatgtgtaaaaaacaaatagttcagctgcttctattggtaagaaaattcaacttcctaccagccttagaaaggtctctttaaacaatttctttccccctagggttacctagctggtccatacaggttttatcacctcactgcaaggaggaagttgaatattctgttccccacggggatctggcttaatccctagttgctcatatagttggtatcagcatagcaatattttgcataatgctttatttttctcaaatgactattgcatagatgatcttgatatttgcaacagcctagtggatttggtagggtcctgaatcatctctataaggcaaacaaggaaattgtaacacaaagaaataaacatattgaatataattgctattctgtaagacatacagtctgtgtaagatgtatcttatttacagagacatttttgaaaattaaaatattaaatactttttgttatatagagacaatgatctggaagtataaaaagaaaaatattatcttgttgatgtaaatatgatatccttatatatattagaatccaataagatatcatgggcgcaatattagcaaaaaaaagtcagtcttaccctgaaaaaaaaatagatatgaaaatctcagcactacacagaaatgtttagatgtcaatcagttttggtatgcagcattattatagtagtaacaaatttaaatctaaaattttagagtaatactttccttctgatcagttgccctgtggttatttttgttaaggaaactaccattatgacgggaaactcttatttttgctgttatattttgtttccttatttcaccactagaggtgacatcattattttgtaactttagtactaggctttccatttgtggtatggacacgtatgatatggagcaatttttgaattgtctttcacataggggaaattgcatcttatatacccataaattgggttttagtgaaagagccaggatggaacataatttcctaacttccatcctagtttcctttctacttgttcagaatggccagtgaaacacacaaatggcactcagatttgttgatggctcaccaactcaaagaggttccttctctcctttgataagtcccacaaaaacatctactgtaaagacttgaaatacaatgcctttcttttttatgagagccaagtttacccacaactctcaactaccagtactggtctgactgtgcagaaaagggttgcccgcaaaggtcaatgatatcaccctagaacattctagaatgatgaattttgagaatgtgaaaccttagaacctcgtgcggttgtctgccttggaattcctgtgctgtatcctgaaattttagctgaatttggcagagaattcagagaaaatttgcttttctaatccttgctgcctgaaagtgctaattattttccatagctaggatattaccatggagcaatattttctctgcctttgataactcccagcaaattactacattaaccgcctttgaaatccaggagccacaaattttaattcagtggcctgctaaaacatgcactctctggtttaaagtttgccagaggtggtgctgccccatatgccacattgaatactgggaagggccgggcacggtggctcacgcctgtaatcccagcactttgggaggccgaggcgggcggatcacgaggtcagcagatcaagaccatcctttcgaacacggtgaaacccagtatctactaaaaatacaaaaaattagccgggcgtggtggcgcctgtggtcccagctactcgcgaggctgaggcaggagaatggcgtgaacccgggaggcggagcttgcagggagccgagattgcgcccctgcactccagcctgggcgacagagcgagactccgtctcaaaaaaaaaaaaagaatactgggaagaaggtgggccagttctctcctctcctcctgccctgccttttctctcttccctctcttttcttctttactcatttctttttaatttctgtttaatgcatataactatggacttccattaaagaagaaaagagcactttctgatagcaaaaggtgacagtatttttatatgcatcgagattgaggtttttcaacagcagtgtcactggaaatgctgccaatatttttcttgctgagtgtttctccaatataaatctcagtaatcatggcttacattgaaaattctaatatttaaacaattaactggctagaaaagcaatttaagtttttcttcaacttccaaaatggcaatttagcactttggatacaaagctccaagctttactatttatgggatatgtctagttcatattcagtgcttccattgcaaattattgtgacttttaccaaatttggtattgaaatgggtatttatatggactcagacgtttgagagtatttcttttatttgcagttatggtgttcatgagcaaaaacaaataaaccaaatcatacaaaacattattattcacagtgattgaaaacaaaataatgatccagtaacaaaataatcactcgcagcccagcctgaaagcaggacattcatacaaatttagattcatgtataaatattatctgatatttatacattattatctgatatttatacgtataaaagataaattacatgtgtttgataaaccaacatgaacatgatttcatcactgaaatcagaaatatgttgagttctatgacagcacaaatcatatttcctttctttctttcttttttttttttttttttttttttttttttgagatggagtctcgctctgtcacccagcctggagtgcagtggtacgatctcggctcactgcaagctccacctcccgggttcacgccattctcctgcttcagcctcccgagtagctgggaccacaggcgccaccacgcccagctaattttttgtatttttagtagagaaggggtttcaccgtgttagccaggatggtcttgatctcccgacctcgtgatccgcccgcctcggcctcccaaagtgctgggattacaggcgtgagccactgcgcccggcctcttttctttctttctttttctttctttcttactcttgctctcttgctctctctttctctcactctctttctctctctctctttctctctttccctccctccctctctctctctctctttatttcctaagcaagctaacacaggacatattctctcttttttttttttttttgagatggagtctccgtctgtcacctaggctggagtgcagtggcacaatctcagctcactgcagcctccgcctcccaggttcaaacgattctcatgcctcaggcttccgagtagctgggactacaggtgtgcaccaccatgcccagctaatttttgaatgtttagtagagatgggatttcaccatgttggccaggctggtctcaaactcctgagctcaagtgatccacctgccttggcctcccaaagtactgggactacaggcatgagccactgtgcccagctgacatattctcacttaatagaattatagagaaatttttcatgtttttctttttctctcccactttttcatattcctctttttcatttttgcctttccgtttctgtctatgatgtaggcttctgaggagaaccaagaagcttggctttagtggtagaatgacagaacttagggatcccttgcaggctagaacaaagttctgacccttagaccaaatctttatgttaagagttttccagaattcaaaaaaaaaaaaaaaatcaatcaacacaacacacacacacatacatacacacacactgcctttaaaaggaggagccaatatttgttgtacctgtgaactgaggaattatagataaaccttaggtcaaatcatttcacaattgcattggtggtattgaaaaatgatgagatttctctgacagagagctttgtcctagtttttgttcttcataggtcaaaactggcaatattctcttgtctgcaagataaagtgtttgtgcttctatcaccatatgcatgaacatgtaagaatcagatacaatttctgcttcatcagtttcacatgttcatgttgtcactgaaaaaatgcatctactgtttatagctcccaaggagaccccaaatcctttttttttcttttgagatggagtcttgctcttgttgcccaggctggagagcagtagcgcgatctcagctcactgcaacccccacctcctgggttcaagtgattctcctgcctcagcctccccagtagctgggatttacaggtgcccgctaccatgcctggctaatttttgtatttttagtagagacaggctttcaccatgttggccaggctgatctcaaactcctgacctcaggtgatccacccacctcggcctccgaaagtgctgggattacaggagtgagccaccgcgcctggccccgtattcattttttatactggaaaacattttttttgtaatttttctttgcaaagaaatgagcataaaaatgaatactccaaagaaaaggaattattatggcaaattaaaagggacacggtactatgatttaattactgtcttgtctttttaaaatgtcatctcttgttttaccctttttttaaataaaagctttaaaaacatgtctttgggtattattctggaggtatgtttcttttatataagatttcaagtttaaacatttacaataagtaataatatttaaattcttataacaagtaatgaaatatttggtttagtaattagcttagtctattttaaaaaatcattaaaatttgctttgtttttaagaatgccatactacaaatgatgttatttggttttaatggtgttttgtgtttaagatagaataaatagagtttgaagaatgtgaaaattagttatctatgttcctacattttatttaacaaaattgagcctaacttgctagctagtacacacatcaaaaataactgactaagccaaataccgtggctcatgcctgtaatcccaaactttgggagactgaggcttgagaattgcttgaggccaggagttctagaccaacctgagcaacaaagcaagcccccatctctcaagaaaaaaatctttttttaaaaattaggtgggtgcggtggtgcacacctgtagtccagctcctcagaaagctgaggtgggaggatcatgagccaggggagtcaaggctgcagtgagccatgatcataccactacattccagcctgtgcaacagagtgagaccctgtcaaaaaaaaaaaaaaaaaaaaaaaggtcaggcacggtagcccatgcctgtaatcccagcactttgggaggctgaggcaagcagatcatgaggtcaggagttcgagaccagcctgcccaacatggtgaaaccatgtttagtctatactaaaaatacaaaaattagccaggcgtggtagcaggcgcttgtaatcctagctactcggtaggctgaagcaggagaattgcttgaacccagaaggtggaggttgcagtgagccaagaatgcactactgcactccagcctgggcgacagagcaagactccatctcaaaaaacaaacaaacaaaaaactttctatattcagataaacttggactcaaatcctagcttataaattattagtcgtgtaaccttgtagaagtagcttaacctctctgtgccttaaacaacagacattaaaatgtctaccttataagggttattgtgacaagagatataaaaataagacttttagcataatgctgattcaaagcacttgctaattttaaaagcatgctttattatcacatctacattgttactgtagaaaagtaaagtctgggtgcatttgagtaaaacatgaggccaggcacactggcttatgcttgtaatcctagcaccttgggagattgaggcaggtggatcgcttgagctcaggagttcaagaccagcctgggcaacatggcgaaaccccgtctctaccgaaaatacaaaaaattagctggacatggtggcatgcgcctacagtcccagctacttgaggggattgatcatttgagcccagaaggttgaggctgcagtgagccctttctcaaaaacaataaataaagcaaaacatgaaatttcagaatattaaaaatatcttatttgtgctccctgcctcaactaaataaatggctaatagatttttttaaatatcagatttaaggaatgacaatttaccagtctaccatgatgtcctatgtttacttcccagggggttcatatgcagaagttctgccttctttatctttttagaggaacttagctagaaaagcgtgactctctggctgcactttacaattctcactgcagtcctgtttctgtttgcttcctaatcaagtcctttagttggaacacagctcaaaagcagcctcaccctctttcatcacaatctcatatttctcttccttctccttcttcattgttccattaagtcataaatgtcactaacacctaccccctgccttatcccagaaacctgggcattatccttgtctctttcctccccctggttttacatcattgtcatcactaaatcattactttgccactaaaccaccccactcccagtaccgatttctgtggtaagttaaagccctttgaatttccactgacagcaaacacagctcaaactagcacagaaaagaagagaatggactatgtctacctcctgaatattaactgagtcagcttcctctttttatctttactgctatctctgctcagaaccctttgagtccctgtcatctccagcctgcattgtgccctatgtctctcttcactctctacattccctctggtttcctctaaaccataacccacccctaccccatattcccctttgctcttacgataatgcctaagctcctttccaaatgtctcagaggccaggcatagtggctcacgcctgtaatcccagcactttgggaggccaaggcaggtggatcatctgaggtcaggagtttgagaccagcgtggccaacacagtgaaaccccatctctactaaaaatacaaaaattagccgggcatggtgtgcacacctgtagtcccagctactcaggaggctgagacaggagaatcacttgaacccgggagatggaggctgcagtgagctgagattgtgccactacactccagcctgggcgacagggtgagactctgtctcaaaaacaaaactaaagaaaaacaaatgtttcagaaagttcctgtataatctatctcctatctccctattctcatcttgagttattctcccccactacactaatttctatttatgctggtttgttttctcttttaagtatacaagcttttttcctcccacagggttttcgtatgtacctggaatcctacaccttgcctcgcaccttctttcacctggcaaatttccactatctttcaggtctgaatttaaatgccatttcctcatggaagccttctcttattatgccacataagggcaggtccttgttttatattgactcatatcaacctgcactttttatttgcattattataacaataataatacttatttgtattaaaatattaatttattgaatacctgccccagtagacacatagttccttgagggtatggtccttgctgatcctgttctctgctctatgcccatcatcaactcaatgctcaaaaaatatttgagggccagccaacacatttctcatgctcaaaaaatatttgagggccgggcgcggtggctcatgcctgtaatcccagcactttgggaggtcaaggcaggcgatcacctgaggtcaggagtttgagactagtctggctaacatggcgaaaccctgcctctactaaaaatacaaaaattaggccaggcgcggtggctcatgactataatcccagcactttgggaggctgaggcgggcggatcatgaggtcaggtgatcgagatcatcctggctaacacagtgaaaccccatctctactaaaaatataaaaaaattagccaggcatggtggcatgtgcctgtaatcccagctactcaggaggctgaggcaggagaattgcttgaacccagaaggtggaggttgcagtaagctgagattgcgccactgcactctagcctgggcgacagagtgagacttggtctcaaaaaaaaaaaaaaattagctgggcatgatggttggcacctgtaatcctcgctactcaggaggccgaggcgggagtatcgcttgaaccagggaggcagaggttgcagtgagccgagatcgtgctattgcactccagcctgagtgacaagaacaaaactctgtctcaaaaaaaaaaaaaactttaaggaataaataaatgaagttattcatctgcatcatgaattgggaccaattcctattggcaaagcttcacaataccctgtattgattttcagtgttctcagaaactacttttcctgtaaatgttggtgctggactataataacccatcctataaagtctcagccagccttggtggctcacacctgtaatcccagcactgtgggagtgaaactccgtctctactaaaaatacaaaaattacccgggcgtggtactgcacacctgtagtcctagctacttgggaagctgaggtgggagaattgcttgaaccaggaagtggaggttgcagtgagccgagatcgcaccattgcactccagcttgggtaacagagcgagactctgtcttacataaataaataaataaataaagtctcattcagtggaagtatgttgaggccaggtgcactccagcctgggcaacagagtgagacgctgtctcaaataaataaataaataaagtctcagtcggtgaaagtatattgaggccaggtgtggtgcctgatgcctgtaatcccagcactttgggaggctaggcaggaggatcatgaggccaggagttcaagaccagcctgggcaacatggcaagaccccatatcaaaaaaaaaacacacttcaatttgctgggagtgatggcgcatgcttgtagtcctaggtacttgggaggctgagtcaggaggatcacttgaacccaggaggtcaaggctgtaatgagctgtaattgtaccactatactccagcctgggtgagagaacaagaccgtgtccctaaaaaaaaaaagaaagagagagaatgtattgattgagtcagtttatttacttattcataaaatgacatggttaggtcagatgaggttaaagttcctttttgtgtaaatgctctctatttccataatctgttttttatagctctataatagatatttgtgggattttggctgcctggaaaccaccccactcctggtaccaatttctttagtcattaaaactctttaaattgtaagtgacagcaaacacaactcaaacaagtacagagaaaaaaaaaggtcttgtgtaagtgaaaaatctggaaatagctctatattcaaaggctcaaaagatgccaagggaaatgtatcattttaacaatgcttttttcattaatattttattgaaaaccacacatccttctaggattccagccataaaattttcatgtcattttaatagaatcattccatctttggaaaaataccttgtctccatgttcagatgaaaaatggtattgccaacctgggtcaaaatatcaagaaaattgttctcctggtgtttaacttaagacaactataatatatctttttcccctcattgaaaactatcattaaccaaataaacccctcgtaccagaaacaattcaataatctaaaatgaatgaatgatttgggagggggtggttccttatcataaatttgatctgttggacaagagcacttcaacaattcctcagttccacagtccccatagactcctagaggtgacagtcaaaatcataaatgttgatgtatccactatacttatataggctctatgtcatgtatatgcatataggctgtaactataaagagacacctgggaacacctatgcctgtctcattatggagcacttagagtttatcaaaacaatagcatttcttttttcaggattgctattctgggtcaagtgacaatgcaagtctaaatatcatattaggaaattgaattcttctaaattattgttattagaaaagattgcaagcggcaaggcacagtggctcatgcctgtatccatcccagcattctgggaggccaaagtgggtgaatcacctgaagtcaggagtttaagaacagcctggccagcatggcagaatgccagtctctactaaaattacaaaaaaaaaaaaaaaatagccagaaaccatggcgggcacctgtaatctcagctactcgggaggctgaggcaggagagttgctttaacccaggaggcggaggttgcagtgagccgagatcacgccactgcacaccagcctgggtgacagagcgaaactccatctcaaaaaaaaaaaaaaaaaagaaaagaaaagattgcaagcacacagttgaaagaaaagtaaaaggactgatactagctttttgtttgtttgtttgttttttgttttttgttgttttttttttttgagacggagtctcagtctgtcgcccaagctggagtgcagtggtgtgatctcggctcactgcaagctccgcctcctgggttcacgccattctcctgcctcagcctcccgaatagctgggactacaggcgcctgccaccgcgccaggctaagttttctgtatttttagtagagatggggtttcaccgtgttagccaggatggtctcgatctcctgacctcgtgatccgcctgcctcggcctcccaaagtgctgggattacaggcttgagccaccgcgcccggccgatagtagcgtttaaaaaaaaattaaatgtttaaaacttgatcaccgtttataacagcttctctgatatttattgtttgtatgtgtatggaggttttaaaacataaaaccaatacgtgctcaaatgagaggaaattcaaataaagtcaataactaattaagaaaatagttggtgtatggtgtgtcagaatttaagcttcctaaggctgccatctgcctatttagaacccacaatttctggcacagaatagatgaccagcatagcatgccctgtcttattcccttaacatacattatttccatgcatgccagctcaaaattctgattcccaacctgtgactctgcccgaaggctcccttctgccactgcagcctgctccacttgcctacaggcaggctcaaagtattgggaaattaacacctctgggagtagtaacaatcactgactgacaggagttggtagataaatacctcagctcctcatcttctctggaagggtaactctggtctgttccagaattgcatcccagaatttcccagtgtgaagaagctcaagttgcccacagtagtaacttctttaataatatatattctttattggccttcttgccatccccatcacacttccccactcctgccagtgttttcttggatttggcccccaaatagaccacttgaactcaaatctttgtcttgtcatttgcaattggtaatttttgttcatgtgaataaaaaatggaattttggccgggtgcagatggcttacacctgtaatcccagcactttgggatgccaaggcaggaggatcacctgaggtcaggagtttgagaccagcctggccaacatggtgaaacccccatctctactaaaaacacaaaaagtagctgagcgtggtggcacgtgcctgtaatccctgctacttgggaggctgaggcaggagaattgcttgaacccgggaggcagatgttgcagtgagccgagatcccgccactgtactccagcctggacaacagagtgaaattcagtctcaaaaaaaaaaaaaacttaaataataatacctatattgtgtctaagtttactaaccgtaagaataattattctcctccccgctctactccttcttcacgtctgtttctgtttgttgttgttgttgttgttgttgttttgtttttgagaccaagtctccctctgttgcccaggctggagtgcagtggtgtgatcttggctcactgcaacctccacctcccaggttcaagcgagtctcctgcctcagcttcccaagtagctgggactgcaggcgtgagccactatgcccagctaatttttgtatttttagtagagatggggtttcaccatgttggccaggctggtcttgaactcctgacctcaggtgatctgcccacctcggcctcccaaagtgctgggactacaggcatgagctactgcacctggcccttcatctctgtttctatttttatttttatttatttatttttttgagatggagctttggctgtgctgcccaggctggagtgcaatggcacgatctcagctcactgcaacctccgtctcctgggttcaagtgattctcctgcctcagcctcccgagtagctgggattacatgtgcttgccactaagcctggctagtttttgtatttttagaagagacagggttttaccatgttggccaggctggtctcgaactcctgacctcaagtgatccatccgcctcagccttccaaagtgctgggattacaggcatgaaccactgtgcccggccaatctctgtttctattttggaaagtttgaatcaactctgcacaaagtatttagaatttagcatacttatatattctcttatttttctctcatcattggattttactagctattatgatgttacatattcaaggtttataacatttctcctccagtttgtagcatggctattactttaattttattacaaatgataacatagttgggtgatttatttttaactccaaaaatcccccaatgcttttattatccctatttccccttttaaggtatgtattttaaacgcattgtattctagtttttttttttttaatttctgacttgtgtttagggagtcagtatttttgtacaactcttttaagatacaattgaaatagaataaactacatatattgctttttttttttttttgagatggagtctcactctgtcgtccaggctggagtgcagtggtgcgatctcggctcactgcaagctccgcctcctgggttcacgccattctcctgcctcagcctcccgagtagctgggaccacaggcacccgccaccacgcccggctaattttttgtatttttagtaaagacagggtttcaccgtgttagccaggatggtctcgatctcctgacctcgtgatccgcctgcctcgacctcccaaagtgctgggattacaggtgtgagccactgcgcccggcctcaattgttgtataataataattgttgcaccattatgtttagcaattatatactaaagttttcggggggttgggagtatctcttcagcaacttactctcaaatagttcaggaaaagaaatgttcgtagtgtacttgcaacttgtttgtttgttggttgggttttgagatggagtcttgctccatcacccagcctggagtgcagtggcaagatcttggctcactgcaacctccagcacctgggttcaagcaattctcctgcctcagcctcccgagtagctgggactacaggcatgtgccactatgcctggtgaattttttgtatttttagtagagacggggtttcaccatgttggctaggttggtcttgaattcctgaactcaagtgatctgcccgcctcagcctcccgaagtgctgggattacaggcttgagtcaccacgcctggcctgtacttgcaacttttatgtgagtttgaaatcatttcaaaagagaaagaaaaaccataaattatttttgtaattcttaacctatgtaagtatgaacaatacctaatattgattgagtcagatcactggcttaattctctcagcaaaccaatgagtaagtcaccactattaacttcaatttatacataaggaaactgaggcattttgatattaatcatttacctgaattcaaacagctaggaagtaataagccaggaattaaactagatatctgattttagacctttttctcttaatacactatttgattttattatattcaattatcgaatatatatatgtgtgtgtatttgtgtatatacagtcatgcaccacataacaatgtttcattcgacaacagatcacataaatgacaatggtctcataagattataatactgtatttttactatgcctttctatgtttaggtatgtttagataaacaaacatttactgttgtgttacagttgcttacaatattcaggacagtaacacgctgtattggtttgtagcctagaagcaatagaaagtaccatagcctaggtgtgtaggaggctataccatctaggtttgtgtaagtacactctacgatgcttgcacaacaatgaaattgcccaatagcacgtttctcagaatctatctctgttattaagtgacacatgactgtatatgtataatcagggttcttcaaagaaacacaacctataggatgtgtgggtgtgggtgtggagaaagggaaagagagagagagacagagaaagagacagaaagtgtgcagagttgaagaagagaatggctgttgggttcagtgagcgtccttaatctgtggaataccctactctcctcatatattcccattttctttcacacaactcgaagccaacttccactactacagtcagacctaatcaagatggccacctaggcagcttcactctgccagttcccttctctgacactgctcttaaacacccaccatggccaccagcagccatcatgcctgtggtgactccagagaaaacaacccatggttttttgcatagaccctttgtcacccttgtttccactaaaaaagtggaaagtctctgggaaaaaagtgaagcctgatggtttgtgaaactgccctcatacttgtttagaaaaatgtattcagtttagtttatcttcctatctcaacttcatttggtacccattatatatacaaataaggacttcagggcatgaataaaaagccacgagaatcaaagaacgtctaaagctttgtgtagtggtattgtaacccagtctgtcctctgttctgcagcttgtttagactggatattggtttttctagatttttcttcagtctcttcttgtcccttcccacagacccatctcagaaggacagccaagctccagtacttttccctggggttaaaaaaagatccacccacatgttatctgacatagttctggctgttttctccctcccatctctttgtgtctccatgttctacagcctactctgtgtctcctccctgttcaggccttttccctcttgtgcacacccagaacatgggccttcatcttgccagtcttcctgaatgttcatatttatttaaggtctacctcccctattagactatgagctccgtgggggaaaagagactatgcatcaactttcccgagcaccttggagaccctcacagactgtttaccttgttaataccattccctctgccaggagggctcttctctgtccgtacaaatcttttccagtctttaagtgagacccttccatctcttcctggaagaaattttgcaggcctctgaatatctgatacacagctttgccttctaccttgcatgagggcctacacttacatcttatctttcctagtattttgcaaacttcttgaggacaagaaagtgtttgggggctctgaagccagtctaggtttgaatcatgggtcagtcacctgcctatgtagttgtgtgattttgtgcaagcaatttcacctctttatatttccgttttctttctttccctttctttctttttctttctttcttttcttttcttttccttctttccttccctccctccctcccttctctctctctctctctctctctctctctttcttgagtttcgctcttgtcacccaggctggagtgcagtggcgtgatcttggctcattgcaagctctgcctcttgggttcaagcaattctcctgcctcagcttcccgagtagctcggattacaggcgcccaccaccacgcccagctaattttcatatttttagtagagatggggtttcatcacgttggccaggctggtctccagcttctcacctcaggtgatccacccgcctcggcctttcaaagtgctggaattacaggcgtgagccactgtgctgggcctctatatttcagttttcttttctgttaagtgaggaggatcctcataggattttgtgaggattcaattaaatacttttgtaaactgcttaggagacactttttgatagttttgtaaactgcttaggagaatgccagacacatgaaagtatttaataaatattagctgttactattaaatttcttatttgttgcattagtttctaaaatttagaggcttagaacagttatagacattgtcaccttttacagtttctgtggatcaggtattgggaagtgacttagatgggctgctctagtgtgggatgtctgctaaggttgtgatccagatgtcagctggggctgcagttacctgaaggaattcctgaggctggaggatccaccttcaaggacagttcttctctctgtggggcctttccacaagactgtctaatgttctcatgacatggcagctggcttcccccattgaggccccatttaccaattcaagaggccaaggcagaagccctagtgccttcacacagacagctgtgatttggtgtgcctgattatactagggcatgaatctcagcaagtgaggatcatgaggggtaattgtgggggctggttgccacatttgtattctgttttcttcccaggaaatcggcatcagtaggaggcttattattctattttttatttttgagtcagggtctcactatgtttgtggcccaggatggattacagtggcatgatcccggctcactgcagacttaaattcctgggctcaagtaatcctcctagcctcccaagtagctagtactacaggtgtgcgccactacccctggtaattttttattttttgtagagacatgttgctgggctggtctcaagtgatcctccagccttggcttcccagagtaccgagattacaggtgtgagccaccatgcccagccagtaggaggctctagtaattgcagacattgtgatacaggccggctggagaagaattcaaggaagaaggaaggaatgaaccaaacgaagttattttttcagcctcatcttttgcctcttctccccttgtaatcttgacttccagacactggataaggtctatgacgggcgacaaagtgcacacagcaatgacagcctaagggaatcgtggaaagtgtaccagaggaagtggtgtttaagtagagatctgaatttgcagaggaatgtagcaaagtgcattggagaggaggagctaaccagaggggcacaagccttgattatctgaagaccaggtgggatctgaaaaaccataagaaattcagttaagctgacagcaatgaaagggacaaaacagtgttagaaattagcataatgtgttctccaacagaaagttccaatagaactttttgcaataatgaaattttctttatctgaactatccaatacaggagccactagccacatgtagctactgagcacttaaaatgtggctggtgtgaccaaagaattggatttttaggccaggggcggtggctcacacctgtaatcccagcactttgggaggctgcggcgggtggatcacaaggtccagagttcaagaccagcctggacaatatggtgaaaccccgtctctactaaaaatacaaaaattagctgggcgtggtggtgggagcctgtaatcccagctactcgagaggctgaggcagagaactgcttgaacccgggaggcacaggttgcagtgagctgagatcacgccactgcactccagcctggacgacagagcaagactccgtctcaaaaaaaaaaaaaggaaaagaaaaaagaaaaaaaaaagaattggatttttattgaagaactcaggaactgaattttaaattttatttaattttaattaatttaaatttcaatattcacacatggctaatatctactgtacagcagagctcttacagtaagagacccttctgaatagtagagtggcagatagaaggagaggctaagctttgccatgtaggcagtaggccctttcagactggaagggacctggataaactaaacctggtgcctggcaagtgctggccaagtgcttgatgtgctaccctattccctctctctgcaaggatatttgtaattgagctagatgctctgaacaacgaaggtctaaagacacaggggactggttctctgatggcacaatttgagagagctattttgggtgtgaatgtcttttgcctacatctaccacctaggatcagggtcagacccactgtcttttaagagggtcaacagtgtaaaggctgtgtccaaacttgcatcttcttagaccaaacaataaccttccttccctcccttggtccttctctcccctccttccttccatgactttgtgctatgctgggttttgggaagaggaggtggaacaacgcagtaccttttcttttctttctctctctctcttttttttttttttttttttttttttgagacggagtcccattctgtcgtgcccaggctggagtacagtggctggagtatctcggctcactgcaacctcagcctccagggttcaagggattctcctgcctcagcctcccgagtagctgcgattacaggtgcccgccaccaagcccagctaatttttttttttttgtatttttagcagagacagggttttgccatgttggcctggctggtatcaaactcctgacctcaggtgatccgcctgcctcagactcccgaagtgttgggaatacaggtgtgagccaccgtgcccgggcagtaccttttcttttaaaagctcacagatgagtataaaaatgtccacgcactggctgggagccagatgatttgggttctgggttctagttctgtctccccagacttgctgtctgtgacacagctttcccatttgtaaaatgtcagggctgcagaggacttctgaggtttccgccctctcctacctcctgggagattatgtcatgtaataatgctaacagtggtaataaaaacccagccacgttgagtgttccaggtttcacgcactgtgccaaatgtttcacatttgccatttcactcaatcctcgtggccgttttacaaccctcattttataaataagaaccctgaagctgcctgagtttaggtaactacttcagggccacacaaggagtaagtagttgagttgggatttgaatattgattccaaaccttgagctcttaatgactttgctgtatacattacttcttgccacaggtgggccagtgacgaacgaacgttgggttaagcagggaggtattcttgttaggattattagcaatgcttagtgtatgtatgtattgttaattttattattatttttttgaaacagtctcgctttgtcgcctaggctggaggcagtggcgcgatatcggctcactgcaacctccgcctcctggattcaagcgattctcgtgcctcagcctcccgagtaactgggattacaggcacgagcgaccacgcccgactacattttgtatttttagtagagacggggtttcgccatgttggccaggttggtcttcaactcctgacttcaggtgctccgcccgccccagcctcccaaagtgctgggattacaggcttgagtcaccgcgcccggcctgtatttatttttatatagagaagggcgagggagcggggtcattttgttacccagactggtctcgaactcctgggctcaagcgatcctctcgcctcggcctccctcccaaagtgttgggatcaccggcctgagccccctgcccggcctcgctctacgttttttaggcgcattctgaacgtgaagtgtatacactgaattctcacagcaactgcatagggcatcagtaccagtgcccttactgtacagatggggaaaatgaggctcagacaggcgaagtaagtagcttaagttcacacagagaggaaatggcagggattcaaagcctaggagtccgcctgcaaccctctcgcctgaccgtccagtcttcagctccgcggagcctgggcctggggctggggctggggctgaggctctggaagccgccgggacgcagacgccactgggccccagcgtcacacctcggccgcgcacgcgctctcgggttccgggccggagcgcgcggcgggagcgaggacggcggcagggagcgtgcgcgcggtgacgtaccgggcgccatgttggagggttggtggtagcggcttggggaggtgctcgctctgtcggtcttgctctctcgcacgcttcccccggctcccttcgtttcccccccccggtcgcctgcgtgccggagtgtgtgcgagggagggggagggcgtcgggggggtggggggaggcgttccggtccccaagagacccgcggagggaggcggaggctgtgagggactccgggaagccatggacgtcgagaggctccaggaggcgctgaaaggtgggggtagctgccccctctccattccccctcaccttctccggctcgctcttctctcctttcagggcggatggttccgaggaccggggccgggcgcggcgtggggagagtgcttcccgggctcccatccccctccacctccccaggggcggggagccctgtgggcagctctctcccgccccgctctggctttgtgtcggccgccggcgtctgggctgggggaggggagccggggaaactcttgcgggggccccagtctttctcccacccgttcaggggacgagtggcggacccgcagacccctccctcccagatatcctcttttctccaccaggctacccgtacgctaggcgttggggtgggagaaaaagtaaacggttggtgggggcgggggtagggggtagcatcgcaacttttaagttgtctcagtatgcctttttcagggcttttgaagtcatctttccgcgccctaatttcgaggtggttgccttcactgttcttgattgcacgccttccacgcaacaggcttgagaacagtggcttacaaacttcgagtagagagatttcagcgttttgagaattattctttgacattcagaatcatttggggacggcaacttggggtagttggtgcttcttagaaaggcagatttatggacttagatgaacaattggtgggagtcggggcctggggatttttattttcactggattcccagcttaatataatgctggtgttcccccggaccacacttcgagaagcactgcgttaaaaatggtttgtgaagttgagtgccccctttaggaggattcttgttatctgtaaagagggtgacatgttggaagtagaacttggaggattgaggtggtaatttggttgagaggccttatttttttaattttgtatttaattgatttttaataaggtaaaggactaggaggaaagtttgtttttagagcgcttttgagaaaactgataacgtttttttttcttccttcatctagattttgagaagagggggaaaaaggaagtttgtcctgtcctggatcagtttctttgtcatgta

SEQ ID NO: 252 - DNA, 27082 bp, Homo sapiens
agcagacggactgagttcctctaatccctgtgttccttctcccccatctttctaaaacccttctctgagagaggaataactatagcttcagggataatatagctttaaggaaacttttggcagatgtggacgtcgtaacatctgggcagtgttaacagaatcccggaggccgggacagaccaggagccactcgttctaggaatgttaaagtagaaggttttttccaattgatgagaggagcagagaggaaggagaaagaggaggagagagaaaaagggcacaaaataccataaaacaggtaagatctgcaactaacccctccacactccactaccccaattcacaattgtgaaggggataaggagacccagaacttgggcaacatggctgggggtggaggtcggggggaagttcttttatgaagctggatcatatgctgcttttcatttgtgccgtgacctgactgcaaacacatgttcccagcaacttctcagcccacagcagagggatgggatggttgactctggtgagtcaagtattaagcctgagattggggagaagctgggcaggtacgaggtcacaggttcagggatctgaaaaaggaatgcctctgctccagaacgaaggaactggatggaggctagatgtgggagaggggtcagtgattagttatctaatgttcacttcctggacctctctttaatctcctctttctgctccttttgttgcctctttctgcgtttatctatctctttccttcagctctgtcagattttctttccttccttcccacatctttctacttcccttgcctccttcgtttactctcactttttctccgtcctgcttccctgtcactttctagacaaaatctgaagccaagtagcaatgaactaaaaaatacacttttccctttcttgggctttgcatgtcccttagggactctggccagaatctaccacatttttgtttctctatttctaggactgactcctcccctgagcatggcatttcattgaaagcccgtgagtgaatgggtgcttgctgaaatgcccagtggccaatttataccaatgggcagcaagttttaatactgtcatttacaaagtatttgcccgctgggaaccacaaaactctcgtcccattagggtgaggacaggggaggaagtgagagggcaattggagcttgttcaccctctcctcatgtacctcagcaggtcctcctctacctcgctgacttcctgctggctcagcaaggtaaaactagagggttaggctggacttgaaagccagaagccactaccaaaccaccaagccttaaaacccaaagctaagaacagagccagagtccagttactgcctgggacactagagaagggaaacattcagtcctgtccaatacaaagttggtaataatattgtctaatatataaattacttccctatatgacagacaataatcaattcatgaggtagacagtattattattcccattttatagatgaggaaaccgaggcttagagaagttaaaaaatttgtccaagaccctatagctaataggtgacagaattggattcacatccagacctgtgtaacttcagtgttcaaattcttagaccacatatgctaacgctttcccagattagtggctaggaaatgttagttgaatgaatgaaacctaatggcagcctttaggtcaccaggttccctcctggttctgtgtaacttcatgttggccttttcctggtctcagtacttcaatgtccctctctataacttggaccatgaagcatttgcatctgatcccaccagagtcagatgaagattggttgttttacatcctcctcctcctgggaggaaaagggaccataaataacaaacagagtcttgttattctataacatgaaagatccttatgagggagataatataaaaggcattcattaattataaaatctctcttcttcctcacagatcccatatttctgcttcccctcacttttagaagttaattgatggctgacttctgaaagtcactttcctttgccctggtacttcaggccatatacatcttttcttgtctccataatcctccctttcaaggatggccagtcagctaactcaaagaggagctctctttctgctgttcttcctaactccggcagtgacaccaacatggtatgcaggtaagttctaggagctgttgcctattatttccaggaaggataggtcctagaccaagacttggagaaggaagagttagactacaaaaagagacacttattttctatacagagaagtattaaaggacaataaagatggttaaacatggcaacagactaccaagggaggcttttaaggcagcctaacaagagctatttgaaataggtgaaataggccacactagtacaaacatgagaaggttggacatcacctttgaggccattgtctcacctgcttgtgcacttagcttcctgaaaaccattttctaacatgaaatcctttatgagtcaaatctttattaatattaattcttttatgagtcaaatactcttgtcaagaccacaaaaatggacttagaccacatacctcatttggaaaaaataaggggggcaggcaatctattcaagtgaaatgagaatccatcagacttcttcccaccctctctgatcttatttataaaatgagattttttatagcccttttatgccaaagctgttagtggcaatacagatcacatccttttaatcaggaatttcccagtttcttctcatttgttctttacttcagaagggatggagatttctggattcctgaatatttcactcttcacccagagagccagagaacaaactcagtgagaagagggaaaggggagggggaagggatgagggcaggataatgaagtggcatacagaggttttatatggggcccagctggcattccaagtgctaagaatattctgtggcctgcagtgtctgccctcacaggggcccgtggggagtagtgggggaaggagacagacccaaccaatggggttaggaaaatatccagagatgagtaaataacaaactgctcccatcacagccacagtccctgcagctaaaattttccacatgcccttagctcctggtggaggcctttggcagtagctctgtttgtctggaacagctgcatcaagctttcaaacaaatatgcaaacttcttcccctttttggcttaacctggctttgtagggggtgaagcacaaggactgacattgagatgaaaaaattcaagtcaagcccttggcagagcatatcctgtttggggttaaaggtgcctcaagtctccaggagataaatatgcaactgtcctccccaacctccccttgcttcagttcatttacagagaccaaaatccagccaaagaccacaggactaaaggagtggagattagatggctcgaagcccaattctgaacacctgtatgaaacctcatggcatgcaaaggtctttacctttcccaaaacagaagcctgagctgttggaggcgtgagcacagagcagttttttaaaagttagattcagttgaggttctcaaagggctatttgcaaaggtggaacaccccacttccacgtgaatcacaagtcaccactcctgagaagctcagattggtgaggcctctgccagccctgcaattccactcattcttccctcttctatccttaggaggccacatgatgagagacatttcccctacactgctagctcagctgttgggcttgccttcatgcctttgttcattcattccttcaacaaatatttattgaggactctttatgcatccaggacagttttgtttacttgtacagccttgtcttcaaatgggcatggcacagaatagcagccaaatgtggatccagggctaatcagaaaaagggtccaggaataatcagcagtggctgggaaaagttaagaatataaataaagcaaagaatgggttaaaagtgtgttctggcatatctgtgcagcccagaaagtcagactgtatttgtcatcataagccaaggattaatatgaatcttaagatagtcttttaactatcaattacatgtctaactatacttttgtgaagggcagtgcttagagggcctgactgtactatggaggttggaggaacccagtaacagaccacacagtaaccaagcactgattgatctaaaggaactgaggaatgctccccaagtccttcccccagggctgaagagggacaagcagacagaataatgtaggaaatgttcccctttaatttcattcttatacccatcttagtattccaccatttgcaaaaaagaaaaaaaactcaaagataggcaaagaggggaaatgggaaaatggaaaggtttaaagtggcaagatggtctgaaccctttctccacacaaagcatagttggcactggtccagctacttccgcaccctgatggagactgtaattatcttattgagtcttccccacagttttcctacatcccttgtaattctggaatgatgtaaaatgcttggtggccttcgatcccacacacacagtaaaaaagctggattgcaaaagagattttggacttttaccccagttggacattatcaaaagctcttccctaatcaccatcttcagtggagtgtctgagtttggtatctagggggtcaagcagacctgggctggaatgcccactctgctgcttactagctgggagaccttggttctcttggttcctcaagcctgtttcttcggctttatattggagcacattagtagtacctaccctgctgacatgttatggtgacataatgaactaacatatgtaatgtgcttaacacagaatatgagctgagagatgttagcagtcattgtcgtagttgttcttgttgttgttactgttaccaagccacagggctctgacactcctgacactcctgttttctcttctgttaaacagtcctttgctccctgctgagcatgtcttcaaaagctggctctgtaaccggagcaggaagacctaatactttagggaatcacccacatctggcctcctgtttacaggacctataaagctttgaggctaatactgaactgaaacagctgacaaaaattccatgacccgccccccgactcccccgcacccaccaaagaaacctcccattatgggaaaaaagagagcaggggagatgaggtctgagaagaaatcaacggaagccagaagaagaactgaaatgggaaaacagaaaaaaagaaaaaggggaaaaagaaaaaatgaactctttcctctggaatgagggcaaaccaacgaggacatgatttcataaggcaaactttcaattgattcattcccttgttcaccaagttggactggtttcccaatacctcacctcccccacccctagtctgggcctgtggggaatggaggagcttcatcatctggccctctgctccgcccttcagtgcagggggccctgtgcctcttcccaagaggaggaggcgagcttgtggcctgagtatttacacaggccaaagggctccagcactaaaacccagccctgtcctggaagcacaccctctcctggaaatagggaattgtctcttgactccaaaacagctggctaccctattcctgtgcatgcattagggctcagggaggctggaaggagggcttccggaaacttcactccggaaaggaccaagttgttttccaattagttcgtattcatgaccgatttcctgccgtctggtggaacatactgtttagtctcccagacagccgcagacctgcctccactagggactgggccacttaactggatggagatagattaggaatgttctctagctcagcagctccctgttaaagttccttctgattagagaaacaggaaatttatccgaaggactctgccttctctgttctccaaaccagggcaaagtgctcacaaaactgctttcatttcctcttgccttttaagtcatccctctcggccttggcatgccacccccagcaatggtaatccggtaatccgatgacaaaaaggcctgtgccctgtgggctagtggaagcctgagtaattgtttttttttgaggaccataagcagggctgtcactagggggaagacacaggttctgtttttgcctcctatcagggaccacagtccattctcagagattagtccccagtgtcttaccaagactcatgtgttgcttcaaggaaatgggtcatttatagtccagattgacaggattgatgtatggtcaggttcaatttttttcttttagatggagtcttccagtgctcgcagtaactggccaccacaactatgagcctgccctctatgcaactgaggtgctgagattcacccacagtagttctgctgccttacaatgcaggatttcccccactaaatatccacctggctccccacccatggaatgccatgtcctaaggaagtgacaaagttggatgagagggggaaggttgggaaggaattgagtgagaaatcaagacaccattttgatattgtcttccttattctaggttctggctactatccggatgaaagctacaatgaagtatatgcagaggaggtcccacaggctcctgccctggactaccgaggtaatctaccctgcttctcaagcccagaaaatctcttttctggcctcagacctaggcccttccctgaagcatccccatcaggcttggctcacatgtgtcaaaactgtagcacagggaatcaggggctgtgatttctcatcatgaacttggttactgacttactgtgtgacctcacctctccagcctgaaggttctccatgtattattaatcattaagtattgactagttactcaatgcctaatcctgtgcaaggtaagcctgtgggtaatacaaggtctcagatagggttttgtccccatcatgtagcttatattctgttgggggtgatgggggggtataaagttagcacatgtagggcaagtaagtgtgaagctatgtcatagcagtaaatgcaatagggtttaagaaaaagaagtcaggaaaagggtcatgaaagatgacatttaggctaagcttagaatgataggtgggattttgagaaccagaaaggggaggggagagcattcagcaaagcagatggctaaaaatacggaagtaagaacaaacctggtagaggagggagctaagaagaaaccagcctgattggaggaaatggaatatggagggagtagtatcaaagaaggttaaatataggccaagtgcagtggctcatgcttgtaaacccagcattttgggaggccgagataggtggatcacttgaggtcaggagttcgagaccagcctggcgaatatggtgaaacctcatctccaacaaaactacaaaaaattagccaggcatggtggcatgtgcctataatcccagctactcaggtggctgaagcaggagaatcacttgaacctgggaggtggaggttgcagtgagccgagagctgagatggcaccactgctctccagcctgggtgacaaagcaaggctctgtctcaaaaaaaaaaaaaaaaaaaagttaaatataaagagtgagaccaaattaggaaagactccatgatctagggacaatactaatgagaagcatgaaaattatctgtgatgaatgctgcatagtgagtaattcctgcattaaaagggaagttaggccaggtggtatctaatatcccttctatttctgattctttgtttctttgctttgcaagccatgtggaagagtttagctgttgtactaggatctatagggagcccatcacatgtttttgcacagaggcatgacacagtaaattgtcattttagaacattaacctgattattctatgcagaaataggggttcagtggttaagtctgagtcagggagactctccaggaaccagctacagtaatgttggctagagatgactgatggtggtggcaaagaaatggagggtacagatgaaccccataaatgtttcaaagaaagagatgacaagacttagtacagacttgatgtaccaagaggctaagaaacaaactgatgtctgaaagcactcagtctgtacacctggaagaaataagacccctctcagaaagacaatgtcaaaaaagaaaactggtttggtaaagatgccctacaggcggcggaaggatgaagttgtgtgagtcatcagcttagatagatgggttgtctgagggagcagaaggccagggtcagagctttagaagacatctgtagacatgagtaggagaagaggaaccagcaaggggaaaaaaagagaattagtggtcagtcatgtaggaagatatctgggcagtacctgtcatattacagaagccacaggagaagagagttttaaggaaaggaaggggtaagagataaattgtgtcaaatattgcaaagaaatcaaattgagggtaaaggaaagatgttatctggcaagaaggaggtaaatggtgacctttaagaaaaatagtttcaactgagaaattctcagagctttgagctcctctgagcatctttgtagctaccttctacgcacgttcttctccctgccaaatggtgcatacccactgcctctctcctcagcacccactaactcctaaactctctacagtctgtttctcgcccactcacaaatctacaacctgaaatgacatctcttgaagaaaaaagttctctcccatgagagaaccaattcccatgaccctttcttgagcttgtctctcagtctctccagcagcagtgagcaccttcctttcttcttaatcccccttccttggtctccatggcatttcacaattctggtcagagctgaaactgggaaaggaggtggactctctggtggtgacaatagagagaatgagactgggatctgaacttgggtcaaccctgacctgtctcctgagctggtggactacatctccaactgctgctacacacttccatttggagatatctaaaacaaaagtatttcctctctcctgaaaaatgttctacctactgaccttcctacttctgataacactaccatcattctcttagttactcggacttcaaaatacctcaatgtcacctctaataggtcctgtcacctttaacagcccccttttcctcatcacttcctgccagtcagtcaccaagacctgtcatttctttattaatccatgggattaaaactttgacctcacacatggataatacagttgcctctaactggattatctgactcatgtttccccctcccccaaacctactggcccacaatgaccattttaaatcagaatctggccttggtctagcttcccagactgacaacttcctacctgttctccccacatgaaatctgtgctttggtcaggctgtgttcagtactgtgttcccaactgctttagcccacactgagctttctctcgcccatttattctttcatcgaatatttattgaatacttattaggtacctcttctgaaataaatgtttactgtctagacacactcatttggccttcattatgcactgcctctttggttaactttttattaccctcaagaaaatagttctgtatttaactgtatttagctatatttctgtatttgactgtatttaactgtatttgtgtatttaactgtttttaactgtatttaactgttttaactgtattcctgtatttaactgtttttaactgtatttgtgtatttaactgtatttaaggaatcatgtgtgttactctcacagagccatggtaaaaagtagatgctgaccactagcatcctgggagcagaagccagattatgggagactatagtttggagaggtggctagtaaaaagcaacagatgcagaaggtactttcatggagtctgcagccctattattaacattaaccttcttcactggttcttcttaaatgagcagaaagccctttagagaaatacaagctgcataagggcctttggtttggaggtgtagtgtctcatagctctttttaggacttagtctcagggcataaaatgaattgagtgaagttagcaatgatgagggggagggagtggccaggaaaagtacaacctgaggccccagcctcccaggtaaagtctttgtgaccttataatcaataggtctgcaactgtagtgctaaatgacttcccgtaatttgaagatggtgtctccagatggcagtagtgtgtctcagtcacatgctcaaaacgaatgctgggaaccacagcatgttgctgctttaggaaagatgggacactggctcagacccagacactgacttagggaaaatcattcacagggttgaatattttacacatgaaatttcatttggttctcacaacagccctatggaacggtttattatcccccattttaccaaccaggaaactaagctcagggaagttttagattcagagagtcacagagaatttaaactcagatctgtctgactctaaagccatgcttaattcatctctttcatcaaaaattaactcattgttctaaaaaagaagaccagaaaaaaaagaacaaccaaatcattattttagagcaaattggcatgtcatttgctatcattttcactcatcttgcactttctatcattcccttatcccaactcctagcttggagtcagctggggctgctgctttccttgcagcttgcctcatccctgagcaagctagtcacactgcctgggttatctgaagataatagaagacaacagagaaggccctttcaaaactctcgtcagcactttattttctgcatacaccttaaaaagagatagacagatgaatagctacagaaagcggagacaatgggcctgagttcaaacctccgcttctcccccttccagctcttggactctggacaaacacctattatgtgccagtcactgtgctatgtattttataaatgttatttcatttaaataaattgcacacttgctatgtagtgatatggaaagatctctaaatacactgttaagtttaccaaacaagcaatggagggaagagtgggcataatatgctactctatgtattaaaaaggaaggaaaaataagaagctataccaacatttgctttataggcacaaagaaactattaaaagtagttatttgggaggggactaagtcggggtgggcatgggagcaggggttgggggaagacattttactttgtaactttttatacttttgaggttttgagtcatgcggatatattatctattcaacaaggtcagtgtttacttcaaaatagtagcctattttatatctgcagtggcagacactgcaattacataggacatggagtttggagcagacaaagcctgggttcaaatttcagctctaccccttacttgcttagggatcctgggcaatttacttcctcatctgcaaaagagggataaacacctgcataccttacagggctgttgggagaactgtataagatgatatatgtgaaaaggaaaacatgtagcatggtgcctagaacacaggagatacacaataaagacttacacacttcctaccagacaattttgctatacagtatttttggggtttttttaggtggggtgggggagtttttttttttttttttttttttttaagacaaagtttcgctcttgttgcccaggctggagtgcaacggcacaatcttggctcacttcaacctctgcctcccaggttcaagcaattctcctgcctccgcctcccaagtagctgggattacaggcgcacactacggcacccggctaattttgtatttttagtagacccggttttaccatgttggacagggtggtctcaaactcctgacctcaggtgatccgcctgcctcggcctcccaaagtgctgggattacaggggtgagccaccacgcccagccagccatacagtatttaaccacattcttttttcttttattggtacataatactttacatatttatggggcacatgttgagtgtcacacgcatagactgtggactaatcaagtcagggtatttgcggtatccatcaccttcagtatttattatttttatgtgttggtatcaagtcctctcttctacttactttgaaatatacaaaacattgttgctaagtatagtcaccctattctgctatcaaacattagaatttatttcctctaactatagatttgtatccataacaaaactctcttcatcccctctgccacccacttacccctcccagtctctcgtatctatcattctattctctatgtccatgagattaactttttagcacccacaattaaatgagaacatgcagtatttgtctttttgtgcctggcttattttgcttaacataatgtcttccagttccatccatgttgctgcaaatgacaggatttcattctttattatggccaaatactattctattatgtatatgtaccacattttatttatccattagtccactgatggatacttaggttgattccatatctttgctattgtgaatagtgctgtgataaacacacgaatgcagatccctttgatatcttgatttcttttcctttaaataggtacccagtagtgggactgctgaatcatacggtagtgctagttccctccctcccttccttccttcctttccttccttctccttccttctccttcctttcttccttccttccttccttcgagatggagcctcattcttgttgcacaggctggagtgcagtggcgccatctcggctcactgcaacctctgcctcctgggttcaagcgattctcctgcctcagcctccccagtagctgggattacaggcacccgccaccacgcccagctaatttttgtatttttagtagagacggggtttcaccatgttggccaggctggtctcgaactcctgacctcaggtgattcacctgtcttgaccttccaaagtgctgggattacaggtgtgagccaccacgcctggctagttttcattttttaagaaatttccatactgttttccatagtggttatattaatttacattctcatcaacaatgtatggttcccttttctctgcatcctggccggcatctgttatttatgtctttttttttttttttttttgagacagagtctcactctgtcccccaggatggagtgcaatggcatgatctcggctcactgcaacctctacctcctgggttcaagcaatccttctgcctcagcttcccaagttgctgggattacaggtgcccaccaccatgcccagctaatttttggatttttagtagagacgggatttcatcatgttcgccaggctggtctcaaactcctgacctcaaatgatccgcctgcggaggcctcccaaagtcctgggattacaggcatgagccactgtgcctggcctttttaataatagccattttaactggggtgagatgatatctcattgtgtggttttgatttgcatttccctgatgattagtgatgttgagcatattttcacatatctgttggccatttgtgtgtcctcttttgagaaatatctgttcatgtcctttgcccaatattttgtttttgttttttgtttttgttttggagacggagtctcctgacctcgtaatccgcccaccttggcctcccaaagtgctgggattacaggcgtgagccactgcgcccagcccctttgcccaatattttaatggaattatttgtttttctactgttgagttgttcgagttccttgtatatactggacattattagtcccctgatggataagtagtttgcaaatattttctcccattcaagaggctgtctcttcactcagttgtttgttgttgttttgctgtgcaggagctttttagtttaatatagtcttcctggtctattgttgtttttgtttcctggcttttgaggtcttaaccataaaattgttgcctagaccaatatcctgaggagttttccctatgttttcttctagtaattttatacttctgggtcttacatttaagtttttactccaccttgagtaaatttttggatatgagagatgggtgtccaatttcattattctgtataaggttatctagttttctcagcaccatttattgaagagagtgtcctttccccagtgtatgttcttgatggccttgtcaaagatcagttggctataaatatgtgaatttatttctgggtttgctattctgttccattgatctatatatctatttttataccaatactgtgttgttttggttactatagccttacaatatattttgaagtcaggtaatgtgatgcctctagctttgttctttttgcttgagattgctttggctattctggctcttttttagttccacattaattttaggattgctttttatatttctgtgaaaaatgatgttggtattttgatagaaagtgcattgaatctgtagattgctttgagcaatatggtcattttaacaatattaattcttctgatccatgaacacgggatatctatttttgtgtcctctttaatttctttcatcgatgttttatagttttcagtgtaaaggttttcacttctttggttaagtttatttctagatttctttgtagctattgtaaatggaattgccttcttgatttcttttaaccacatcctcgtttcagtttcccatgggcattctttgggtacagttgctcagccacttatgaatttttaaccatattgtcacctctcctgtattacatctcatccacatcaatgacatgaaaagcattgtcacatgcctcacttacttccacatagtgtatccaccatttcccctgctctaccagtctggtgaccctacccaaacaggaaattaggtcagtctggaattacttgttccagagggttcctggagatcactatttctctgggtaactgccatacgccttatgtttaaatattctagaacactatgctatcagtgctgtcagtgtcactaggctatagttcccagagacttcttccttatttgaaaacagattgtgtttgctcttctccagcctttcaacgtttttgtctttatgccaggattttttctgggtcggaaaatttgaacttatttacaatagctggggcctctcctactgtctcagcatttagaccgacctttatatttccctttaccattcttacttattctaccgattccaatctgatgtgtattttccttgacagactatgggagcgatatagaatgggagtgattgttgaggtcccagcctgccaaataaggtctttgtgatatgtgttgtggccttataatcaacagctctgcaactgtagtgcttaaaagactttctgtaatttggagatggtgtctccagatggcagccatgtgtcactgccacaggctcaaaagtaatgctggaagccccaagagtagtgtttactgaagaaaagatttctcactgtcatctgtcttcattctccagttgcactcagaaagaggctctagcctttctttgttcctttggtgtctcatctacttcttttttttttttttcaaagctttttttttttcccccttaggatgtgggaactgagtcaactcacatggggctttagccttcccaaccctaggccaacagacccgtgccatgctgtgtgtgtgcatccttgggcaggcggccctctgcttgtttatatgtgcccctttaaactctgaacccactaaagagtcatttattttgtatagcctgtgaggcatctttatgatgcctttatgatttaacagccttataaccttttgtgctcagtactgaactgggattggactttaattcctaagaagccttcttccttctttgatgtcacattcccttcctctctctagtttacatttttgtattatcctttaaatttttattttaaacatacatacagaaaaactcactctttttggtgtacagttctgtgagttttgacaactgcatagggtcacataactcccaccacagtatgagacagttccatcacttcaaaatcttgcccagtgcttcccctttgatgttattccctacctctacccctaatctctggcaaacactgatctgtactctgtcactgtatttttgcctatgtccctatatttttgttatataaatggaactctacagtatgtagtttttcaagtgtggcttctttcacgtcccaaaataaatttgagattgattgatgttgttgcatgtatcagcacttcattcttttgtatgaatacaccacagttagtttagccattcacccatagaaagacatttgaggctgggcgcggtggctcatgcctgtgatcccagcactttaggaggccaaggcgagcagattaagaagtcaagagatcgagaccattctagccaacaaggtgaaaccccgtctctactaaaaatacaaaaattaaatacaaaaattagctgggcgtggtggcaggcgcctgtagtcccagctactcgggaggctgaggcaggagaatcaagcttgaacccaggaggtggaggttgccgtgagccgagattgcaccactgcactccagcctggtgacagagggagactccgtctcaaaaaaaaaaaaagaaaagagaagaaagaaagacatttgagatttgagttgtttccagcttttggcaattatgaataaagctacttttaactctcgtgtacaggattttgtgtggacacaggtttttatttcactggcataaatacctttaagtgggattgcagagtcgtatggtaagtgtacctttctttataagaaggtaggtgttacctttataagaaatagccaaaatattttccaaagtggctgtatttttgcatttccaccagccatatatgagaattccagtttctctccatcttcacaaacacttggtattaccagttttttttaaggataccctccctgatggatatataagtagtatctcattatgattttaacttgcatttcccaaatgattaatgatgctgaacatcttttcatgtgcttatttgccatcggtgtagcctattcagtgccatgtgtgcttatatcttttgtccatgttctaactggattgtttgctttttcaatgttttgagagttctttctatattttaaatactagtcccttttatggctttgtcttttcacagagcaatttttaattttgacaaggtccaatttgttaattcattaatttatttattaaaatttaattcttctggccgggcgcagtggctcacgcctgtaatcgcagcactttggaaggccgaggcaggaggatcacaaggtcaggagatcgagaccatcctggctaacacagtgaaatctcgtctctactaaaatacaaaaacttagccaggcatgatggcaggcgcctgtagtcccagctactcaggaggctgaggcaggagaatggcgtgaacgtgggaggcggagcttgcagtgagctgagattacgccactgcactccagcctgggcgagagtgagactccgtctcaaaaaaacaaattttaatttttcttttattaattctgctgttggtgtcatacctcagaccactttgcttagccctaaatcccagtgaccttctcctgttttttcaagtccatgatcccatttgagttaatttttgtataaggtgtgagacttaggtcgaggtggggttttttttttttttttttttttttttgcatatggaagtacaagtgctccagcaccgtttgtttgaaggctatctttcttccacttaattgtttttgcacttttgtcaaaaatcatttcaacacacctgtgtgggtttacttctgggctctctatttttttccattgacctatttgtcttttcaccaacaccacactgtcttgattactatacttctagcttgcctttcttctattgctacagtcccccgatggtgttatacattaaatatccaggatggagaagccacatgctactcaccgaagggaggaaattatcacagcagcctgggcacgcgttgtgagctctcctgtgaccggggctttcgattgattggaaggaggtcggtgcaatgcctgccaagccgtcgttggtctggaactgcctactgcaggcgtaagttgtgtgtgtgcatatgctgatgtatgtatgcgagagaagccagccagccagctgctgagggtatatgcccggaggtgttactaatatgcccttctctcaagtacaaattgagaatattccataagccccccagcagggcctttccccattctaacattcgagttccatttctctgggttactgcccaggcaatatgagcatttaactagcaacaagctcttctgtctcggggagcccaggagtgcacagccagagctaaggcttgggcctgaggtctgttgtggacctagatcttcttctggagctcctaaggatgtgtggtcttagactcttttccacttgtggtcaactgctgtaattcctggcctgtagccttagaagaccttggcagtggagctgtgaaacatgtgctattcttaattttcttctggaagtcagaagaaaaatccctaagtctagaatgtgaaagtgctgatatacacacattccaaatcacgtcccccttcagcttccaaatctctacctcttactcaagttccatagccttttagcagctgaacttttcctgtccatatgtccatggcagaacaccacttgtaggacacccatgtatgcgcagccctgtattggtcacttcctgtgttactcaattcttcaagtactcccaggctgcttatagatgaatgggatagaaacacaaatgtgtgcacatcagtgtggtgtaactggatgcagaagtgctgagcattcatatagaaatggggctggtcagagaagacgctgtagacgagaaaagaagcttgatagccagaaagcaggcagtcaccacacccctctcggtgactggaattaaattgtttcaggacttagaccccaacattttcaacaggaatttgaatcggtctgacacaattgaaaaatataggtctgtaaagtacaagtgaacacaaaaccaattaaaataatggtgacatacatatttccaggtgcctacaatgagtcaattactacatttgagcactgaatctagctttgactttcctcataagagacaaaagggcaaatgctttggatctatcatttttcctgtcatatgatactaagcaaacacattcatctgaagagacaaatcttttgccctgatttcaaaaaggtcatttttgcataggtctttacaaagggacactggaaaacagaaaatgcaataatctttaagtctggtttgccaagcaacaaaatgaacatagcttatacagatctttattcaaagctccaacaattgaacttaggcaggactagaagttagacaacctaaaggaatatatggcctccttctctcaagtatcaggtatctccaacaatactttggcaagcataggctcacaattaatccatggtgacaggctccacctctgccacacgtggtgtccaaggcacatggattcctcttttaccaaataccacacctggccctccaggcactggtctgacttgtattcttgcccagacagagagtcagcccaagttggcatgtaagtgagcctcagctgagcagtacctatgggagccccaaaattatattgagtatgcctggaggagaaaagaagctttgaacgtgctcaagggcatctagcatttgaggaataagagacaaaaattaacagttgctaaggccctaaatgagcccagaggatatatgcattgtcttttttaatttatacaacaatcctatgaggtatccacatttcactgaagaaaacactgagactcaaagagatgaggcaacttcttaaagttacagagctagtaagaggtagaactgggatgcaaagtcaggtctgattttttttttttttttactcttgataagttgttttccttccccctctaaaatagattctatttgtttagagaagttttaagttcacagcaaaattgaatgaaagatacagatatttcccatttatccccagcacccacacatgtacagcctcccctgttgtcaacatcccccaccagagtggtacattttttacagttgacgaacataaattaatacatcattgtcacctgaattccatagattatattaaggcccactcttgttgtatattctatggattttgacaatgtacagtgttaggtctgattttgaagtctatatgcttggacaagtaatttacttttttgacacccccctgcccaagggtgctgctatactttatgaaaatacaaagacaattagggaaaaaggcagttaggcacaaaaatgtaagggcagttcaggtagggtttctgtattttctgctctttctgatgtttctccctgtgctagatgcccaggcatcacctccagatagtcgcacaagccactgagcttgccacttggttttctcttagagatgagatgccacgcactaccattcatcactagtggcacttacacctgcacaaatggagtgcttcttgactctcgctgtgactacagctgttccagtggctaccacctggaaggtgatcgcagccgaatctgcatggaagatgggagatggagtggaggcgagcctgtatgtgtaggtaaatgctggttgctcccagttgtcctggtgcaaagagccaccccagcattatatcgacaaaagatgtggaattctcaccacagaaggcattcctcttagctatgagggtggcaccctgggtatttgctaaacaaaatgatcttctcccctgaagttgcgcttccttccccagtttccttgagcaccttgaactttttatctacccagtggtgtgtggcattgcttcagtggattccctccagggaaagcaaggggcccacgagtcagcacttgatttttcatcttggcagacatagatccccccaagatccgctgtccccactcacgtgagaagatggcagagccagagaaattgactgctcgagtatactgggacccaccgttggtgaaagattctgctgatggtaccatcaccaggtgagcctgaataatggatgccccttatgccttccctcggcttctctcagtcattcaggctggtcacattgaaactgcacaggctaaggtgacagtggggatgtgcctcagacttcaattctaagggtctctttcctcagtgtttatttcaccctgtcccatgcagggtgacacttcggggccctgagcctggctctcactttcccgaaggagagcatgtgattcgttacactgcctatgaccgagcctacaaccgggccagctgcaagttcattgtgaaagtacaaggtcagaaagaattatttagtttccatattgttcattaatcctgctctaccctgacccaccccatgtctctcctctctatgcctggaagagacacacctcatttatactgggagaggagaaaaacaagttcaccaaacaggcttatttaggaagccagcgttacatgtgcatacatatgtttctgaaaccttgactctccaacaagactctcatcaacaagactctcattatcctaaatccagataaaatccacaaggatattctttatccatttcttttcttagacttcaaaatgatcacatgtaatcagccatcattctgtcgttcacctctgataaaactggtggtgttggctgcctgattcttcctctttgctttgtgttgtattgttttgttttgcttttctcattataaaaataattcatgcttattgttgaacatttgataaataaagaaatatataaagggggaaaatctattaccccatcatccagaggcaactgctattaactttttggtattttccttccagtcttttttctatacatactttaaaaaatatatagttgagattgtactgtacatccataaatcatccttttcacttttcattaacaaagtaattttcccatgttatttaaaaattcttcagaaatatttttaatgacagcataatattctactctaaaaatatatcgtaatttgcttaacccttctcccaccaatgaacatttaagattcctccaacttatttctgttattaagaggaattctgcaaggtagtcatctttacacagcatgtccataaagtctggaaacagatggtaatattttcttttaaagattgtcagtcttttgataacaacatgtatattcacctgtgtttccagactttacaaacctttgtctgcatttcagatttaattccttaagaaaggaaaattccagctctatccccagccagtggaaatacagaaaagccatttttctgatcatcctaagtcttctgatctagaaagcccagcatgggcaccctcttagcctttccttcttataagaaacaccataacttctaacttgagctcctccctgacagtgagacgctgcccaactctgaaacctccgcagcacggctacctcacctgcacctcagcgggggacaactatggtgccacctgtgaataccactgtgatggcggttatgatcgccaggggacaccctcccgggtctgtcagtccagccgccagtggtcaggttcaccaccaatctgtgctcgtgagtgaaaccggggaatggggcaagtggatgtggtgatcaggggaactttggaggatcttcctcatggacaggggtccaataacaatgtatatgatgtgggaaaggggggttctgggatgtgtctaatttaaaggccaacattcccccgtagactactcctaccccaagaagaagggtttaaaatctctaagtgttcttttaggatttcccccaagggatgggagaaacagccagagagaggtaacctgaaagactggaacacctcaagatgttaggttacctaagctgggatggaggagaaagccgtactctgactggtcacctgcttctgccctagctatgaagattaacgtcaacgtcaactcagctgctggtctcttggatcaattctatgagaaacagcgactcctcatcatctcagctcctgatccttccaaccgatattataaaatgcagatctctatgctacaggtaaggcccactcccctaaagagggcttagctcctgtaaattatcccttaccttttccaaatcagagttgttctctgcagcacaaaccttacctacttcctgaaactttttgtggatagcatttgatcagttttaccatagacatatttagcacatttaaaaaactgtttttactgaaaaggcaataaagtcactggagtggtggctgtgacttgcagggagctgggtgaaagatgggaagggagtgtggcaaagcactctgaagagacttgcaagacagctatgatcaaatgtaaatgttgggaattaagtacatttatgttttcaaggaataacagcgctaacaaacacttatgcagtaagtgctatgtagctatccagtactgatctatgggttttacacatattcatccaattctcacaacaaccctttggaggtggatactatcgttatccccattgaataggtgaggaaactgatgcatagagattaagtcacttgcccaaggtcactagctagtaagtggtggagctgggattgaacacagggagtctggctgcagaatctgtcctcttagccactaccagtagcaaaaaagaaggaaaagcgttatgatatctcaaagtaaaatgagagagttgcatggcagtttttaacataagagatacctagccaaagccactggtagggagaggtcgataggacagaataaatatgattatggggacttataaaagaacaggctaggttactgaagataattcaggatgtgctgacaagactaagagaagcagctctggggagctacaaggggctggatacccacgtgggagaaaaagctacttaggaggcttctaaagattgaatcttagaagttgcctagtgaatattcagaggcccaggatggaagcagttttacaaaaaaaaaaaaaaagaaaaaaaaaaaaaaaaggaccctggagggtctagaccaaaaagagggccttattcatctagagatccaaaaagactgacaaaggcaacagttcctttggaagcaagggagtaagaacaagaaaaggaacctgtcagcaagcatagtgactctgagggtaaggactagaggggaagcccaaagatgaaacagaggtggggtgccggggagtattcaaggcctctttaaacctcaccctggtaaatggctagcaggtgatcctgcaagacaaggcaggacagagatctggggtaggactgcaagctgcactgcccagtgcaaggaaggtaacaaggggtaatgaaaagagcactgggcacaattttggagaaatcctggagaccgagcgaaggccctggccaggtagcctattggtaaagagcacacgcttgggcagggggcatcagtcctcagtttgaatcttggctcagcatgttattgtcaccacctggcttgtgaggggtgttgtgaagattagattatgtctacaaagcattaggtttgtgtattcaataaacaacagccattatcatatcacattggctatccatcaagaacttatgtaatttaaaacctatgcaaagctaaatgattatgttcctgcaatttactcattgcatttctcttctctaccccactttgtgtaactggtttcagtagaatgaaggaaacactgttggggcaagtacttcaggaatgacagagggaacaggttgttgtagaccccacagtgtgattgcgtgatcattgggggagaaggagctcctttcccacactgcttcatatggtcccaggaggaatcagccaagtagccttaggtttgaacgcacagctctgttgcataaaatgttctgtctccctcccagcaatccacctgtggactggatttgcggcatgtgaccatcattgaactggtgggacagccacctcaggaggtggggcgcatccgggagcaacagctgtcagccaacatcatcgaggagctcaggtccaggctgggaggctgccaaacttggggggagggggggctggggcggggggagaaaccctaggcaggacactggcaaaagcggactatggggaaaccatcagacactactctcttgcggcacttcttgcgtttgaactcttatggatgcattaggtaagaccagagagtagtttctttactttggtagaacatcagaatcaaatgagggcttaaaatacagatgaccaggccccatcctaaaccaccttaggaatgtgcttttacaaaggcacctgaggggactctgaagcacagccagggctgagacagtaaacccaaacttgactcagataagcccctgctcttgttttctggcctcatctctttgccttcagtctccaaaggagcaaaagccatcttttttttttttttttttttgagacacagttttgctcttgtcgcccaggctggagtgcaatggcacgatttcagctcactgaaacctccacctcccagattcaagtgattctcctgcctcagcctcccgagtagctgggattacaggtgtgcaccaccacacccagctaatttttgtatttttagtagagacaggtttcgccatattggccaggctggtctcaaactcctgacctcaggtgatctgcccacctccgcctcccaacctgctgggattacaggcatgagccaccatgcctggccgcaaaaggcatctttaagcactgaaatctgagtaagatctatcaaatcctggggaagagaacattagaggtgacaggtgatggaagaagtgggtctttctcattatctatccagtatcacccttctaatgccttcacatatattcagggccaataaagccatcactgctctgttttagagcagtgcctctaaatgatagagaaactatacctgcctctagggcacagtctcagtggggacagaaagattcagtcctagttagagaagagactagaaaaccctcagagggagactgcagacttgcagctacagatggaagagttaaccagaaggtatttatcaacctaagggctgccatgtatgatgtgcatacacagcacagtctctgcagcgggtggcccctggagtcaccctgtgcagcctgcacagcaatatgtgatagccctgcttaaaggggcctacaatgaaagcaccgcctgttaataacaaagttgttgcagctgaggtgaggaagggacagcttagcagaactagatgcatagaggcagcaagagtagaatctgaacacagaaaaacaaagcgacttgagacaggaagtagagggaatggggaccagggatgaggtggggaaggaattagtccatgagtggagctgcaaaaagtcagagggtagtagagcctgtggggatgggtgcccagacaaggtctcatacctccctgggctgttctctctaggcaatttcagcgcctcactcgctcctacttcaacatggtgttgattgacaagcagggtattgaccgagaccgctacatggaacctgtcacccccgaggaaatcttcacattcattgatgactacctactgagcaatcaggagttgacccagcgtcgggagcaaagggacatatgcgagtgaacttgagccagggcatggttaaagtcaagggaaaagctcctctagttagctgaaactgggacctaataaaaggaggaaatgttttcccacagttctagggacaggactctgaggtgggtgagtttgacaaatcctgcggtgtttccaggcatccttttaggactgtgtaatagtttccctagaagctaggtagggactgaggacaggccttgggcagtgggttgggggtagaagttcttcctttcctaacccgggcccctgcccagctctccaaagtctttcagaaaagtaaatcctaaattcagtgatgaa

SEQ ID NO: 253 - DNA, 2646 bp, Homo sapiens
agagccagcccggaggagctagaaccttccccgcatttctttcagcagcctgagtcagaggcgggctggcctggcgtagccgcccagcctcgcggctcatgccccgatctgcccgaaccttctcccggggtcagcgccgcgccgcgccacccggctgagtcagcccgggcgggcgagaggctctcaactgggcgggaaggtgcgggaaggtgcggaaaggttcgcgaaagttcgcggcggcgggggtcgggtgaggcgcaaaaggataaaaagccggtggaagcggagctgagcagatccgagccgggctggctgcagagaaaccgcagggagagcctcactgctgagcgcccctcgacggcggagcggcagcagcctccgtggcctccagcatccgacaagaagcttcagccatgcaggccccacgggagctcgcggtgggcatcgacctgggcaccacctactcgtgcgtgggcgtgtttcagcagggccgcgtggagatcctggccaacgaccagggcaaccgcaccacgcccagctacgtggccttcaccgacaccgagcggctggtcggggacgcggccaagagccaggcggccctgaacccccacaacaccgtgttcgatgccaagcggctgatcgggcgcaagttcgcggacaccacggtgcagtcggacatgaagcactggcccttccgggtggtgagcgagggcggcaagcccaaggtgcgcgtatgctaccgcggggaggacaagacgttctaccccgaggagatctcgtccatggtgctgagcaagatgaaggagacggccgaggcgtacctgggccagcccgtgaagcacgcagtgatcaccgtgcccgcctatttcaatgactcgcagcgccaggccaccaaggacgcgggggccatcgcggggctcaacgtgttgcggatcatcaatgagcccacggcagctgccatcgcctatgggctggaccggcggggcgcgggagagcgcaacgtgctcatttttgacctgggtgggggcaccttcgatgtgtcggttctctccattgacgctggtgtctttgaggtgaaagccactgctggagatacccacctgggaggagaggacttcgacaaccggctcgtgaaccacttcatggaagaattccggcggaagcatgggaaggacctgagcgggaacaagcgtgccctgcgcaggctgcgcacagcctgtgagcgcgccaagcgcaccctgtcctccagcacccaggccaccctggagatagactccctgttcgagggcgtggacttctacacgtccatcactcgtgcccgctttgaggaactgtgctcagacctcttccgcagcaccctggagccggtggagaaggccctgcgggatgccaagctggacaaggcccagattcatgacgtcgtcctggtggggggctccacacgcatccccaaggtgcagaagttgctgcaggacttcttcaacggcaaggagctgaacaagagcatcaaccctgatgaggctgtggcctatggggctgctgtgcaggcggccgtgttgatgggggacaaatgtgagaaagtgcaggatctcctgctgctggatgtggctcccctgtctctggggctggagacagcaggtggggtgatgaccacgctgatccagaggaacgccactatccccaccaagcagacccagactttcaccacctactcggacaaccagcctggggtcttcatccaggtgtatgagggtgagagggccatgaccaaggacaacaacctgctggggcgttttgaactcagtggcatccctcctgccccacgtggagtcccccagatagaggtgacttttgacattgatgctaatggcatcctgagcgtgacagccactgacaggagcacaggtaaggctaacaagatcaccatcaccaatgacaagggccggctgagcaaggaggaggtggagaggatggttcatgaagccgagcagtacaaggctgaggatgaggcccagagggacagagtggctgccaaaaactcgctggaggcccatgtcttccatgtgaaaggttctttgcaagaggaaagccttagggacaagattcccgaagaggacaggcgcaaaatgcaagacaagtgtcgggaagtccttgcctggctggagcacaaccagctggcagagaaggaggagtatgagcatcagaagagggagctggagcaaatctgtcgccccatcttctccaggctctatggggggcctggtgtccctgggggcagcagttgtggcactcaagcccgccagggggaccccagcaccggccccatcattgaggaggttgattgaatggcccttcgtgataagtcagctgtgactgtcagggctatgctatgggccttctagactgtcttctatgatcctgcccttcagagatgaactttccctccaaagctagaactttcttcccaggataactgaagtcttttgactttttgcggggagggcggttcatcctcttctgcttcaaataaaaagtcattaatttattaaaacttgtgtggcactttaacattgctttcacctatattttgtgtactttgttacttgcatgtatgaattttgttatgtaaaatatagttatagacct

SEQ ID NO: 254 - DNA, 111227 bp, Homo sapiens
aaaggcgggccggctggcgtccaagttcctgaccaggcgcgggccggcccgcgggaccagcagccgggtggcggcgcgatcggccccgagaggctcaggcgccccccgcatcgagcgcgcgggccgggcgggccagggcggcgggcggagcgggaggcggccacgtccccggcgggcctgggcgcggggaggcccggccccctgcgagcgcgccgcgaacgctgcggtctccgcccgcagaggccgccggggccgtggatggggagggcgcgccgcccggcggtcccagcgcacaggcggccacgatgagggtcaacgagaagtactcgacgctcccggccgaggaccgcagcgtccacatcatcaacatctgcgccatcgaggacatcggctacctgccgtccgagggcacggtgagtgcgggcggccgcgacccgggcgggagggccgcgcacctgcgccttggcgagggcgggaaccgggcggcggcagggcctcctgggaccccagggcgggggccgcaccctccgcgcagggttcgcggcgcccacccgcgcacgtgcgtgccgggaagggcgcgccggccctggccaagtgcgtgcgccccgcctgcgctctgagcgttccgagcgcggcgcccactccgcccagcgcagcgccgggcccccaggcatggcccggcctcggagctctgcggccccgaagccgcctcacccggggctgcagctcggagcccaaccaagagctcacggctggcgccctggatgggaccttcccttcctggctcgcggccaggggtacctgttggggcagccagggtgagggtgatggtgggggtcttgggtgaaggccaagttggtcgccactccacgatgatggtaactgccaggccccactgcttcactatcctctggggccagagtcccgagtcctcacttgccagaaacgcatattgtgcccagggcactgggcctggtaccctggcattggcaccgaaactctcaaagcccagggtgtcaatcattggagattgctttctaccctcgcccctgtctcccctgggcgcccaggcctggttcaggtgggggcactggttggaagccagtcatgtaagttggggaccccatcctgaggtccccaatatccccaccaccctccccagggccagacccagaggtctaggtaaccctatgttttagagaggggggcagaattctcccaggaagggtttggcttgaaggacaaagtttgccggaagaggataggacagggctgggactggctatctcctcttggggtgagggaagctctcagcagcaatttgtgggacctaaggacagaagctcccttctaccttcttcccatgcagaccccatcaaagcccctccccaggcgtcaggcccagcagggctgcttcaagcaggatgaggatggccctggcctgtccctctagtctctggagctcacagagaggcagggaatgaagcgggagcaaagctcctgctttgagtctctgttccagcgacagcagggactctggccttggtcaggccttgcaccccttgggtcacagtggaggggggtggcctgggggcatctcttcaggaaatgagattgcacagagctgccaggagcactgggaacaggtgtagatggagagggagtctacctgtgactcacaggactggccggaggagctcagggattgccatttgatcaaagccatgtgccaggccatgctggcccctgggcaccctcaaagaatgagacagggaaggctccgcccatctggagcttacttaagaaatggtgatggaacgttacccgttatccacggcagtgacagggactattccatagtgctgggccagtgctgtgtcttagctcattgaactctcacaacgtgtgaggtaggtgctattgctacaggcaaggagactgaggcccagaggggcaggtgaccagctccaagtcacccatcagctgggaggacagttaggaagggcccaggacacagaccaggtagctgcagaaagcctgcctgaagaataaacattctggagaaggagctaattctacccataatgggtagggactgagtctttcaaaaacattgcatactcaaagtcccaaaggtgggaccatggaggtaccagccaggagccaggggatggtagtggtggccaaggtgatggagaaatggatgctctgggggtagactagacaagacctgatggtgaactgaatgttcaataagaaatggagcctgtcatgaatagcccccggtctctagagtttttgttccaggacccattgcttatccagacccagaaactatctgcctcctgcaaacccaggtgaaggccataaagtctgcaaagaggcagctgggcccagatgagaccatcagctcctgggttccacacaacacttccgttacacatactttgttttgtgagcttggaaggctgaatcagaggcgcgcgctgtgggaggcagaccctgggagcagcatctgccggtagatggccagacaggctggaggctgcagccatggagcaggggcctgttggtgcagggcaggcagcatggcagggagagcctcccagggcatccccggcaccactcaagccaacagttgttgctcagtcattaccctgagtcacccaacgaaggcggctctgtacacacgagggccagagggcgtgggctgcatttcaaaagttcctatcctgttctcaggtgtgaaactcatacatgcacaagtcaaccacaagataagttcatccaattcaggctgcggttcccagcctgtgacttttgcctctcttcattcccaagttcaagggtggaaatgacttcattgtttctgtgcagagatataagaagaaatgacttgaaagccagaggccaggttgaatgcaatttgtttccatttccctctgttaatctttgagtgtttctactttcttccttgaaactggtggttgtccatggtctgggatctgtgtgccccaaacaagcccagacactccagagatacctgatttgctggtatctgcccagtatttcctggcttatctgctgtgggagatgatctgcttgtagattatggaacgtgccccataatcgtacattgatatgtagtgacctggttttaaaatttttttagaagacaaaggaagtttaaaactgatgttcccttcttaactataatttgaagagtctcaaaaccaaaagaaattttacaggccactgatttcatttagcccattttcagagaaagtgaacattgtagattcccttgagtgatcaagatatttcatatggatatgaattcagttcctggagtaccaactccagagaccagcggaagaaaccagagcccagagtcccaggacagtattaaaggttaaaggacataggattgctttcccccttctgcccttttgttggagtttgaggaaggggttcatagaggcaggtgtggaccagatataggctgccattcatggcgcctgggacaggtcttccaggacactcctgctgtgaagggaacctttgtccttcacattttcccatgtggcctcagggaagtatttctcttccaccatattcctatcttccttagggaggcaccttccaggagtacctccctcagttatgcagaaggaagtcttcaaaataccttcagatcatcgatcacattttatccccacaagaatcctgtgacctaagtccagatgtctttgtcggcatctcacagatgagaaaactgaggctcccagttgggggttgtggtgtttaagttgctggcctgcctgggtctcagcttctgtatccttggatctgatggccacagccagccacagtatacaagacccagcctctgttgttcattcacacatgcctgcattcattcattcattcagcaaccacatattcagtgctaaccatcaaaaagatgaataagagggctgggtgccatggctcacacctctaaatccagcaccttgggaggccgaggctggtggatcacctaaggtcaagagttcaagaccagcctggccaacatagtgaaacccaagtctctactaaaattatgaacattaaccaggcatggtggtatgcacctgtaatcccagctacttgggaggcagaggcacaagaattgcttgaacccaaaaggtggaggttgcagtgagccaagatcgcaccactgcgctccagcctaggcgacagagcaagaattcgtctcaaaagaaaagatgaataagaaactccttaccctcagcaaaggtgcaccgaggggttgcttgcccctttcttaagaatacagaaacagaaatgttctgaagctttcccaggccttcgaatttggaagttatgcacaaagtctcacccacatccctcccactgcaattacatctttgcctttttgtcccgttctacacaagaaaggcacccactccactgctccgtggaagggcaccataaagtcacacgcactggtccttgctatgcattcacctcccgactctctccaagcccagctcaggattgctctccagaccctaggagcctcccagccttttagagtgtagacgggagagagcccacaccttaaaaactaatacctaaacagacaaagcagcttatccagggtcacacagcaaatcagtgacagagtcaggcgctgggactcccacacctgtgcttggtgctgcctcctgctggtcccagcatcacatccagctccttttgtaactttttaaagtctggatttggcactgctaccatctttcacttgtggtccactctggccacaagattttttttcccctgtcctcccctagttctttatgtgcgtgtgtctcagttcccaattagagcaaacttctgttgaaggttcactctatgctaggccctgttggaaactctttacaagatatattaacaggtttcatccttccagcaaccccatgagggaggtcatataacatgaggtaggtcttagggatatggagagacaaaaacacgaagctgtgtgcctggggtcacacagctggtgagtggcagagctggtgtttgaacacaggtaggaggatgcccactcttgatcaggccccagtgctgtctctccctccaccatgcatgggaagttagatgatgtttctgctctcccaaagactgtaggcccctgagggtaggtgtgtcccttgataggcccccagtggacagatgatgggggttcgtattgaacctggtagccttccctgtttcaacttgatagaggatttttggccactccttagtgtaatttccctgctttctggcttggagggatccctgtggaatttcctccctgtctctaaggatttgtttgctattatcattatccctgccaaccaggagtgtttatggagccccaaccaggttctcagtccctgtgtactgaggtcaggttggagctctgtcctaacacatctctagacagtccctggccaggcctccggggtcctgccatccagctttggggctaatttgcaagttaagaacttgtgggtagatggctcagaggcagtcccagcacagagagacctgcagaggccagaggggctggccaccttcagatcccagaggatgctggatttgccctgtgccctgaaaaccaggttgaattacaaagggctgagaaggacagaaagggcgtacagggagggacacagtgtctgcaaaggcaaggaggagggactggggaaggcctgggggagggggagaggagactggggaaggcagtatggggaggagatgaggaggaatagccgaagccctcaggcgcacctgggactcaggcaggtgtgccctccgacccctcgagaccctgcattcacctgctgggcactggcacattccctgcacatgggcttctgtcttccaagagcagcttccggtcgggctcttttgccccctcagccatggggagagaaaagcacctttagtcaccagctccctgtaaccctgcccttgtttgacctccctgagatgttgaggggaaagcgtatctgccattgggtggccatcagggtgacggggatggctcccaggtgcctggccccagaattagatggagcgtccatcctggcacgttctggtcagtgtgtgctgagcttagcagagaccatcatcccctcagtgaagcctcccgctgctccgcatttagcagaaaccaaccctggggctcagagtgtccagagcctcccccaggccttgcagctggagaggggccaagcctagatgtagacccaggtctggctgactacacggcctgccatgaagccagtgccctgtcctgggctggcctcacctgctgccccacactgtccagacatacctgtggcctggtgttgcccaaacctcccgactagcctgtgcttatctgctgtctctactggccctgcttaaccactgccccaggctgggacagaactgaggcctgctaaattgctgcactctccccatgcccctcagcaccagagacagagccctgcactggggtcagccagcaggagtctggtactcagggccactgagctgggcagctcacccgtgggagcctcagtttcctccaggtcaaatggacctaactatagtaaccccctcatagggtcagcttgtggggactcagcgagatgacatacctgggccgagaaacagcgtcacccttagtcgcggctcctactaaggggggccgcaccttgggcgtgcagatgggacttgaggctgagctcagcctcccgcctgcgctgtaacccgggctctcctgccctgctgggcctcagtttcctccttggcgaattgagaagaatagctctttcgtgcttctcctgcagaaggaatgcaggccccccgtgctggctacagacttgcgatactggggtcttccgtgaaccccgtccttcatggggctgggcatgggaacccactgccctcaaaagccagccctcccccacccttccccctgagccctcccaagccacccacccacatgggcgtggtcgtggcccctaagcaccctcagactttgtcacagagggcaaggtgggcggggcacgcacactgagtccaggtcctcctgaaggtcaccagcacagcggggccctgtgttactgtagagagaagtcagttgcttagtttcagcctcctgccggcaccagatgctgaccaggccctcccaggtggtgagcaatgctgtttccaggagaggcatcctagggccagagaggccaaggtgccagggacatggccccaactgtcccctaaccaggggtagaggagtctagacccttgacatcaacacctatgaaaggtggggcagcccccaaccagcagccctggcccagagcctcctctctccttcccctacaactaaaaaggacagcctccactcgaggccttccctccccctctcccccactgcagtgctgactgtttggggaggggctccaccctccggcttccctgatacactttgggttgtatacagcccacctgcctcgaatgagggattctgcctgccccttttcccgaccagtgcacagccatttagagccatggtgcagccggaagctgcccaggggctccaggcgaccacgtggggggaccctccaggccagcgaggcccaagcacagctctgtccaaaggccacaggtgctcgggccctgcctggcgcagcatgccgtccctgcactccatcagggaggccctcttctcggatgatgcccctcgggaactgatagtgccctagggagcgtcctcacgtagccacaggaaactgaggtggaaaccaggcggccagctcgagggatgaggcacagctctgtggaccattagcagcttggagttgcctgttaggttctacccagcatggctttttttattttttcttatttcggaaacccagattgctgatcgacctgtctgtcttgataaccggccaaacccctcgggaattccagcaatgcaggcttggctttagcaatggtcccatcacactgccactgtgggaatatctggtttttaaacaaactgctccatactgctatctcccgtggccccctagagtccttcaaacaaataaggaaactgaggcagggcaggccctgttggagccctaaccccgcccccttggtcaccccagggcacccaccagcggtgcccatccataccagtggctcactgtcctctgcacccaaaggtgactgaccgtgcaggtgctgccgcaggccacgtgtggggaaggtgcaagcgcagggtcattaacaccccaggagtgacccccagccaagaaagggccagagcgggtgcatgatcacccaacttcctcaccctctgggtactggcagtgggatgtgcccttcaaggtcactccgagggtccccagcaggacggaccccagctgcacatagcggtggccgctccttaacccacccctgtcagcctccctccccttcaccctactctggcacctgagatcacctcccaagtaaaacgcttgcacccctggcctctgctcaggctctgtttgggggagagccctgactaagacagtgaaagcctcacctctggacacacagctagttagtggccctgtggccaccttgacatggcactgcctctgacactggccatcagagattgagatttgcacgcacagaacctgagctcagctctgcctcagcccctatccatgtgcatggggagccctcattcacttggtagcttttgccatagcttttgttgctgggggatattttgtttgttcatttaatttttaatttgggtgggtacatagtgggtgtatatatttatggggtacatgagatattttggtacaggtaatgcaatacgtaataatcacctcatggaaaactgggtattttcccctcaagcatttatcctgtgtgttacaaacaacccagttatgctcctttagttatttgtccatgtacaattaaattattattgatgatagtcccctgttgtactgtcaaatactaggtcttattctttctcattattttttgtacccattaaccatcccctaccatagctttttgcaagcagccagggaggttcctgacatccagcctgctctagttccatagaccaggagggcttctgggggaccatatgtggcttggcaccttcatgaatgattagcagtgaatacctccttctcgaagttcagctccctgaaggcagggtcttctgctgtgttcccaggtgtatctcaggccctaggacagtgcctggcccgtggagggcgctcagggagtgtttgttgaacgagtgagtgaggagtgagtggatgaagggagcagcgcaccctccaaaggcccatcacgagcagctcgatggtgaatgggtgtcttttcttccacccttagctgctgaactccttatctgtggaccctgatgccgagtgcaagtatggcctgtacttcagggacggccggcgcaaggtggactacatcctggtgtaccatcacaagaggccctcgggcaaccggaccctggtcaggagggtgcagcacagcgacaccccctctggggctcgcagcgtcaagcaggaccaccccctgccgggcaagggggcgtcgctggatgcaggctcgggggagcccccgatggactaccacgaggatgacaagcgcttccgcagggaggagtacgagggcaacctcctggaggcgggcctggagctggagcgggacgaggacgtaactatctcactgcgcgctgtttgtggggggtggggggtgggctgcgtggggggcagtaggggggcagctgcttccatagtcagagggtgcgaggctggtatcttgttttagctttaagctgttcttaaagaaggggcagacgggccagacgcagtggctcacacctgtaatcccagcacttcgggaggctgaggggggtggttcacgaggtcaagagatcgaggccatcctggccaacacggtgaaaccccatctgtactaaaaatacaaaaattagctgggcatggtggcatgtgtctgtggcccccctactcgggaggctgaggcaggaaaatcacttgaacccaggaggcagaggttgcagtgagcggacatcacgccactgcacgccagcctggcgacagagtgagactctgcctcaaaaaaaaaaaaaaaaaaaaagaagaagaagacagggcagcagacaaaaacactgttcttgttaaggtggggtagaaattgcttttgaacagagttagggagccctgacctgctcctctggccatgtctgctctgggagagggtctggccttcacagccatgaccttcagagtcagagcatcgcctgcttctggtcagctcctttcctgggaagatttgccaatcgggggagggaggacaaagctctcctgggagtcttcctggatggggtcggcccttctctgggcctcagtttctcgtctgtagagtgagatgtgggtccagctgagccctgggagtcgttggtgctctgaagtccgtggctctgtaacactgtgctctgaagccctgctccctagcaaagcctacgaatcttcctagaagaaagatttcaaaagagaacaaaaggtcgacccccctcgagtgcctggctgctgcggggccgagggtgcagctgtgtgcagagagaatgactttagcagccctagcacagcggtgcttccttcagcggctctgctggctgctgtgtgctctctggctgtcatcttaacctctctgtgcacgggaacccttccttccatgaatattgggtgaagggccccagcctacagagccatcactgtgcggattacccaagaatcgacaaagtctctaaaacacatcgaaaacagaaaaagttgtcggcaggttaacttagaaaccatggagtccccagtggatgttgaaaatgaacgttggctttggtttgaaatttcatccacaggcaccaccatgtccttaaatgcttttggtccagtgataagaatgtcctcggagtatttagaccaaaaagcaggttaattagggaacctggagtggaaacgcctctgttttgtgacaagtagatatgactttccttgaaatcaatggaacgtgctccatggggcctccctggaccttggcctagtgagtcaaagggtcttgttgaacctggggcatctgtctgggtctcctttcaccttcctgaggtctggccacccggcaggagattgtgagttcggccacccagatgggtccctctggagttttgagggcaggtgaggagccttacaagttttgatgatcaggaagcaaagtttgatcctgacaaggattcagagactttctccctgcctttgggggcagctgccagggaacagtgtcctgcccgactttgtcttagacacttggaacaggcgagcagtggattcctgatgggttttcgcacggtcctgccctccagccctgtggctttcagaacaatgcggctactatacagggtttgtttcagcatgtcaacttagaactggaggaaggaatcggctccatcagggaagcttggcggccgaggccactctctgggagctgaggccgagagagctggattttgagcttcatggtccttgtgtctcatctgttccccagggtttgtttgtttgtttgtttgtttgtttgtttgtttgtttgtttgttttgaggcggaatctcactctgttgcccaggctggagtgcagtggcacaatctcggctcactgcaagctccgcctcccgagttcacgccttctcctgcctcagcgggactacaggcgcccgccgtcacgcccagctaattttttgtatttttagtagagacagggtttcactgtgttagccaggatggtctcgatctcctgatctcgtggtccgcccgccttggcctcccaaagtgctgggattacaggcgtgagccaccgcgcctggcccctccccaggggattttacactccatcctcattctttcctgactacaactttgagatcttaacgctcaacaggaacttctggggtctagtaattctgactgacttctgccagatcccagaccctccacttatcctgatggaaaagctaggcctcagtttccccatttgtaaaatggagatagcaagagtatttgcatcactgagttatcataagtaacctttgcaaagtgcttaattcagagtctggcctgtggcagatgcttggctgatattgtgtcatatattattgttcatactgaagcggcaagaaggacgagaaaagaccctttccaagtctcattaaatactatctcataaatatctttttaaatattttatattctctatcatgactttgagctaaaaagcaaaacataaggacattggttactgtcaccaaaatgatctagtttttaaccagtgaaatgaccccaacttttcactggtaacttggctcaagggctaaaagaggcttttcagcagttgatctggccatgtttaagatgaaaccgtgattgtggggtagaaacgtccattcaagttttcaaagggctgaagttgagatgttcccacatccctgctggagcctctcaaatcataagctgttttatgaaggcttcctggaaaccccagagctctcatctgagctgcaccagcccctagggctgttggaaggagcgatggtttgggcggcctgttctcctggagaggggcagagccagaatctattaaaaggctgcttgggcacacgcagcgtctgaagtgtgtgtgggcccctgccagcgtggttagcagacagagctgctgccgtgttcatttcagggggaagaagcactcttgggaatgaacctttcccggaggggtgctcagattacaacgagcaaagggtttgcgattttgaaaataagatcacctccaagagagtccagttgcacaatcttacccaactggaagcaaaattcagggcttatgtgagctttcctggggagaaaaatccacagagtctatcagattctcacactgtctatgacacccacccccaaaattatgactggttgctttgaagcaggtgatatttaacagcatccccggcctctacctggccagtagcacctccctccccaagttgtgaaagcaaaccagaaatgtccccagacattgccagtgtacgtggggggcaaaaccacccccagttgagaatccctgcactgaaggctggatgaggaggcagagggagaagaggacatggagggagagaaagggggacagatgagcaagacggtcccctgaggggtgccagccacctctgggaccatctgctgtggccaggactgtgcagcagtcatggaggccactggctgtgcaggtgtgacctggcctttgttcctggggcgccggtgggtgggacacactgtgtcactcctgggcaaagtgtgctgcgagccccacacaggagtgagcaacccctatgccccgtgcgtgcctcctcactgagtcgggaggttcattgtgttgagacatcttgtgacaacctggcagatgggcttggctgagtgcacaacggggccagttcttggagatcggataacagctatgtcatgccctgcacctgcacaggctgggggcttaaaacaacacagatggatgctgtcatagctttggaggtgagaagtgcacaatcaaggtgccagcagggccgcgctccctctaagactccaggggaggatccttcctgcctttaccagctcctgggtctccaagtgttccttggctagtggccgcatcactctaatctcagcctctgtggtcactcggccctctctgttgtgtgtctctgttgtgtgtcttcttcttgtaaggacaccagtcattctatttggggcccacccctacgactttatcttaactcggttacatctgcaaagaccctgtttccaagtgagatcacattgataagtgccaggagttaggacttgaacatatctttgtaggggacaccactcagcccactccagtagctgagatgctgcactgggcaggtaatcctggagttggctgccttggatggggcaggctggagcacgcgggtagcagcatggggcagggtcatggctgagggccagggaaggtctgggggagtgacagcttccagctttggcctggtctgccttgctgcaggacccaggatgcacacaggaactcctgggggtcttgtcaaaatgcaggctctggctcagctggtctgggggacccagcacctggggtggctgaggctctggtccttcccagaccatgctttgagatgtgaggagtgtgggaagggccttttgcacaagccaggagaggcttccccagagcaagacccccagtatccacatgagcccctggagcactgtgtggtaccccaagggtgaccccagaccaagaccccagggccggctccagagagccaagagcctgttgaggtcggagccatgtcccaaagagagacccaggggtgggtcaagaaggcatgggcactcagatccacagggcggccttcaaagtgggtttacaggaggggcccagagacctcaggacagcactgcagggcaggaaagggcaggaaaagagaagggccctgaggcagggccttccttctctctctccctccttctctctctccctcttgatctccctttctctctgtcctcctcctcacctcttattcacctctacctctctatctctctctctcacttctctctgtctctctccctctgtctctctgtcctttctcttttcctctctctgtctctctctcccttctgtctcctctccctctctatcattccctttctctcttctctctctcctttcttccccctctctctctcttcccacctccctctttttcactctaccccctctcactttctctctctccccctctctctctccttctccctccctctctgtctccatctctttccctctccctccccttctctctccctccctttgacagccatggggtcagctttcagggttcccattaaagggactaaagaagatatggccaacatgttttcttgcaactaagacccattagcctttttgaagtccagcctcaaagcctgctggacattatttatgtccatggggtcattgcggagaacgccacacactaaactcttggctgtgtgtgctggggggcggctgaggcccacactgccctgatgttgaacctgacccaggctttggtagatcctgagaaggccgtggacattggaaccctataaaagtctgtttgctttcatgtcgctgcccagggctcaagtctgtaccccactggctcgccgctggttctccacatgcatccccgtagtgggtggggctgtccccgcagcagcatctgttcgccatcttcatggatgctgcttttgaaaagcaagtgagggcggactccatgggagaagggctgctttcagacaaagcccacggctggatgcataggtggtggagacgcaacctcggggctccgagtgcgggttcagaccccgcccagcccctctgagagcccggtatgcggatgtggacccagctcaaacttcctggctgagcaaccctgggcaagtggcttcacctctctgggtctcaacgtccccatctgtaaaatggagttgatagtgtgaccttccttgtggagtggtgggtgagggtcaagagagttaatcctcgagcccacagagggacagagctggccagcgttggctgtaaacgccccttacccacaggcctggggcagagcccactcctcaccactcccagggcctgaccctgctcctgccagaggggaaccgcaagtcccccttggaagagaagggtctccctgcatgtggagaccccgcccctgcccgccgccaggtgaccagggagggtggtggcagggttgccatggcctcaggacagggaagggcagccatttcttgccatttcccatggaggccttgtggatgtgggcaggtgtgggaggcagtcctggggctgcattcattgtccacagggccctgggcactggcaggggctggggagaggccctcacagatttgagaatcgggggtgggggcctggaatttgaggagtctcgggcctaatcccagctcatcagcacaaataaaagcaataaacatgctcatgagacttgtcagttccccactccgtgtgggcttcctaccagaaccatgagtaggtagggcagaatttcgatcctgagctgagagtggcacgtctggcctttgaacctggcccctaacctcacccagagactctgcactaaaacttgcagtccccgttctcccccaggggaggaagaatgggcctcttgcacgatgggatgttaggaacctctagtctattcatgaagctatttctctgctcttcattccactgttacagacttctttggtccctaaagattttatgcctccccagtcttcagctgaggcgcgaaacagattggatgacttttatcatggcctgattttcttttggcttgtcttggtttcatggaaacatatttcttttaaagtgaattctgggctgggtgccatggctcatgcctataatcccagcactttgggaggctgaggcaggaggatcacctgaggtcaggagatcaagtccagcttggccacatagcgaaaccccatctgtactaaaaatacaaaaattagccgggcgtggtggctggcgcctgtagtccgagctactcaggaggctgaggcaagagaattgcttgaacccaggaggcggaggttgcattgagccaagatcgcgccaccacacttcagcctggttgacaaaatgagactgtctcaaaaaagaaagagagagagagagagagaggaaagaaagaaaaagaaaggaaggaaggaaggaaggaaggaaggaaggaaggaaggaaggaaggaaggaaagaaagaaagaaagaaaggaaagaaagaaaggaaagagaaagaaaaagaaagaaagaaagaaagaaagaaagaaagaaagaaagaaagaaagaaagaaagaaagaaagaaagaaagaaagaaagaaaagaaaagaaagaaagagggaaagaaaattcattctggacctttttaaaaattcatgtttttaaagtgaccccaagaccatcattgcacagctctgccacagggcatcccaggctgctggggtgaaatctttgccattctggctatagttctgaggtcctcatctgtgtccaggcccatggtgtgctggagtcatgtccttctggaattctgcaagctggttgttacccgttgctggcttgaaataggccacggtggggtatttacaccatgggaattggcagatgctgcaaatcagggcttccctcgcccccgcaggagcccctcacccccgccggagcccctcaccagcatcttcttgcaccagccccatgtgccttcttgtctttggaggggttgagcatttcccaacatatctgttgagtttttaactctttttatgatcttttttatttctaggagttctatttggttcttttccaagtcagctatgtcatgttttaatagtttcctgtcctttgcagttcttttctatcttgaggtttatgtctttaaacgagttaagcatagctgatttattacccagctcatcctttgctaatcccaagctgagtgggccgatttctatctcggtcacttcagctggttctcctcccggggctgtctcttgccctggtgggggcgggtctgcttcgcttgtctgctagtcattgaccttttataatctgtggggtttcccaaagcctctgataaaggtgaccttgtccagaaaggtttgcagcgttatagatgagagccaccttgaaccaaagccacagtctgaggtgcccaggtcttcacaggcgccatggctgtaggggccagagcttctcagggtgggttccagtcctccttttccttctctttctctcctcctcctctgctgggcacccgtatcggtccgtggccttttaggaaccaggccccccagcaggaggtgagtggtgggccagcgagcattcctacctgagctctgcctcctgtcagatcagcagtgacatgacattctcactgggagcccaaaccctgttatgaacagtgcatgcgagggatctagattgtgtgctccttgtgagaatctaatgcctgatgatcagaggtggaacagtttcagccgggagcggtggctcatgcctgtaatcccaccactttgggaggctgaggtgggaggatcacctgaggtcaggacttccagaccagcctggccaacatagtgaaaccccgtctctactaaaaatacaaaaattagttgggcatggtggcacatgcctgtagtcccagctacttgggaggctgaggcgggagaattgctggaacctgggaggcggagattgcagtcagccaagattacgccaccgcactccagcctgggtgacagagtgggactctgtctcaaaaaataataataataataataataatcaaggggtgtaacagtttcatcctgaaaccccagcattgtcctgtggaaaaattgacttccacaataccagtcctccctggtgctaaaaaggttggggaccgctgtttcaggtcattgaatttcttgtttcttttcctgtggtgcattctttactatgtatcctgggagggttgatctgagtaatctaccaccttcaacagaagcaggaatgtgaaatgatatttctgctgacttacctatcatttatttctttaacaagacatcactgagcaggcctaggaccagaccccatggcaagggctgggattaaagatgtccacagcccagtccctgccccatgcttggggaagagcagtggcgcctgatccacccacggctgcattccttgggtcctcagctcgcctgagactcgagtctggagactgcgtcaggataatgggggatgtatgcttgctccagaagcaatccctcaactgtgcttcatagcagtgtccctgctatggggagccaggtcttcctatgcagtgtggacgtgatcagcagtaactgtggcgtgggaaataccaggcaccggcaatgacctctccaggcagacccctgcccagggactgagagcatctcccatcttgcccgcgtgccctctggagccgtgcgggtggagggtaggagtgagcattgcagggtcaaggtcaggctgagattcctccacatctactgttcatgggcctgggacaaggggctctgggccttccctgccccctcgtccatatttactgaagtggacacatccatagctaccaaaaggttggagagaaggcggatggtagtctgaaagccggggctgtcctaggctggcacagagtaggcgctttataaagtcgggtgccttccctctgccttctccctcactcagtggacatcactgagcctctgctctgtggccactgctgttccccgtcctagggatacatcagtcagctaaacagataagcctggcttcagacccagtgtgccagctcctatccgtgctggaagctggtgccaacggggagagacaggcagatgccagggctgctgaaaactcgcctggtcatgaagggctgaccagggatgtggcactgggcgtcacatgccccaaaagcctatttatggcagagaatgtgaaccccttggggcacccgccaaggctcctggtgtctgcccccgagtccgacggcaggaggattagaccacagcagccccgcgtcctcgtggacagacagggtcagaagagtcctgtgccttcctaatggggccacacggctccccgcagggctgggtgttctcctccttgggagctgaggaagctgcaaacagggaaacggggatttgtccaggtgttctgtgggtgctcgagggccttcgggcccaaaccccaccaacgatgaggctcctgggctttcccctgcacccagtggcctggactgctgtgcacagcacacacccatggttcctgcccgatatgggaggtgcctggcctgctgtgcacggcacacacaccccatggttcctgcctgacacgggaggtgctgtctggggaggcccctctcagtagcactctgaccttcaggcttcagccctccagcaccccgacgccatgattgagggccagacatccatagtgaacaatgccctccagggtatgaagcggcctgtgaggaccagggtaggtgaggaaagaagctcaccccctaggaagccaagggcaacccgaaaaccacccaggtctgatctttaggggtgcaaaccttcaaatcttctagcaatttcgagcccacgctccagctgcagggagtcccatccgtggccaagactggatgatagaagcacacagggccaccgcgtggactgagggtctaggccctcgggccacgggggctgtagcggggaccctcagcatccctgcccactgtgtatccaccatggggactcacttctcctttctgtttgtgattttcttctttcttctgaaacgaaaatgtcagaagcaattccaggaaggtcagagttcttctgggctgggttcagagggaggtttccgccggcatagttagtcactgcactaaggtcagcatcttctgccccctctggttgggggctgtctggggggctgactctgtccccttgcagagccccatggtctggccagatggggcctcaccacccccacggccgtggctctcgacaaagtaggttcatgaacctcaaagaccccagcttgagggccaagagtcggggcagaatgcactcctcagggcgctggctgggggcgaaggggacacggctgtcactcccagtgtcttcctgctggggacaggctgtggtcagcccgggcaccatgctttaaaacatcccacatgtgtttttgccgaactggtctcatgacccctttcccgaatctcaccagatgtttccctgggagagaccctgttgctcatgtaaacgggggtgcatgttttcccagggaggccagcagcagccaccggctccttgaccaccgtgcagaaatcctcatggactcagaggaatatattttgggtctttgcatgtgagtgagcagagcccagaaataaatctgtgtctgcaacaagaaaagacaggctctcccacacgtgggctgtcttttctcctgactcagaggtgccccatgaagtcagtgctgttcctgtgggtcaccaggatggaagacctccacctctccagcctcagtgccctccgtggctccccagcactgaggaggtggcttcaagcttcttggccgaaggagtctgtgcttgcacaggcaggggctcagctggaccagggctgccaagagcaccagaggctcccctgctgggaaacaggccttgtgatacccagtttgcgatgaggaaatgtaggctcagagagattaagtcactctgtggaaaccacacaggggcagggcaggattccagcccaggccacgccgtcccaggcctctaagcacagtgcccactcaatctgcccctcgagggccacagaaggatctgggctcatcttgccggagcccctggcactgcctcctccagttcacgctgagatcatcagttctcagagggagcccaaacccacaccttatgtccttcagccctgggctcccctacaagggtccccacgccgcacattctccagtcaccgtgcctggggcagcctagtcctgctgtctccctgaagcagcttcaggcccccgctcctgggtccgtgctcctgcaaagctcccctaaccactgggacaggcccctgcacaaagccctgcaggaccgcaacctgcagcttcagggtgggagcagaggctgagcggtggcccccgatccacatgctcctggagcctgcgaacgtggccttgtttggaagaagggtcttcgcagagggaatgaagttaaacatctctggatgagatcatcctggatttaaggtgggccataaatccaatagcagagaatggcagagggaaatttgagacccagcgaggagaggaggccatgccatcaaggagccagcagctggagcgatgtggccacagccaggggacgcctggagcccccggaagctgggagaggcaggaaggatcctctcctagggccttcggagggagcatggccctggagacactttgactgtggacttcaggcctccagagctgaaggagaatgaacacccactttggggtcacgtgttacagaagctgcaggaggatcccgcaatggccagcatggcacacgcctcagggcctcagtttccccagctgtgaaatgaggatgatgacaggacctgcctcacaggcttgcagtgaggataaaatgagttgatatgcatggaatgcacgcagcagggaccggcacggaactgacattgagtggatgtcagcctctgtcaacattactattactattactgtattattgcccttcgttcgttcattccataaatatgtgcaaagcggctgctctgagccttccgtgggcagcagggcagcacagaggaggcctgagcggtggtgctggggagaggatggcgtagggcaggcctcgtggacgcagccgggggcctcaccatcagcataagcgaccacggtgggcttcagaaggagcgatgagacaggattcaccccattgccatttgcttttctatcggatcaggaagaagcatgggatgaagctggggtgtcaaggagggtctcccttcctcggtggtcacctgaggtgctggggccccacctttaactctctctgctggacctggaagctttgcccaggtccctgggaccgtcgcgttcacaggcttccaccgaggctctcgctgggtacattgacttgacccacttcagattttgttttcttaaaactcatccccaagtacactttgggaggccgaggcaggcagatcgcctgaggtcaggagttccagaccagcctggccaacatggtgaaaccccgtctctactaaaaatacagaaattagctaggcgtggtggtgcatgcctgtaatcccagctactcaggaggctgaggtaggagaatcgcttgaactcaggaggtggaggttgcagtgagctgagaacacgccactgcattccagcctgggaaacaagagtgagactccatctcaaaaaagaacaaaaaaatgattaaaaaccaaaaaaaaaaaaaaaaaaaaaactcatccccaagtgactttggcttcattgctttttgtcaacaagctacaatgaacctatgtacttgtgtcagacactcaaggggtccagaacccaggtcaggccctgagcctgcacctggtcgctctgcacccggaggggatggatgaggtcccggccggcactcgctcttcctcccgtctgcctttttgccaagacttcccatcccttcctttaaggctcagaattgtggaaaggagacgtggatgggacctcagtctggaagcctctgtctgacccccaagccccggaggaccaaggcccccactgcctttaggcagctctggctcagggagactcggcactgtttcccttctcgttgcgtcagcaccctgggcagctgggtggtctcagggtgacaggaaggccgactgatgtgacatgtgtctttgatggggaaatacgttgtggctgcaaagatgctgctcatttgctaaagggactctattaaacgcgaaatccagaggggagagggaaagctagagacgctggggccatctttgcatctgatccccgattaagagtggggagtcagggcagtgctgcctgtgtttgagcacagctccaccctgctagcagcaagactgtaggctgtggtgacttcatctcccccagcctcagtgttcccatctgtaaagggggcctttctcatcaagctggccatgaaggttgatggagtcggttctcatgaagcccctagctggtgccgcatcctcgccagccagcgctcggtgactctctgctgttcactgttgccattgaggaccagagagaggtgacttggccaagctggcagctgtttagggagggcactggacttgaactcgggcctgccttcaagcccatgcaccaggctgccattctctttaggatgaagtcagtgcagatacaagggaacccgggcagtggacctggagcaggcagaggtgtggccctgacccacaggggaagatgcccagaggggggaccatcttcagtcgtcccctcctcggcactgctcagggacccacaggtccctgagtgattccaggtggaggccgaggggcctgggctctgcatcctgaaaggtcctcttttgtggcctagcctgctttgggggcccttggctaaaccctcctgaaaacttccctggtgttttggagtctatacccaccggggatcctcctctagaccctcctggctcttaaagtttcccgtatgacctgggggagctcccacagccccctgcacttcctcccaccttctgctaaagggaattctagctttgcctcaaagtgttgtcaacgtggaatgaggccgcggtaaaagcagccatgcacagtagctgctcgataaattgtggtggcctctgaagatcaaggtggttttccacagagatgcaccgccccccctcaacccagaactttccttctctctccagactaaaatccacggagtcgggtttgtgaaaatccatgccccctggaacgtgctgtgcagagaggccgagtttctgaaactgaagatgccgacgaagaaggttggtgttgatggtcctgctccgaaatgaatcgccaagtctagaggtcacttggacgcctggcagtgaaacatgccgacctcgaggccctgagttttataaaaaaaaaacccagtgggcttcacggctacccctgcaaagaccatgtggctcgatgtgacaaggcccccaggctctggggtcctgaccgtggtgaatatgacccaaccctgggtgatctttagagaccccagaccaaaccccaccaagagatggtgcaggcagaaaagcccacctctcggcccccggggaatttactgtacttgcagacacagttacagttcgggccgtggtgctttcgtgtttgtggcatctcagctaatttatcagattcattttaattacattttctggcttacggggatttttctttttaatctgtgaaaactttgtatctaaaaagcagtttgacagtgtgttcccagaagcttagcttggagtcggtatttactctggcaggcggacgggtgaagccgggctaggtagtaaatcagcctcctgcttctcgcgtcctcagagaccacttggattacctcttttgaagcaaaagtaaagtttagcggggaagttctctggaatgcattgtaattgtgcttttggctgggcgctcctgaaactctgggctttcatggcgtgggcggggtggggcggtgcattctggcccacccaggtgctctgctctcaggacgccccgttgcatggggtgggatggttctctgaccatccgagaacagattccacggatcatggtccagcagggtgacgcagctccccggtcccttgtcttatctgcagatgtaccacattaatgagacccgtggcctcctgaaaaaaatcaactctgtgctccagaaaatcacagatcccatccagcccaaagtggctgagcacaggccccagaccatgaagagactctcctatcccttctcccgggagaagcagcatctgtaagtggggacccccagcctgctccccaaagggtcctgtgtgtggggatttaaccttctagcatgagaaatgcagattgattatctgtcccccaaagaagagcgtgttcttgtaagagctttgtggttgctgagcccagaagaggctgtggaaatgatttctaagatcaccgttaactgatgagttagggggacacagcatcttgttctgcttggtgacgcaggaaaaacttctttggcctgagtgaggaccccaaagcagtggtctagacatgccttcccacccgctccgcacccctgccccgccaccccatccccctccagtgtctggccaaccaggcctcctgcagcccaggcagccttgagccccagtaagtctcactccttgtggcagaaattgaaaagcatccccaggcaggaggcctgaggccccagggactcaccgccagctggcttgcctggcagggccacgtctattctggaaacttccctcctcccgaggggcagtggggcgtagccacctgggtcagcagtgactgcaaggcctctgctggcctcactgggcggagctggagtgtgagcagaggtgggaatagaaagcttgagtcatgggaacccagagggactttggatggaagctctggcgggcaggagggctcctggacagtgctggcctcacagggtcgggggcatggaaaagcagacagggaggacgaacaggtgcctcagctcacaggggcccttgcttataaatgtagtaggggtggagccatgagcatcactggatgcatttaccaggtcctgattcctagagcggacaggacatgccaccagagagaaggaagcaacccccaagcccagccctctcctccagatccagaacaggggcttggggcattagaggaaaccgccctccttccaggacccccgccgacctccctcgtctctgccctgggtcgactctgtcagccctgctgcctggacagggctaagctcacctccaggctccgtggaggtggaaactggcccagccgccctccccagctctccccgaagtgccttggagagcagggagagcagggagtgtgttcccaagatgcccctccaccctcaggaagcctcgggccatccctatgcagcccatcaggacccaaaccattggaaatacagggagattgttttcaaggttggagctgtctgatggtggcggtgatactgcccctgtcccccgccttgttgaaacagagactttcaaaactgcccactgaggatgtcatcaaaaggaagcagggatcttctggggggctgtggggggtggggggctggagggtggtctgaccgtactcgcctcctaggtcacttcccacctatgtgggtctcaggcctcgcccaggtgcgggggcagtgaaacagtctgttccaaatgcccaggggcggacgggtcatacctggcgtgcggacagagttctgtccatttcacggtcacggctaatggggacagtgtggtttcccagggccttgaaacccagagaactgccagctctggtgaactgtgtcttgtttccttcccgatatttccacagatttgacttgtctgataaggattcctttttcgacagcaaaacccggagcacgattgtaagtatcgcacgcgcctggaaacggctcactggcaagatggccctggggatccagatgataatttcattttggtgaaactcctcccggtggaagccggctctaattgtctgtgacagaaataattagaataatgaaagggagagggcaacgaggggcccaggggatggtcgtgccccaggcaggggcagctgagaggaagggaatcagcacagagcttgggaaagcaggagggaagccagacccctggagtgatttcaaaggtcggtgtttctggatctgtgcagctcccagcacatgtctcagagccgcctcgtggtgggattgtgcgtgcctgaccatcaggccacgattcggggctttcagggcaggcaggtgtgggcaggagggagggttggtggaggcaaaggcgcgtgggttgagatctctttccaggcctttgccagaggagccaactgaggtttgaaatctgaccaggccaccctgccctattcaaggcactggcttcatgtttatccaacctgtccaccagccaagctggggctgtgcatggctcaggacccaacttctatctaaacaagaaattaacctggcagccaaactttcgctgttattctctattccctgcccagaaagcccagcctggccgggcagagacagagggctgggaggagacagtcagggtgaccttgtccagacaactactcctcatgaccaccacctgagactggcaggcagccagcaggaggtcggtgcaggtcgtaccagcacggggggttctgagccactgctgggacagacagatctggggcagggaggagggcatctctctcccagagaccctggaggccagtttctaaatggccaacatgctccaaagaaactgataattcatagctttggccttggttagtcaggcctaatagtcatcaaaatccaacagcctgcagggttggctgaggttctaggcaaagccgtggagaactgacagcccttccccactcctctcctccacaccattcaatctgtcctggcattggggtggtccagtgtgcaagtggataggagtcagagaacagcagtactcgatagggagaggcccactgtgctggtcttggattttagacctttggcctgtgggcgctggggagccatagaaggttgtggagctaggttgaggatgtggtgagatccgttccagaaggatcactgccagtggccagctgtgggagggtaaatgactggtggatgagggctggtggcagtggtcataaacatgggccataactgcatgtggaagggaggaggtggttacaggagaatcagcaaggtcagaaccgattagatctgagggatgatggggagggagccattgagaacagcctagtgggcgattccttccttcattcagcagggatgtattgggcacctgctgggtgggagaaaagaggcactgaggacatttataatccggcaggtggggagaggcaagctgagctagaagacagagccaccgggagggtggtggcctcaaggcctggttgttaaggggaccctggacctattccaatctgaaggggacaagtgcttctgggaaaaggaacagccagggcggaggccctgtggctgcaggagtgagtttggaaagtgagagaggcagccagggggcggggttgttgggacaggtgggtccagtggaggcggcggggcggggaagcggtcagatggcctgggccagggggaactggaaggacgctggccttgcctgagagagtggaggcagaattggcatgctctgaaatgcacgtctgcatagcacgaccagttcttctcaccccagtttacagatggaaaaactgaggccgggagtggtgatgtcgctggtccaaaatcacacagctgcaaatggcagagctggcgccaggttccaggcagacagactcccaagccggagctgctgaggccaccaaacaaaacacgtcactagtcaaggggcaggcagccgggggggaatcccttcagcagggctctgcccaggcaccaggaacccagagcccgatgatggccgcctcctgccaccgtggggaatggatcccaaggcccgccccaccaccaccacccctgatcccccagagtcctagaacattcagggctgtgtcccagagtggtgctgttccaactcagctctcagcacgaggggaccgtaaatccaccaggcagggtacgtggcacagctgtgacacaggacaccagcactaggcccaggagggcacggcagtgctttgctggggccaactgccatgactcccacgttgggaggtgaaagatgggaactgcaggtgcacctgtttctccctgagaagctcaagcctttgacagtgttgagaatccggagctgggtcaaccctccctgaataaatgccattgtctttccttggaagatagcaccaaggaggtcttcatgcgtaacgtgtgaccaggtcctctccagccacagcagactgtttctgctcgtggaaggtgccttaagtaactgctcaccccccttcttgtctctgcaataggtctatgagatcttgaagagaacgacgtgtacaaaggccaagtacagcatgggtaagcacgtttttggggcttgagatcagcattggtttccaagtcggaatctcacctccgagtcatctctgtgggaggcaggcagccggcttggggtgtttaagagggttttgatttaagcctgtgtaacagttccagacaagagggctgggttgggagcgtgcagggcagttttatggcccagcacttttaaacacaaatgtatccttcactttggcctgaggggtttgtgagcgtgtggacaggctctccctgcacgggtggtaaatccaggctggaaacagaccagtgttagggatgaccgggggattcctggccctctcttgaccctcacggtccagtgggaagtaattggggttccagccggggcggcatctccatgtggctgttccggacccttaaaagcacagctgggcttgctgaaagcagcgccccctgaccaggcaccaccaggtacagacagcctaattccggaagctgccacaaaaccatcctgaccaggctttctgggtaccagtttccagaaccccttaagccgtagatacaaaatcttcccaattaaattgtgtagctgggaaccaccccccacagtgggtcccttgcccacagctgcaggcagtttgtgaaagccagaacattgcagagcaaaggaatgccatttccagcctttcctcccctccttcttgagctgtcttatgacctgctgagagccgtgccatagggtagcatccatcactctgtagaagcctctgaaaggatgaggccatggctcccgggggacacagcaggtctggtgaaagctggagtctgtgcatacaggagggaccatcttgctgccttggcttcccgtggtggcaggaatgctgtgggaagtaaaatgaagagcagtgggagtcaagggctcggaactggaattcctgaggtcaggcccgggagacagagagaagacgaaccctcgacagctctggtggctgcttggccccagaccatatggcctgtgttcactcacagggatacccttgcaggcctgaagtctctaagtccatgtcctaaggcaaggggagtgtggaggagtcccatccagggtcaaaaggactgagatcctctagaatggccaagccctagtacacacgactgcagtgaggtcaggcggaaaggaaggtgacgttgggagtttgggtttttgaaattgctcctctaggtcaccgctgccagggcacagccttggaaaggtaactagaggtaaggaggaggcatggttctggtcccagggccgggtcttggacctcggtttcccccctgggtccctgcagcgttccttccagtagaaacgtgtatggttgcaatagaagtccagcgtcttcaggctgcatggcccaggctgattctctgctcgggtggtccctggggacacagggtctctgtgttcccaccggttttgtggcggggctggttccctgcacctggtgacggggcagatagatgcgggtcctcctcttcagccctgcttcaccatgacaccttgtctgagagtcgacccacctctaaattcatccgcaagtgctgaggattcccgtcacctgccaagttgtgtcccatagtcttgcaggatgagcagggtggggctagctgcgggatttaggaactgtgatgagagaaggccttccagatggagggagtggcacatgcaaaggccctgcggcaggcagcaccaggttagcagcattccagcaacaggaaggaggccagcgagcctggctgagggcctatgttcactttctttttttttttttttttttttagacagagtgttgctctgtcacccaggctatagtgcaatggcacaatctcaactcactgcaacctctgcctcctgggtttaagcaattctcctgcctcagcctcccgagtagctgggactacaggcgcccgccaccacgcctggctaattgtttgtatttttagtagagacggggtttcactgtgttagccaggatagtctcgatctcttgacctcgtgatccacctgcctcaaccccccaaagtgctgggattacaggcgtgagccactgtgccgggcccccatgttcactttctattgcagacaaacttttcactcacacatgtggcttaagccccttcctctggttttgacttctaagcatcccttagtcccctgatcattccaggtcattgaccacagagatggcccattttcaaggggatttcgggaggtcattttcccgccgctatcaggtggagtctcagagggtggtccgcccaggctgctgtgaaaaacttaacgctcttactgcctaggaagcctcttcagccaagcagggggttccatgagcagcaaagggccccatggaaacgcccccgcctggctgggcccccacgatgtatttggagcaagatctgatttccaggaaacccttccccacacatggccctggctttccggtcctctctcgcagtctcctggggctgggcgcccgcatgcgcacctgttaggacacacaggcatggtgtttttataatgtgcccagtgcaggccctgggggccacgtaaaaaggggccctgccagcattccactgcctccaggagcactggacggctgtgagtccgccagaatcactggccactgacgcttgctgccccaaatgtagctttgatcctgtcaggcccttccacctcactaatagccaatgtataaacagggcaaggcgagggaagaaagaaggactccgcccttctaagtaaaaggcggaaatgtgggaagtatggtaagtgtgggcctcctccggctttcccaatcaacctaaaatctaattccaaattgtatgtgtgttttctgacaccatcaatttttccatccgtatatttcctcatgattcagcttctctaaccacttacaatccaccttccccatctgcaggcttgccctcggacaggtggggggagccggtgaatcggaggcttggggtgacagtgaagccatggtccgctcacaccgcctgcctctgagacagagccgcctcttggggttttctctgtgtcttcctaattctgccaatcgagcatgtgtttcgtcatctcctagttgatagatcaataacccagctgcaccctgtcattcctggggaagaaaccccagaggtggccgggctctgcgtagtcaggttcgtttcattttgagaagctcttagtggctgagatggccctgtgaccgctgtgactttacaatgggaagcgggagacccgcctgccccataaccttctctctgcctctgtttttaaggcatcacgagcctgctggccaatggtgtgtacgcggctgcatacccactgcacgatgtaagtaaccttgacacacgatttatctctgcgtcatttgactccccaaatcccgccgggccacacccccccgggagctgcaattatcctgtggtcacagcttcctgcttggctctcgctgtaaatgtcaactgtacacaggccttccctgttccccgggtgggggccaagaagttacacacagggccatcttttcttgcaaaacaatcccaccaaaacgggggcacgggtggcagctgctcctgcctcgacttcctctgaacctcgtagccagcgggtccacagaatgtctttcctggcctgggctcccctacccccagctggcccggggctctggcagaatgaccagggctctgtacgtgtctatttctgcagagcaagtggccagcttcctgagctgaatctccagatcccactggtatccctttgacaaatatagcccatgtcagtggctgacttggggtggagagagagagaagattgtcttcttgttgtctctatggaaacagggactcaagttcagcagggcactgggaatgggcctccgggcctgagcagtgtgggaatcccagacagaggagctctgaaactttgcaaatgtgcaaaggccaggagccaagaagcaggagagaagggacaggcctgggactaaggagacccagattccagtcccggccacttacctgctcctccgccttgagtggtggagtcagccccttgtctcactgagcctcagtgtccccatctgtgggtcaggaatcataacttgtcctaactcctcttttcttttctttttttttttttttttgaaacaagacagagtctcgctctgtcatccaggctggagtgcaatggcatgatctcggctcacggcaacctccacctcttgggttcaagcaattctccagcctcagcctcccaagtagctgggacttcaggcgtgcaccgctacacccagctaattgtttgtattgttagtagagatggggtttcaccatgttggccaggctggtctcgaactcctgacctcaagtgatccacccacctcagcctcccaaagtgctgggattacaggcgtgagccaccgtgcccagcctaattcctctcttcttgaggaagaaacaatggattagacaaacttgaggtgcagggatcccgcagggcagttcaggggtgtattctccagacggttgaccccaagggaaggagtctaggcagatctgctgcccgtcacctcgtcgcctccctgtcagggcctcctcctcactgtaggtccggggattggggtggttgagcagccccgcttcctcccttcgtgcattcacacatgctgttccttctgctacggtactcttccccgccccaccccaccccaggcggacagaagcacccacaccacgcctgcctgttgccttcctccccaggactagtggcttcttcctcccttctctgggcctcagatggtccctgtcctgcaaagacaccaccgtctgaccacctttagttatgtgtgtcatctcaaggaagcccaagcactcagcacttaataagtgctcaataaacgtggtgttgattgagattggattgagtcggtttgcctcggccagcgacctgctgtatggggaggtttcaagggcagagttcaggcccctagaccagggcagtggctccgggttcctgccctgaagccctgagtctggaggagcccactcctccattctgtcaggctttcctccagaggacccagccggtctggttgttctgtcccaccctgtgtaggctccggctgggtgccaggaagacagccctgcctggcacagcccatgatcccaagaaggcagcctagagctacatccatgctcctgattgacctttaagcaggtaatccctgctgagaggctgaggcaccgaagccaaaatgtttccggccctccctgcttgttttgagttagccctttaagtcttaaaagggaaaggggagaaatgaacgtatctgagcacctactgtgtgcagagccctctgtttagaaggaactgtacctcatataacctgtgcagacacagagactcagaaaggcttagtaatttgcctgaggtcacacagcccctttggaggagctggggccaaaagccgtccctagtgacactctgcaactccagtgcctcgctgtgtccccacctcatcccgtcatggaggccaaatgcatccctcttcttggcagccactactgcatttgtcttagggattgactgtcaacagtttaaattgactggcgcaaaactccctcatcagctggatctatttattgtcagagagccagcctcacaagaagcatctccaagatccatgcagacaatctcctctttcaaaatcttcatcgtgccttatgcagccatgtggggtctgttcccaccttaaagatggagaaacaggctggaggagctcagaccacttgcccaggggcgcacagcccagaaggagtggagctcggaagccctaggctgtgggtggcaggtatccttagggaatatggaagtttacagccacagattttccatatgactgaagggcgcccgtgctgctaagtaccaaagctgatgtttaagcatttggggagatgactggttctggcctgagccgcgtgcacccatgtccttacccagaatactgactgcagggaagttcaggctggcctcggtggccatggtgaggctctcactgcatgcagtgtagttctggctttacatttttgcttccatcttcctccccatgaagctgtcctgcatcttacccccttccaatcctgtgcttactgcattcattcattcattcattcctcaagaatatctggtcggttgggcacggtggctcacgcctgcaatcacagcactttgggaggccaagacgggtagatcacctgaggtcaggaggttgaaaccagcctgaccaacatggcgaaacctcatctctactaaaaatacaaaaattagctgggcatggtggcacatgcctgtaatcccagctactagggaggctgaggcaggagaattgcttgaactcgggaggcggataacaacctgatagagttgtgtgtgggtaagagtcacatgctccaactgagaccctgaggaagtctcctggaatcagagtgtatcacccgtactgaaaggactttgatatttatgttggctacttggcggccttttggctttcttcctgactaacgaggtcaccagcataaggacctccgtataaatgaggtgctgctgggatcgcgtggctgtctcatccatggaaagaaactgggaaacactaaaaggagtcaggcttgggtgggtgaggatcccctgaagacttaggaggaaattggttaaactgctctcagagcgtcttcgttccaagaccacctgcatttggttgcttgcttgagtgtgtggtcaagtcgtccccacctggcaggggttagaaggggtcatggaagttgctggtgaggggagagggcactggacagacccccaggagccccatagctttgtctgcctggatattcttaaaacccattggccaggccaggcgcagtggctcacacctgtaatcgcagcactttgggaggccgaggcgagcggatcacttgaggtcaggagtttgagaccagcctgaccaacgtggtgaaaccctgtctctactaaaaatacaaaaattagccgggtgtggtggtgggcacccgtagtcccggctacttgggaggctgaggcaggagaatcacttgaacctggaagcgaaggttgcagtgagccgagatcatgccactgtactccagcctgagcgataagagtgaaactccatctcaaaaacaaaaacaaaatcaaaacaaacaaacaaaaaaaactattagccaggccaggccagccatgccctgaacctcgacagggccgctcccttgctgctcctccccagttacttttgtcaactgtagttatttggggctcactgaatgacagttaagtatcattttgagtgtttgtgagggtaacgtgcacatagccataggcagtctagacccatgatgttccaagatgggctttcaacccttagacccttctcttcctttaggtttgaaggtctggatccaagtcagggtctgaccgaacttaggtgtgtgtcctcagaaatgtcagtttgcttctcggagcctcagtgattccatctgtagaatgggagttttggactcactgattagatgacaatgaccttgtcatttactgtccctcttgggatgctccacagtgagaagggagcaagacacggactgtcccagcagagtgggacatatacgcaccctattgatacgactcttcctgcctccaaaagccccctttcatttgtgtttctggttccaaggacccgaccgtggatcctctcctagagtcccctctgtgtcgagggaagaggcggctcaggccgtcctggtggtggaggccaacagggcggccaacagggacgtgcacggcctttctatcataacgggggcacacctgggcaaccctcacactctgtgtgaaatgttgccccaggatgatcttaatttgtgtcaacgagagctgctggggtttatgttttgaaacataatggatgtgagcgcctccaaagctccattggatgataagaacgtccctttcctctttttttaacagggagactacaacggtgaaaacgtcgagttcaacgacagaaaagtaagttgatggagcggagcaggaggtggctctgtcagagcctggaggcgttctggggcggggtgggcctgcagctggaccgaggacttaccggcctccagggcctccccagggcgctcgctgcagggggctgagaagcgggtgtcccctctcaccttttcaggagaaaagtccgtgagctttgtgtggctggtttgttttcctctttctgattgtcaaaaatgcccttggcaggtgaccgtgagcatgggaaagggaaagctgtcctcccagagcccactccttgcacgctgtccttcccttatcttctcgggacaatctgaactgtgcctgggcctccagcagtccttgctggcatgtggcctaatcccacagggctcccaggcaaataaacttgggaaccactgacaccaggtgcacagagaacaatggcccccagcagcgcattggggaaacctgtttgatggtggtcaatgaagtgtttctcaaatttacctgacctggaacccttttaatggagaagttgttgagctagtgttctagggaacacactttgggaaacactgggtgacccctttattcttttttctttgtttctttcttttttttttttttttttttttgagttggagtcgcactttgtcacccaggccctctgcctcccgggttcaagtgattctcctgactcagcctccagagtagcttggattacaggtgcctgccagcaggcccagatgatttttgtatttttagtagagacgggctttcgccatgttggccaggctggtcttgaactcctgacctcaaatgatccaccctccttagcctcccaaagtgctgggattacaagcgtgagtcaccgcacccagccagcccctttattctttagtggctgttgctaattttcctcactccccaaagcgttggtccccaccctctacccctcactctgagcatgggaactccacccttcccacccaggctccccaggaagctctgcttctctaccatgcccccgaaaagaacatgtccccaccacatccatttgctcttccctcctctcccatgggcccacacccgataccagccttccccccaggtctccacgtcagcctctgttccccaaatgtgcccagctttccctctcgggaagcagtccttcctggaccctgcatgtgcagcccttgccctatctgctggtccttccacaggtggtgggtagagatgcttccctgacaacctcacaatagtggccttgtcccaattcccaggggccaggacctctgtgtatggaatgttcttcatttcagcctcccccacaggcccccatacatgtttttaaatctttggtacttgatacaacttgcccgcctgggaatccagatgaagatgctatctaacttagcacaaaaattacatatttggttatttttagtgtaacatctggcatcgtctgggaccccatgacttgcagaactcccgactccaatcctgttggaaaaggaccatcccctccacaggcctgtcctgaccaattccagcctcagagtccagcccccttcatccctccgcacccctctggcacttggcagatgcctatcctccccctaaaaatgcttcttccatggacaccagtagtccctttctagccgaattcagttctctgggtcacaggcccctgaaccctaccccctcttccccctcctccccctcctccattctccagccacactggctgcttttctagtctcaggattgcttggctgatggtcacgtcagtgccaggactagctcattcagttacttattcatttgagaaatacctactgggcactactctgtgccaggcccagcaaacacaatgcgggtttgtccaggcccagctgtttactctacctggaatgattcccactccccatgtaattttaggtcccagcagtggatacaaggcctggcccatgggggtagtcaaggagtaatgaatgacagttgggtggatggatggattaatggatgatagatggatggatagagatggagatggataactgaatgatggataatggatggatggatagatggatggatggatggatggatggatggatggatggatagattatggatgggtgaatgggtggacggatgaatagatgattgatgggtgggtgggtgggtggatggatggtggagagatgaatgatggttgatggatgagtgggtggatggatgggtgaatgagtggatggacagatggatggttgatggatgggtaggtgtgtgggtggatggatgaatggatgctgaagggatgaatggtggatgatgggtgggtgtgtggatgggtggctgatggaaggatgaatgatggatgatgggtgggtgagcaggtaggtggatggatgcatgctggagggatgaataatcaatgatggatggatgggtgatgggtgggtaggtgggtgaatgggtagatggatggatggatgctggaggaattaatgatagatgatgggtgggtggatggatgatggaaggatgaatgatggatgatgggtgggtgagcgggtaggtgaattgatggatgctggagggatgaataatcaatgatggatggatgatgggtgagtgggtgggtggatggatggatgctggaggaattaatgatggatgatgggtgggtggatgggtgatggaaggatgaatgatggatgatgggtgggtggaggaatgatggatggatgggttgatggatgatgggggggtgggtgggtgagtggatggatgctggaggaattaatgatgggtgatgggtgggtggatggatgatggaaggatgaatgatggatgatgggtgggtggatgaatgatggatggatgggttgatggatgatgggtgggtgggtaggtgaatggatggatgcctgagggatgaataattaatgatggatggatggatggccgatggaagaatgaatgatggatgctggaggaatgaatgatggatgatgggtgggtggatggatggatggataaatggatggatgggtgctggaggaatgaatgatggttgatgggtagatgggtggctgatggaaagatgaatgatggatgctggaggaatgaatgatggatgacgggtggatgggtggatgatggaaggatgaatgatggatgatggatgggtggaggggtgggtgaatagatggatgccggagggatgaatagttaatgatggttgatggttggataggtggatgatagatggatgggtggatggttgatgggtggacaggtaggtgaatagatggatgccagagggatgaataattaatgatggatgatggatagatgatggagggatgatggatagatgctggaggaatgaatgatgggtgggtagatggatgatggaaagaagaaaaggagggaaggagggaggattagatgggtgtttgggtcctaactcagagctgcagggaactctgcattctgccacgatggctccacatcacagcctggtgccaagtttttgcctttccggtgacagactccatggcttctccattattgttctaatcagtggcaggagccccacgtgcctgaccctggatacctcacagggcagaaatgaaagtgcagccaaggacatttcaatgacattttcctgtgctgagctggagggtgggcagaagagagtgtagggaagtttaagcaggaggcaggtctgggcagggcagccatcactcttggcctgatcatggggccacaaacatgtaggagtacttgggagccccttcctccaggaccgtgggtgagttcacacctacacagaactgaaccccaggtgagcaaggcacgcccccagagctgtctttggatgtgcagaaggtgttctggtgggcagctgctgcctccccctgccagggcactggaagagtaggaccacctgggccctgttggggagaggggtggcttgggttgtgggggattgattccaggtgtggactgaggtctgctgcatccctgggctggactaggagccacagagcccaacatgtcattcatccatccattcatccattcattcaacagtcacttagtgaaaacccacaggccctgttggaggcatggagggtgagaaggaccagacaaacctggtccctctggtgtctccattctagagggaagggcaacgggcaaggacatacaccaattaaagattgcatccatgtcaccaagggccggtggcagccatgtgagtcctggcagggggtttcgacaagagagacgcctgagggttgttgggatccctccagggtccggatgctggaaggctcccaggtcacagtgactggagccgcctggctggccttgttctccagcccacagcccccatggctggacgcccccctgcctgctcaccggggctaaggtgccaccttggattccttccagcacttcagttggatttctttgccttgacagtgcagagtgactgatgtcgcctcttggcagaaagaaaagtccaccgaggtcaagcggtatatgtagaaagctgggagtaggccccctccacacgtctgtcagaaggtggtgggagccactgagggtgggtccctcctcccccggtgcagagctttgtcctttctcactgtccctgtctcgctccctccctccttctctccccgtctccctcccccacttctctctgtccatctctctatctctgtctctccatctgcctctgtctctgcctctctctccatctcccccatgtctctctgtctgtctgtctgtctctccatctgcctctgtctctgcctctctccctgtcttcctcccccacctctctctgtctgtctctctgtctctgtctctccatctgcctctgtctctgtctctctccctgtctcccccacctctctgtcagtctctctgtctctgtctctccatctgcctctgtctctgtctctctccatctcccccacctctctgtctgtctctctatctctgtctctccatctgcctctgtctctgtctctctccaccttcccacctctctctatctgtctctctgtctctgtctctccatctgcctctgtctctctctccgtctcccccacctctctgtctgtctctctgtctctgtctctccatctgcctctgtctctctctccgtctcccccacctctctctgtctgtctctctatctctgcctctccatctgcttctgtctctgtctctctctccatctcccccacctctctgtctgtctctctatctctgtctctccatctgcctctgtctctgtctctccatctcccccacctctctgtctgtctctctatctctgtctctccatctgcctctgtctctgtctctccatctcccccgcctctctgtctgtctctctatctctgtctctccatctgcctctgtctctgtctctctccacctccccacctctctctgtctgtctgtctctgtctctccatctgcctctgtctctgtctctctctccatctcccccgcctctctctgtctctctgtctctgtctctccatctgcctctgtctctctctctctccgtctcccccacctctctctgtctgtctctctatctctgtctctccatctgcctctgtctctgtctctctctccatctcccccacctctctgtctgtctttctgtctctccatctgcctctgtctctgtctctctctccatctcccccacctctctgtctgtctctatctctgtctctccatctgcctctgtctctgtctctctctccatctcccccgcctctctctgtctctctgtctctgtctctccatctgcctctgtctctctctctctccgtctcccccacctctctctgtctgtctctctatctctgtctctccatctgcctctgtctctgtctctctccacctccccacctctctctgtctctctgtctctgtctctccatctgcctctgtctctgtctctctctccgtctccctcacctctctctgtctgtctctctatctctgtctctccatctgcctctgtctctgtctctctctccacctccccacctctctctgtctctgtctcagtctctctccctctttccctccctcccccttctctctctctgtctctgtctctccatctgtctctgtctctctctccctctcccctacctctctctgtctctctcgctgcctctctccttctctgtctctccatctgtctctgtctccccccttcctccctctgtctctctgtctcctccttccctcctcctcactctctgccgcatcttccacctgtctatggcataaatcagcagcttgactctaggtgagaggaggaagctgcccaggttagcgatggctgctttgcttttgcagaggtgtggctccgcttcatcaaggtttgctggccgaggcttccctatgtacacagtaaaactgtggccttttcatcgttatctgcctaaggaaacgcactgatgcagaaacaccctgtacctttcgcacatcactaactcgcatgagcccatctgccttctctccatgccctgggaggagagatcgcatccttcagtgtaaaggaggagacagggatgggggaaggggtctgcccaggactctcgattcgggggtgggggaaccttcccagggccgcagacaagtcacaagcccctccaaccatggccatgcttagctgcaggtgaggctggtggtttcggggggctgtgcagcagcaggcggcccctctatggatctcaggaatacgccctccacctgtgagtttgggtgggggcagccgtgggtacacctgcactgtttcccctccctgtttgtcagtggggggtctctatagtgcacagcccgtgttaccccagaggagacgctcaggcacgcgaggctatgtcagctgtggagatggctcacactcacttcctgccctccaggcactggaggagttatggaggctccaaggggttccctcgtcccccagccatgaccttgactctgagtttgggaggcagcttggccccagaatgggctctgagctgaggaggagggcagctgccccacctctggctcctggtgggcagctgctctgtcccaggacagcctctgggcccctcaaggtacctgaatcctgccttccctgagtgtggccctgtagccctgggcgggcatgatgtatgagcctgggctttgagttgaggtctgtaaagcattaaccacccacatgcgcgggtttatttttttatttttttactagcagtcctaacccagcatcttcatcaggacaccctttacatgttcacacaaggcttccaatccaccaaactcattactgtccctgcccaaagcctgggggggtaacagggtgtgtgtcaatttcacttatttcatgaagagctgttttaatcagacagcccatctcaggagataaacctcgagtatctttgcatcccgtgagagtttttaaaatttcaccactggtatttctctgctcaaaaccctggtgactttgtgacctttataaagaatggtttggtgtctgatggggatgaccaaaaaccctaaaggtaagaagccgtacagcgtctggcccatttagatcaattccaggtcaaatcacaaagagctcacattccataacctgccagaagcttctttcccatccccacgttcacagcccacacagcccactctcaagaagtgtttatgggatgaatgaatgatgtcacggaggctcagtccccgcagctctgcgttccggggagcaacctcggagtgccacattgtcaccaaccccactgcttcctccccctcagctcctgtacgaagagtgggcacgctatggagttttctataagtaccagcccatcgacctggtcaggtaagaacgcgccacagcctgcgggaatcaagtccctactccgatggcagtcggataacatccctgtgggtttcaaccgctctgaatgttcagtacccgggaacgtgtttgaactcaaagagcttgtgtaggaagacccaaaatgtccctgcagggctgagagcctgggccagcattagatgaagcagtttattcaaattccctggaggtcgggcccttttcagtcacatttaccatctcctaaattcactgcctggcctggcctcactgggcggcgggagggttttccggatttgagacgtggaggggaaggaaagagctgcctcaaatgtggaaggatttcttctctcccaagaggatctctgtcctcacagggcaggaaggaggggccgaccaggttaggcaacttgcccgccagagctcgactggtagaaatccattcaagccatcaaactgccaaccacgcttaatatgaggagcaattggttttcttggcacctcccggccaaggttctttccagtccttatgctgaacagggcttggaatggagcccacagcctcaggggaagtaggcccacagccatcagcatgggccatcgcacacggaaaagcgcccaccttcccaaggcaccacagagaagtggggaccgggcgcggtggctcacgcctgtaatcgcagcactttgggaggctgaggcaggtggattacttgaggtcaggagttcgagaccagcctggccaacatggtgaaaccccgtctctacccaaaatacaaaagttagctggcagtgatggtgcatgcctatagtcccagctactagggaggctgaggcaggagaatcgcttgaacccgagaggcggaggttgcagtgagccgagatcgcgccactgcactgcagcctgggcgacagagcaagactccatctcaaaataaataaataaataaataaatgcaatgggcgtggtggcaagcatctgtagtcccagctactcaggaggctgaggcaggagaatcgcttgaacctgagaggcggaggttgcagtgagccgagattgtgccactgcgctccagcctgggcaacaggagcaaaactctatctcaaaaaaaaaaaaaaagaaagaaaggaaaagaaaaagaaagagaagaggctgggcacggtggctcacgcctgtaatcccagcactttgggaggccgaagggggcggatcacgaggtcaggacattgagaccatcctggctaacacggcgaaactccatctctactaaaaatacaaaaaattagccgggcgtggtggcgggctcctgtagtcccagctactcgggaggctgaggcaggagaatggcgtgaacgcgggaggtggagcttgcagtgagccgagatagcgccactgcactccagcctgggcaacagagcgagactccatctcaaaaaaaaacaaaaaaagagagaagaggggagggcttcagaaaagcagagagcacccccaacctgatggggcggcccaggaccccactctctgcttctgggatgagggaaccagtgcccctggtttgagttgctcttgctggggagggcctgtgacatgtttccctgctagtattgaatgacagtgggcttgactctgctctgctcccctggtgtaggaagtattttggggagaagatcggcctgtacttcgcctggctgggcgtgtacacccagatgctcatccctgcctccatcgtgggaatcattgtcttcctgtacggatgcgccaccatggatgaaaacatccccaggtaggcggcagcccacccccaccaccccgcagtacacagaggagccctctcctgccatcccagctgcacaattcattgggacactggcctctcacaccaattcctgtacacatgaaacctcacgccaagccacgagccgtcaggaggaaaggacatggttcgaagccatctaggagtctgggagtccttctcaggcccatctgtgctaggctatgttttattgttaagagaaaggcataaaagaaacatctgaccattttcattctttaaaagttgttatggttggcttgttctttttcactgttggtcattagtgacaagaaagttttctgtttccttgtgtggccgggaggtgaggcatgaatgctaggggcttcagtgtaggctggtacttgcgggaggtgagacatggatgccagaggcctcagtgctggctggtgttcgcgggaggtgagcatgaatgctaggcttcggtgcaggctggtacttgcgggaggtgagacatggatgccagaggcctcggtgcaggctggtgcttgcgggaggtgagcgtgaatgccagacttcggtgcaggctggcacttgcgggaggtgagacgtgaatgctagaggcctcggtacaggctggtgctcccaggaggtgagacgtgaacgctagaggcctcggtgcaggctggcacttgcgggaggtgagacatgaatgctagaggcctcggtacaggctggtgctcccaggaggtgagacgtgaacgctagaggcctcggtgcaggctggcacttgcgggaggtgagacatgaatgctagaggcctcggtacaggctggtgctcccaggaggtgagacgtgaacactagaggcctcggtgcaggctggtgcttgcgggaagtgagacatgaacgctagaggcctcggtgcagtctggtgctcccaggaggtgagacgtgaacgctagaggcttcggtgcaggctggtgcttgcaggaagtgagacatgaatgctagaggcctcggtgcaggctggtgctcccgggaggtgagatgcgaatgctagtggcctcagtgcaggctggcgctcgtgggctgtacagtaggttccacctgcccagcttcctaaggctgcctgcttcccttatctgcacggccccgagaaattctgcaggaactgttccataagggaggattgcatcccacagcataggcaggcatctgaatgtagatccgatgtgccttctgctgttcaccaagggtatgtcagacgtcagggagctcggaaaagaaggcccagacctgagacagcctcgcctcgctcaggggcccagttcccccacatgacttcagaacaagagtccagttttgcctggtgcgatggcgcatgcctgtaatgccaacacattgggaggctaaggttggaggatcccttgagcccgggaggtcgaggccacagtgagccatggtctcaccactgcactccagcctgggggaacagagtggggccctgtagccaaaaaaaaaaagagtcaagttttgagaagctcagcctcagtgtgcagagtccctctggtgcttgcttttgtagctgtttcttagatttcctgacatgaacctaaggataattccaggctcccaacctctggcagggtttctatgccgacaggcagtgccttcagcgtgcaaatcgctctgccagggaattgactataaaggggaatttgggctgaccctgccctgcaagggctccaagtctcagaaaagccctaaaatgttagtttggttatttttcgaaccactcctgccaagtatctctaaagcagaggtatagtttagaaaatgtatccactgagcctgtctgtaaagacccaatcagtcttaggaaagaaactgactctttgcagcacaaaaagaccatatctggtcaatttttgtttaagtgatgttttgatacatgaataacacctaaaatattccaccccacccccacccccgaatcaaagctctgaggaatctggcttatctcccttttggtgttaatttggtcctaggcaggagaaaggtttccctttgtttgctaatatggtatgaggtcctgggcacttgggtttggttgtggtaaagatcaaggtagtccagacttggtggggattgtaaggctggctttaggctaggagctcaaagccggaggaaaatggtgagtgtaaggtgaggattctccccatgagccctggaggaagcctgggggacctccatcttccttccttccttcccttggagggtggccccagcagggaggctctgccagcccaggggttggccatgccagctcggcccttccaccacatggtcagaaatgcaaacagcagttactcaggattcagccgctgtgggcggagatgaggccaaagccaaggcctctgcccagcaggcgacctggagcgaagcgggaggtgcgtgctccctgcagcttccgccccatccccaccaagcttgcagggaagccccagcatggagccgcctgctgcccttgtacctccggtcctctctgaagaagagagcttcctgctctttgtattttggctaaaggcggtgaagtgagaggcggagggggatttaaaaccagcagaaaaaggcttcttgttgggctgatggtgtttgtgcgagaagctgaggtgggcagggaggagagcctaggagagcggtagggctcatgggcaggccgttggtgtacgccttggccctgcctgtccccagtcccaccactgtggactccaggccatcctcagtccaggtggtcactgtggcctgggccacatgctggcgatgatggggatggccttccacatgcctgttctctggaagaggggctcgcgttgtgcccaactggggacgtcctgcccccaaccccccaaaacgctgctttcttctgccctcaagaggccctcagaagagaggaggctgagtgaggggcatgagataaaccccgaaaggccggctcctggctcgtgtttaaaactcactgctgctgcaaagtgcttggctattgcataataatgacaacagcgttggtgaccacgtgatggccgaggggtgccaggcactgttccaagggccacactcgtgttggttgttggttgtttaatcctcctgacaacctattaacacggcttctcttcactatcagcaaccccattctgcagccgggaaaactaaggccacacggatcacaaaatgcaagagctgagatacaaacccagagctagctgaccgtagagtgcaggttctcccaacggctgtgtgtgcctactcaccctgcccgacccctgctcccatgcacacacacacacttcctccatgctccaggctgtggctgcaatgaattcttcttaacctatccatcttttgtgccagatacatgcagtacctacaccccaccccccgcctttttttttttttgacacagagtctcactctgtcgcccaggctggagtacagtggtgtgatctcgactcaatgcaacctccacctcccaggttcaagcaattctcctgcctcagcctcccgagtagctgggattacaggctgggattacatgccaggctaatgtttgtatttttagtagagacggggtttcaccatgttggccaggctggtctcaaactcctgacctcgagtgatctgcctgcctcggcctcccagtgctgggattacaggcatgagccaccgtgcctggccctacaccactttttaataaatgtttagggactgtacctgaaggaagagaattgaaccagaatgcccatgatgctgggcacagaggaggcccttcagagccttgcaagggacgtttattaagcaccagctgctgtggaccaggcatggttctgcgcataagttcagcatatccagaaagtcaaaaaacaaacacccacttcagcatccccccacatcaccctccgacccaaccagccagggtgtgtacttagagcccagagccttgtccaaggcagcagaaaggagaaagttcaaagcaggccagagcaggaagggaccttattctgacccctcctcattttccagaacgaaaaactgaatctgaggctaaaggacttggccagggccacggagggtatgagtagtcagttgagggcccagttcaggccacccaacttccacaaggagccccccatggcccttgagcagtagatgagagccggcagtgcttgggctttgaagatacacacagaccaggattccattcccactctgctgcgtggccctgaacaagttacttcccctctctgggctctgggattgcaacagtccccagtgctggtccaagtgaggtggaacatctgtgcctgccagtaatgaggctcctgctctcgccgccgatagcctggaagtattagtattttctaatattagtgggagtaagtcagtgctggggaggaggcacagagatgagtctcaggcatcatgaagatcctctctcctggccacagtagttgggatctggccccaggctcacctgtgctcagcaaagcagaagcctgcactgagcgggacccatcatccctggcaggcccccccggcttcccgagtgagcctacagggtgggcctccgctgcaccgggcagctggggacctattccttccggcccagcccccgttctcccagagaagagtcctgggatccccgtttctccacctcctgtgtccagagcacccaggccacgtccaaggcagccgccccaccaggcggatggagatgctgtgtgaaccgctcatagacggcgcctggcacagagcaagggccctcatcatctcactgttttccaaggccttataacataaagacctggctagcatttgctattggcacaagccttgaccgtgcctgccgattatatgggggcaggctgggaactctgcctctcctagaagtggctcaaggataggctgcagaggctgctgcctcagggtcaccccagaggtgaatgttccagggcccatctaccacaaagcaggtctgggtgagtccacctccaaggccggcaacagaggttgcagggccccatgcaagaagaaaatgcaggtctttagttcaaaaatcaatgtgtgtgtgtgtgtgtgtgtgtgtgtgtgcgcgtctgtgttgagatggagtctcgctctgtcacccaggctggagtgcagtgacgtgatctgggctccctgcaacctctgcctccagggttcaagcgattcttctgcctcagcctcccgagtagctgggatcacaggcgcgtgccaccatgcccggctaatttttgtgtttttagtagagacagggtttcaccattttggccaggctggtcttgaacccctgacctcaggtgatccgcccgccttggcctcccaaagtactgggattacaggcgtgagtcaccacgcccgtcccattgtgtgttttaaggcagcaacaggggagcattaaaccaagcatgaggccctgctgagctcagggctggtgcaacagcatgggtcacacgcctgtgaagctgccctggatggcaaggagggacagggcatggctaagcacccggcttatgtccactatggcatggacctgagggaccctcgccaacccccagcttgggcccagcgctttctcccaggccagctcggcacccaggaggtgctccatcatggcccaacaaggtgactccagggctgccccctctcttgcagcatggagatgtgtgaccagagacacaatatcaccatgtgcccgctttgcgacaagacctgcagctactggaagatgagctcagcctgcgccacggcccgcgccagccacctcttcgacaaccccgccacggtcttcttctctgtcttcatggccctctggggtaagcagggctccagagcactgggtttttgggcagtggtgagtctgagtggtacctaggctgcttctgtctgtctttgcgaaatcatcctcaggcaggggttgtcgggaaaaaacataggggaagggggctggtggaaacgacccctgttttgtgttcaggttactggggtgcgcagtgcatcaggagagacacgggttctcctgacccagcaaagagtcccttaggaaaagcctaggagggacgttttgctctgagaaatcctgacaccagggtatgctggcctgtgaagggcagctgatttagagcagggaggcccgagggtcctgcctccatccctgctgcagctggcgaccaccacagcctgaaggaaagctgacctgggccaggtcccggaggcaccgtgtctcactagagccctcagcatccctgcaggcttcatgtgcccattttcggataaggaggcgaaggcctaagagagttgggaatcgcctggggtcactcagctcctgattgccactgggctccactgccatgcaaacctaaggcactggcctcctcctccaggaagattccctaaccccagtcctacccgactcccaactccagctttcggggcttgggaggttggtaagtggtggctgaatgcatttctacagaggttctgggtgagcaagcaggcccattctgtcctctgcagccccgtgtctcagcctgtgccagctttgagatgcccacagtgggcagcctgtgctgagccatctcccaggcctggccccacgccgggcacttaagcccccatccttacctgtgagctcccaccttgtaggagatggggccaggcacagagacagcgctggagggagttcaggagggctttctggaagaggtgtgaggcccttcagatgagttgacatgggtgtgggggaggcagcatttgtggcagagagaccaggtgtagagacagaggggcctctccgtcccacctcgtacccctgcttggggcaggctcccggggccagaatagcgccacctcacctgcagctgtacccgcttggcactgccctgtgtgctctgtgggtaggcaaggggcaaatgtggactgaaaaggcaattgtttgaccagtgaggacagaggccagccaggttgcggggctctgtgtggcccttacccgccagcgtgctgatcctgaagatcagacctaggattcagtaccgtgccccatcagtaagcagagcattggctggcattgccaaagccttgccagcatcctccatggagagcacctcgaagtatggcctgtgattccggctcaggcacctcctgaccaaggagcagctgctcgggggaggctggaaacctagaggaggttcagaggatgaaggtagagccgggtctctggcctgcacagaagcacccagcaggttgggcagagagggactgaagcaccagcacccagctctggggtctgcatgctcctcccctcttcatccttatggcgcctccgtcctctccaggcccgagccctgtccctacacagctcggcagcctcctcccctgctccggaggctgcattcggggctggtgttctctccaacagtgcataagagaattccccatgaagccgaggaagccgacaggctcaggttatcctcctgcttggcgcagatatcctgcagctgggactcagggtttggctgagcctgtgtggtttgcgggtgggtgtgcacagcagagccgaggtatgtatcaggtgaggtgagggaggggaggcctggcccaccctctgcagctcctgctccagcctgggcagctgggccgggtcctcttgcctcggctcaccaacactgtatctcattcctacccttccggagacccgggacagaggccgccagctctgagcatgggtgccggcaatggtgagagttggagcttctccatttagatgctttgtggacggccacctccctcaagaccctcctcaccctggaatcttattgggcagctccgtgtccttagcagagttccctccacagaggcctcagccccgaggcacctcgctgcagccccacccgctgtgtgcgcagctggaagggcctggctctcatgagcgcttcctccacatggtcgccagcagctctgtttcctcatttgggacccctgggcctgtgcagccactgagacagtatttcaggtggtccatagcatgacccacaagtaagtgtgacccctgtagcactgagccccctgagccactagaagattgttcagtgccgcctgctgtggtcagccctgctgccccgtgtacatttctatagcgcccccggggctcagactcccgctctgccagttcccacctcactgctctaaacctcagcttcctcatctgcagaatgaggctgcatgaggatcagaggcgacggacatgaactctcagccgaggcttagcacatagcttactctaaataggtggtcactgccgtcttaccacattggagcatgtgagaaccaaagaaaacctatacgagagtgtgcgtgcgcctggtgtgtgggaggtactcatcagccacgtgtactgagcacatgtgtcccacctgcatgaggatgtgcacgtgcctggtgtgtgggagctactcatcggcccatgtgtactgagcacaatgtgtatcccacactgtgccgggccccaggggaaccaagggaagcaaacctgatgtatccgctgctctaaaagctgcagcgtaggtttcaagagaaggccccatgggaagggtgcggggctgtggcaggagctccaggtgcagggaccaggtgagaggggtgtcagagcatccggagaggtcagcaaggacacgctgagaagaacttagtgtgctggctcagaggaatcagaacccagtgccatcagctgctgtgtcaaagatgctttcctgtcttatgctcgagtcggagaccgcaagtctaagagggagcttgtgcagtgattaagagaggggtgacacagtgggggcccagctccaggaagggcacctatgggaaggtgtgagagaagcgattgggagcctcatggcaccctccctccctggccctggggaccctgatttcatccgtctgtttcctctttccctgctgaaatccctgggaggaattcagcccttagactccctgtagccacttctccaaagaaaaggcctccgatggaaaagagagactttagattattccaaaggactccacactttgttttagctctcatgctattcccatgagttaaggagacgctggcgggcttggccgagctggtctcatctgacacacagggttatgaattacagctcccacatttaaccatgaataaaaggcttttaagggccctggagaaagcagccaccacgtccttccaccccacgctctgcccatccctggcatcaccttaggatctgggagggcacagccgtctgagaacccctggctggtgttcttctctacagcggactccaaaggcacccacttttgtgggactctccaaacgtccagtaattcctgggtccacagaactgggcctccctcctctgcagagaaagaaggacgtggtgtttcattttctccttctccaattacaggcatgcccagtaagagcacattcccaggggaagggaggagagaggctgaaggagcccggatgaagaaagaagccgtcttgggctgtaatgatcccatttcgagcttaacacgccgggcgataagaggtctctgtgataagcgcctgttgcggctcttgttttgggagcccaaagcgctacgtggcattctggtcactgcaaattccttcttctgagtgccagagcatcacccagtcacgccttccaggtcacctgtgggagtgcctactgggcaggcatgggtgccgcagccacagaacgagcccctccccccagacctccctccttctgggagttcctgctgcaaggtcgtcctttgagaggatgcaggcagcgcagattggtcaacaccctggttgtttggggagaaaccctcaagggtctggtccctcatgcgttgggctggctagcagccctgtggcccccaggcctgtggaccctccaagactagagcgtccagggctggctgaccctgctggaggctctagacctgggcctgattcccagggggcagcagctctgggcttgtcggtcccctgtggttctcaaactcggtcccacaggcctctgcaggaacccgcaccagtcaagaggtttaagtgcaagggagggatgcctgggtacagcatggatgttggcatctcgtcttaggtgcccatgaccctgagagtgagtgtcgtgggacctgcagcaccagcacctccctcgcctcaccctggcctcagtcctgatttaaatgaacatcgtcctttggccgatttcatgtttggggcttctgcctggagtttgttaggggaagatgggagttcctctgctgaggttcgaaggctcagccagggcctgcaagcctctgtgagcaagtgagggcccagggagagtcaggagaggcctttcctggtgaggtcaggtgcctgtcgtcggcgtctgcacttgcctggaagccgccctcagacacgctcagctccaccacacgagggtgtgggcagagcagtgtgagggacaggtcttgctttcccgggattccagtcacaggtggggacagacacgcacagaaatcagcatagcctcgagataaatgcagttgtttctcttcgtggacaaaggcgttcgattttccagaggaggccaagaatgggagccgtgggtccgtagcttggtgtagggcgtgagttccagtggtgagcagtgagacacgctgagctgggctggccagggagggggtgagcgccccgtgctgggaagcattcaagctgaggttggaggacttcttgctggggcaactgcagagcattgggaggtgatgtctatgtgtgatccaaggccacgtggcttattgggaagattcccaggcctacaacccagctctggtttttaatttggggatcaaaatgtatcgtaaatttagaattataaatgtagggtcagcagcagtctgtcaccgctgaagcacacgtgccagagctcccgttgtttatcacactgtatccgaacagcggagaacctgtccccatttcacagaggaggaaagtgaggctccattggcacagccgggaactgaagccacatctctctgagcctgtcctctctcccctgcctgcccctgcctgcccctgcctgcccctgcctgcctccctggacgctgcgtccatctggaactatctccacaaaccccccacccccccacccgccatcaccgctgtctgctgctccttccctccctcgccttcctagagacctcagcaccggtcagatccctccctgtctccctctctctgatcatgacccaggaggctgtgactccccagcctcctggtgccccagctccaggctgggaagatccacccagcggggcccggcctgccctggcagcccacttgacggtcactggattactcaggctgacttggctgcgtagtaggacggttagatacagtcaaggggttcacagtgccagctccggggcccggctcaggttcaaatcccagctctgtcacctgccagccctgtgacctgagaacttgcttctactctctgggtcccaggttcgcatctgtagaacggagacacagtcccaccccacagggttgctgggaacatggaaggagtcactgcatgcaaagttcttagggccatgcctggcttgtgcctggtgccagttgctacgttgcactggctgttaaaagtgagctgttgctttttgaaattttgaaaacgtagccttgggtcctaggagattgagcttaaacctaacctctcaccttgtgcttggtggcctctgtccattcagtgacttcttctccttcagaaaagaataacagctggctgggcgcggtggttcacgcctgtaatcccagcactttgggaggccaaggcgggcagatcacctgaggtcagaagctcaagaccagtcaggccaacatggtgaaaccccgtctctactaaaaatacaaagattagctggccgtagtggcacgcgcctgtagtcccagctacttgggagtctgaggcaggagaatcacttgaacccgggaggcagaggttgcagtgagccaagatcacgccactgcactccagcctgggcaaaaagagtgaaattccatctcagaaaaaaaaaaaaaaaaaaaggctgggcgcagtggctcacgcctgtaatctcaggagactaaggcaggagaatcgcttgaacccaggaggcagaggtcgcagtgagccaagatcacgccattgcactccagcctgggcaaaaagagtgaaagtccgtctcaaaaaaaaaaaaaagaaaagaaaagaatcacagctgaaggtaggtgagccttattttgtgccaggcactgtcatgagcatctcccgcgtgctgactcactaactccccccgaaggaggtaaatagctctatgaccccatctggcagatgaacaaactagggcaaccttcccaaacttacacccgctcgtaagcagggcttgaaccccagaattctggtttctgagccccaaatactttttcataacttttttttttagttgcagtttttttttctttccaacttttattttaggctcagaggtgacatgtgctgatctgttacatgggtaaactgcgtgccgttggtttggtgtacaggttattttgtcacccagataaccagcacagtacccgacagatagtttttccatcctcaccctcctcccaccctccaccctcgagtaggcctcggtgtctcctgtcccctgctttgtgtccctgtgtactcaatgtttagctcccacttaaaggtgagaacatgtggcatttggttttctgttcctgcattcgtttagtccgcttaggataatggtctctagctccatccatgttgctgcaaaggccttctttttatgactgcgtagtgttccctggtgtatacggaccacatattcttttttattttttatcttgagacagagtgtctgtcgcccaggctggagtgcagtggcacaatctcggctcactgcaaactccgcctcccatgttcaagtgattctcctgcctcagcctcccgagtagctggcattacaggcacctgccaccatgcccggctaatttttctatttttagtagagacggtgtctcactcttgttgtccaggctggagtgcagtggcgcgatctcagctcactacatcctctgcctcccatgttcaagcgattctcctgcctcagcctcccgagtagctgggattatagccgcccgccaccacgcccagctaatttttgtattttcaggagagacggagtttcaccatgttggccaggctggtcttgaactcctgacctcaggtgatctgcctacctcagcctcccaaagtgctgggattacaggtgtaagccaccacgcccggcctgcaccaaatattctttacccagttaaccattgatgggcatctttgttgattccatgtctttgctctcataagtaatgctgcagtaaacatatgcatacatgtgtctatggtagaacaattgatattcctttgggcatatacccagtaatggcattgctgagttaaatggtacttctgtttcaagttatttaagaagtctccatcttgagccccaaatacctgactctaggccctactccgcgggcattactaactggctccggctggcgtgtgtgctgaacacgtgccttgcttgttcctgactggattacctccaagtttttctctcacctagagtagtttccccgtctgactccacaaaaatacacctccttccctttgggagctgcgctgaggactgcctccgtgccaggccccgggctaagggctctacaccggctctctctgtaaccccacagcagaccaaggctctgttcttttctctgttgaagacgctaaagtgttcccagaaaggggtcttgagccacaccccaggagagggtttttggatctcacacaagaaagaattcagggtgagtccacagtctaaagtgaaagcaagtttattaagaaagtaaaggagtggccgggctcagtgactcacatctgtaatctcagcactttgggaggccaaggtgtgtggatcacctgaggtcacgagtacaagaccagcctggccaacatggtgaaaccccctctctactaaaaatacaaaaaattagccgagcgtggtggcaggtacctgtaatcccagctactcaggaggctgaggcaggataatcgtttgaacccaggaggcggaggttgcagtgagccgagatcataccattgcactccagcctgggtgacaagagcaagactctgtctcaaggaaaaaaaaaagaagaagaagaagaaagaaagaaagtaaaggagtgaaagaatggctacagaatagggcattcccaaagtaagaggaggaccgtgcctaccctaggtacagtgcttgtttatgtagaggataacaaagaaaatcatggggagatatactctgctacaagggtttgtgataaaggattaattgtcttaattactatattttgtgagaatcaatattattatctctaaagcgaaattaggaatgcttttgttctcaacatctcgggatatcaggacattcctgagtctgggtctgcttagtaaacattatcaatctgtcccttaatgtaaacatctagaggctgggaatgcctcactttctgggaatacagcccggcaagccccggcctcatttttcctagtcctcactcaagatggagtctctctggttggaatgcctctgatagaagcacagagagggtaagcgacttgcccaaaatcacacagctaacaggtccctaacagacgtctcagatgcgcaccccggcccatctgcctccaaggtttcagcacgtgccctggtcccacctctctgtccaaacgttccctcatgcagggccctcttggggtagcaggaatgtaccgtaagccagtagcaggggacatgtaggcgtagtgctactgagcgcgccgtcccccatgggctgtggccgttcatttggtggccctgtttcgagaagccagcttgcctgttttgcagttcttcactgcacacctagtgccttgcgccccaagagctgcgggccagccccttcgtagcagatggctacattcccccgactctgggagtgggggactctgtgcctgctgaccccgcgggaggctttgctgcttgtctcacccctccctagctccacttcagccctgggagacaacaaatgtgccccgactgtcaaatacagtcaagtacaagttccgtctgcacgctcccattttgagcgggggcggggggaattcacaaaaaagccaggccactcccacgaagcatttgctttagagaaaaggagcttattctaaatcaagacaggagcaacaggaaagaacctactgcggctgagaggtgtgagcggagaggggagggacaaagcccccatcccgggcccttttcacactggctgtcaagggtaattaccagggatctctccttgtgtgttttttaatcccttattcaattatttgttctttaccctctaagggattatttttcctctggtgtttcttctccgcttgtgtcctttcttttccggcctccagctgttcacatttctgctcctacaatggcaaagagacagaaacctgttactgcctggcagccgggagcctggtcgtggccacccgcccgccggggtgtgggggtccgtattcacggtggatgaatcacctccagcctgctgttttaatctttgcttccactgcaccgtggggtccagctttcctggagctgacacgttggtcccagagacttcagcttgctgctgtctggaatttctgacatttgaaagcctcaaataagatgtctcattaagcagccttgagccctatttagctattcacttggatccattttctgaaattatagcataataatggggttttaactgcttgtcagttccacgaagaacaaaggagtttatctgatttgagcctggctgcaaaaagccggagaaagatggtcccaactttaatgaaatgccagagatggaactggaacccctcccaggggctgggcctgagattttacatggagttgacaagtcacccagctgagtcactcccagctaggtggggacgaaggggatgcactgtgatcgtctgcgggaactaaacttgttccagggataaataggtagggtgcccggtgactcagagcgaaagagaaggctggaggcctttgtgtcccacccatctctgccgagcactctcgtgcaggaccagagccctgcccccgccccgccactccccaggagacccctctctaacctctagttcatggaaatggagtctgcactaagcaaacattgcacttctcgggaactggaggttagcaaagggtggtttctattcccagggggtgggtgtcttagtctgctccagctgccataaccaaataccacggacaggtgcctgcaacaacaggcatgcatttcccacagttctgagtatggagaagtccaagatcaaggtgccagctgatttggcccacgccttggctttcagacagccaccttctccctgtgtcctcaggtggcaaagggagagacaggaagcccgttctctgttgtctcctcttccaagggtacgaatcccatcacgaggaccccaccctcatgacctcagctaaacccgatcaacccccaaaggccccatcttcaaataccatcacctggggggtcagggcttccatgtgaatttgagaggatgcaagtcaggccagagcagggggtcacatttcaagaagggaaatggatagggaccccacatgcacagtccaagcaggatgcacccctgctctgtggtcatgtgtgactgtgccctgcctgcttcccagagctggtgggctcaggggtggagggcagaggcttggaagacgcgacccctgcccgtgaggagcatggatctcactggggagatggggctgtccactgggcagctacagagcgggttgcagctcgctcaggggaaccaagagagtgtcagatgaagcacctgagattgtgccctggtttgggcaacagcatctcaggggagagagagctcagaaagggagtccgccagccagctaaggaggtgccgcgaaattagggaaattggagtgaagcctgagtagtagagacattggcataagttgaggcggggtgggatgcagcctgggaggagaggcagctaacctgatggatggagggatggttggagaaggacggcagaaagacggaggggtcggtacttccagatgcctgctggcagcctacggagcttgttcagaatgcagattccggggaccctgggtgactctgtaggtcagagatctgcattttaacaagctccctggggagattcagaaacaccccagattcccagacccacactgagaaatcccggatgaaatggacagattgccccccgccacaggtaaccacacatgtgtgtgtccctccggcccattctcctgtgattcctccaagatgtggcaggtgcacattaacacataaggggaatctacgctcatcattctatcactagctttttgtaaattgcagtgaaattcacacaacataaaattaaccattttaggtgcacaattcagtggcatttagcacatgttatgcatccacgcctctgtctaattccagaacattttcatgacctcaaagggaaaccctatccccatgaagcagtcggtccccctttcccccaaccccagcccctggcaactaccaatctgctttctgtctctctggatttacctgaatcaatggattcagatttcaggggggctgggctcctccactgctccagagcagctacataaaaatttaccataaatatttatatttatttatatatatttaccataaatattctgggtattttatacaaacggggtggtacaaaatgtagcctctgtcctgtgctgagcctctcaaggggacacgtggagatccctgcgaccgagctgggccgtaagagcagtcctctgtcaagcccttagagatgcgggccctgccctgagcaccgcttgtggatgaagtcagggacaccctgtgatatgcgggccctgccctgagcaccgcttgtggatgaagtcagggacaccctgtgatagaccctctcaggcaggcactggtaacaagcccatttctcagatgtggagactgaggttggcagcagtgtggtcagctgcccatgctcaccctgatgagatcccatgtagacctagagtctttcgctcaactgctgcctctggacgcctctatgaggagtttgtgtgactctgtgctgtgaaaatcaatgtgggaagggaccatagcccaactatccgctcccgccaggcctggcttctcgctcgctgccaccctctgtgctgtgtgctgtggtgactcctggactccagatttcagggggatgggcttgtccctttggccacctcgtaaggctgctgcactcaaggctgtttcttcattgtacactcatgtgggtgggaagccccgtccctaatgccagcctatctgggcatcagaaggcctgggtccaggtttctgcccttacttgatgagtcccctgacgtctcagaacctcagctatgtgtctataaaatggagtgcgtcgtccctgcgtggagggggccggggcaggatccgaggggatcaggcgtgggaaagcaccgtgtccagcgcctggcagcagctgggtattatacaacatttgtatgaggtggttggcacattggcaaggaggaccaggattgggaccctcggagggcaggaatcggaactcgtgtgggtgaggagggagggctcaggagcaggagaattacttgaggaggatggagctcagggttcttcctgccttcgctcactccactagaaggtggttcttcacactgctcacaatgccagctttgaggactggccaccaggcgcagcacgagccttcacattcctttcctgctggtgaagcctggactccacagctccacccccacgctcactgcccacaaaagccagacaatagggcatggtggggtctgtggccaagtggaaaggtatgcccaagttttgacaaagggatgatcattgcttagctccagccttccgctgccaatgcttctggcttttaaaggagaagcaggaaatgcataatttttatgtcaaatgtctttattttttaaacgtgtctgagccaaacaagccacatctttgtaacatcttcaccctccaccccacccccagccgccaggttacattctaggctccagtctgggtcctggccaatctacagacacctccaggacagggcctttgcttctacctgaagacacagtacaaattttagagcaagaataccacggttcaatgccaggtgcagtggctcataactgtaatcccagcactttgggaggctgaggcaggcagatcacgtgaggccaggagttcaagaccagcctggccaatacgatgaaaccctgtctctactaaaactacaaaaattagccgggcgtggtggcatgcacctgtagtcccagctacttgggggactgaggccagagaattacttgaactcaggaggcagacgttgcagtgagctgagatcacaccactgcactccagcctgggtgacggagagagactccttctcaaaaaacaaaaaaaaaaaaaaaaaaaaaagaaagaaagaataccaaggttcaataccagccaccaagctctgtgaccttaggcaagttacttaacctctctgtgcccccatttcctcatccataagatggtatgctttaataatcagatttgtgacgctacagctattattttcttaaggaaagttaaatatctgcacagagagttggtccagtatcgtggttctgtgaagactctggagtcaaagagaatgaggttcaaatccaatggctgctgctcccctgcagctgaccttgggcacagcactcaggcctctgaatctcagttttgtaaatggtctccagtttgtaaatctatgaacgggaatcctccttcctgcctgcggtcgttgtgaggatgagattgactgatatgtgtaaaatgctagtgcacggatacctcctcgtgaactggtgactgttgttatgctgcaagctggccagtgcagagagggcgagccggagcggtagtggggtgagtgtcataatggaggccaagtctgggaaagaggaggagctggggaggccgggacagggaaggtgcgtgagtcagggttctctggaaagacagaactaataggatattgtacatatgaaagggagtttattcaggagaatcgactactcacatgatcacaaggtcaagccccacaataggctgtctgcaagtggaggagaagggaaatcagtagtggatcagtctgagtcccaaaaccccaaaagtaggaaagccgacagtgcagccttcagtctatggttgaaggcgtgagagcccccaacaaaccaccagtgtaagtccaagagtccaaaagccgaggaactcagagtctgatgttcaagggcaggaagcatccaacatgggagaaagatgaaggccggaagactcagcaagtgtgctcttccaccttcccctgcctgctttttctagccacactggcagcagaggggatggtgcccacccagatgaagggtgggtctgcctctccccctccactgactcaaatgttaatctcctgtagcaacaccttcacagacacacccagaaacaacactttgcatccttcaatccaatcaagttgacactcaatacaaaccatcacagcgggtaaacaggccaactctgcaggtgtgcgtggagcagccctcccgggcagtgctcggccccagaaagcgtcgtaaaagggcgttgttggcctgggcgggcagaggaggacagaaagaggcagctctcacagcacagtggaggagacatcgggggccttgcagaccaggcagagaccagggaatggatggcctcctccactgctccagagcagctacaggggccaaaggacatcttcaaggaggcagagacctccccgcattgcctcctggggagggtgcccaccgcagacaggctgctcccaccgtctgcctcctgagggtcaggggccctgggggttgggggcctcctgctgggccccctgtggccctcctcaccagccatggtgctcagtgcgtgtctgctgagtggctgggtttccagcaggtgtttcagcgatagccattccctcacctgctcagctctgcatcatggggaggcgcgttccccaggctcctggctctccctcttcccagtaggttcagccagtgggaagcccttttgggaaatcagaaggtgggaggaagggagcagcagagatattgctccccatctccctccacttcctgggacatccccagcaatgactgtgtcttctccagactctgacttcccctgggaagcccttcctccgtgatcccagcttcttctgggcagctccaatttctggctccagcattggcgctgagcacctcctactgtcctgccatcctgaaacggatgccagctcctgctgtgggtcatctctgggtggtcccaccatcccccgtgtggcttctcagcttttccattgcctgtgcgagcaagtctcaggattaagttactccgctatgaaaagacctggggtcggcggggggttcctatttccaggctgggccggccgatacagtagccatcctagacaaacccgtgcatccttggaagccctattcgcacctcgccttaaagggaatgggatgtgttatgcatagactcacgacctctgaaccaggttcacacccatgactttcgttctttcctgccacacgctgccttcagttaagggccacatttgtgaattcactctgcacggtcaccgtcgcacagcccattttatttgcacgtcagtgctgctgcttctcggagaagccatttgatccctctgagcctcagtttccccctctgtaaaatggaggggatgggaatagcgcctacctcctatgatcaccgtgaggcttaaatcacactgatacttcctcactgatactcccagtctgattattagagggcaccattttatggatgaggaaacagaggcacagagaggctaaataacttgcccaaggtcacagagctcagtggctggtattgaactctggtattattgccctaaaatttgtactaagcatcttcagacagaggcaacggccctgtcctggaggggtctgtagattgaccagctcccaacagtgcctggcaaggaacagctcgagaatcgtgagctctgagaaactctgtggccttcctattcctctgcccctcagcctctgctgattttcttctgcagggagaagcgttcaggataaacagttcagccaagggcatctccttttgcaagctgtgtgctcacaaaagttgctcattcggtgcccactcgagcacctgtctgtcccaggcacctctgggaactgggggcccaggggaacgaggccccatccctgcctcacatacaagtcacgggacggggatcctgatggaaggcagcactgacaccgtgggcaagacagatgcaggctgaagaaggtcccgagaggagctgggtttttctcacattgagggggatgatctgtggcttcctgaaggaggcggcatttgaaccatgctctgtctgttgggaatatgaagctgaatgcagcagctgccagtgcgattcagcaggcagacccctggggtggtttgaagcccgagtgagtgagtggcctgggctcaaccctcgttcctcctgacctccgaaccggggcccccgagagcaatgggggaggatggttgaggcacgggctctcagaccatgctgcccatccctcactgactagctgggtaacctcggtcgggacttgagtgtcctatgcctcagtttcctcatctgtaaaatgggagaatgacggctcttgcctcacaggattggcgggagggctgaacacgtgaattcacatgaagttctcagcccaggatgtcaccctctctcaccaaacactgataaagaaaagaatgccttggctgggcgtggtggctcacgcctgtagtccccacactttgggaggccaaggcaggtggatcacctgaggtcaggagttcgagaccagcctggccaacatggtgaaaccctgtctctactaaaaatacaaagattagctgggtgtggtggcgcatgcctgtaatcccagctactcgggaggctgaggaaggagaatcgcttgaacccaggaggcgagattgcagtgggtggagattgcgccattgcactacagcctgggcaacaagagcaaaactctgtctaaaaaaaaaaaaaaaatgcctttatgtcatcagagactctggttttgcccctgcccgcagctgccaccttcatggagcactggaagcggaaacagatgcgactcaactaccgctgggacctcacgggctttgaagaggaagaggtcagtgggtttgccgccgtgcatatcacgcccttcccccacgttccccctaccccaggacctccttgggacttacacggaggcccgaggtcagaaagcacttctggtccaagctgaggcaaggccgccccccatcccccaccccctgcctgcctcgccactcaacaccctggcgttccgaacaccctccatggccaaagtgaccactccctgtctgctgaagtgttttcatccccatgctcacatggacacccagccaccagcgtggtctcaggcacatgccagggctcaccacactgacctcatcgcgtctgggggctgcctgggctgtcggcaccacccgtgggggtggagaggaaatggacactgcccatgggtctccaaaagtggccgtgagcatctgcctccccgggtgccaaacccacgttccctggagccagctctgtgcctgcagctgggcgtggctgacaagagggaacggatcctttactaacatagagggaaagccagtgttgggcatcttcatactccagagagagggacattcaatattacgtagcccctgggatgccaggtgaaccatactcccagggatcccaagtccagcaggaattcccttcagggtaggtgggaatgaaaaggagtaacagtccccacaattagccttggtgcacaacagaggcgacctcatgcacgcgctgtaaggtgcaaccacactgaccactatttaattttataaaacatgctccccactttttgggagacagggtctccctctgtcacctaagctgcggtgcaatggcatgatcatagctcactgcagccttgacctcccgggctcaagccctcctcccatttcagcctcccaagtagctggggctacagacacacacaaccatgcctggcgaattgtttaatttttttgtaagagtcaggttcttgttatgttgcccaggctacacatgctcccttttaaaaaaaaaagaactttttcatgcatttttattgtaatgtagacatttctttctaaagatatttttcttttaaaggccttttttctttaaaaaaaattttttttaacttttctattgtcttttctcacacaatctgctccctctcagactgaacccaagggtcactcttcagccaaatgtgccagctttgggttgacaatattgtcaacagacaaggggattagagttttctgggagaggcacagcagctcacagggtataagacgggcctctggggccaggctgccagagttccatccagattcggcaccagccttgctgtgtgaccccaggcaaattgcttaacatccctgtacctcagtgtcctcacttgatggcatttgtagggtctcaatggatcaatagatataaagcacttagaacctgacctagcacacagtcagtgccccataaacggctgcccggctagtggccactgggcgacacctttatctgcccagacaacagcctccaccctcttcctcagccgatctcattatcctgtccacaaatgaccagacagagatcaatgcaacctgtccacagcacacagctctgcagggcagagcgggggcagagcccagagccctgtccatggagggagctctctgggtggtctcttcccttgccgtttcaattagaaagattcaaatagaaaaaaaaaagcagtcaccatcttgttcagaagtcaatttcaaatgtcccttctgtgatgtccctgtggctggggaaagttggcggtgaggcccagtcccctttgttcaaccccttgggatcccattccctgatctcctgaccctgatggcttgggatcttgattttgggggtgataaccgaagtcactgggcacacacagtgccaaggagcccgaatgaatttcccaaagtgagccactcgcacccccagcggctggtcagggactcctttgggagtaataacctcaggcgacaggggccgcccctccacatagcctgaaccccagactttggtaatgaagcagaaggacacttgtctcctatcatgtgacccatgtgtgccttagctgaatctgagatgtttcagtccagcactgaaatttggaaatttggggaatttccaaaaccatgggaaaggccacagctacaaaggccacagtccacagtcaccctcaagcagcagtaaaccttaaaggaacccagggtcacccacccatcccggctcacctgtatccatttaccttcatcctaattcttaagaaagttgtctttaggaccgggcgcggtggctcacgcctgtaaccccagcactttgggaggccgaggagggcggatcacgaggtcaggagatcaagaccatcctggctaacagggtgaaaccctgtctctactaaaaatacaaaaaattagccgggcgtggtggcgggcgcctgtatcccagctactcaggaggctgaggcaggagaatcacttgaacccgggaggcagagcttgcagtgagctgagaccgcgccattgcactccagcctgctcaatagagcaagactccatctcaaaaaaaaaaaaaaaaaaaaaaagttgtccttagtggacaggtcctatttctaaaataacaacctaagtaatgacatctttgtgtttttgtttttacttttctggttccctgaaggaggctgtcaaggtttggaactttttgtcgctcctctatcttcccacagcctatctccctgggagagggaccttctcttgcacctaatctctttctaccacgcagttcccgcagttcctccacgcgggtggggtctctgctttctccccacctccggtctctcctaacctgttctttccttccagcacccttcgctgacctgcgctgagctccccaaggcctggcacctctgggcttcctgcgcttgccgacagttactgcgtctcttctgactcccacagctcccccgtagaatgttctcagggccagttcatggctgggtgttcactgcagcctggtacaggcttctccacctccaggaggacacagaggccagattcggtggccctcccaatgggctggggttccccacaagcgggatgatcctgggtcactatccagaccacagatggggtgattacactggaaatattcagcagccaactatgaactggacccaaagggtgcccgaggctaatacatggactgatttgccaagtatgctcacgctgaggagctcagactcaaaattaacaaggactctgtcttgacttggtttcattcacaggatcatcctagagctgaatacgaagccagagtcttggagaagtctctgaagaaagagtccagaaacaaagaggtatggtggccactgtgggttaactttcccagcaataaaacactgtgttcatcaaccatgtagacctgggatcagcccagagaacaaatattgtaggctgtgtaaccccgtgttgcggctgctcaactctgccatggtagcggcaaaaggagccatagacagtaggtaaacacatgggcctgtgttccacacactgtgttccaataaaactttatttgcaaaaacagacagggggccagatttggccaaagggctatagtttgtcaaacttcctctagatctcttgtcatgatgtatcctgagggtgatctcaagttttagccagcatttcaaccacaggaaccacgtggctttgaagcttcaaagctttttcacagtacacccctcctgttctatgccgagcaatgaaacagaagcctttgccaaaccagcacccctgagcaaatggccagttccttgtttcactcagactgtgagaatgagggtgagacatgttttgcaatgttcttgaggtcatcgtctttttataataattgcttttctttttccccaaatgtctcattcaaattaagtcatatgtgcagccaggactctcgaagacctccagaggtgcttgccggctttgtttgtttgtatgtttgtttgtttgttttttgagacagagtctctctctgtcgctcaggatggactgcaatggcatgatctcggctcactgcaacccccgcctcccgggttcaagcaattctcatgcctcagcctcccgggtacctgggactacaggcgcgtaccaccgtgtccagctaattttttgtattttagtagagacggggtttcactatgttgcccaggctggtctcgaactcctgaccccaagaaatccacccgccttggcctcccaaagtgctgggattacagatgtgagccaccgtgcccagcaaagtttatttaatggtgtttttcacatgatgtgggacaagcaggcatggagctcctggccttgtcagcctctaaaggaggctggagatgcccgcactgacccttggagggatgagggcagtcgagggagctctcacaggtcctgaccttgtgtcatatctgcactttcagccttggggactgatcaggacaaacccctgggtttgtctttccttgtcaatgtgtcaggggacagtgctcacaggtccaaagtggccgggggttacagttgccaaaatcccatctggagggtaaagtgggtgctctagaaagcctcctctcaaggcccagctcttcaaatacaatgagaatctggggtacagctcggtcctcctatagccaggaaggaagtatgtcttttttttttttttttttttttttgagagggagtctcgctttgtagcccaggctggagtgcagtggcgcgatctcagctcactgcaagctctgcctcccaggttcacgccattctcctgcctcagccttccgagtagctgggactacaggtgcccaccaccacacccagctaattttttgtatttttagtagagacggggtttcaccgtgttagccaggatggtctcaatctcctgacctcaggtgatccacccgcctcagtctcccaaagtgctgggattacaggtgcgagccactgtgcccagccagaagtatgtatttttaaacacccctgagggtctgagcaggactcaacagaatacaactataaaagcaggagttatcgccctaaaataaagagactgtctgtctgacttaacacatcggatgtgcacgcccgggtgccagctgccctctgccccggcccttcaggccctctgcgcccctcattccctcctgggaaagcaaaaggcctggatgccatcatctctaaggccctacaagcatccggcgtgttttcagggcggcatcccggcccccaagcctgggtgaagatgtctcaggagtcagtgtatggcctccaagacagcccaccctgtagttgtgtggtcgcacctcttgcagtgagcataggtgggtatttaattccttcctaaggggcagaaaagggcttttgtgacacacactatgtccatttaaggcaagggacctaaccaagccacaacagcgaatctgggcaacaggtgccggaaggaagccacctcttggatacagggtccctccgcctctgtggcccgtggcttggtttcagcccaggctctctgatcacatgaaagcaacagaggcatgggggtttacttttgcagagctcagaggcacccccaggccctgtctgcttctgacgggccgtaccctttatttcctcctctgtttcatttggctcccagtggctgctctgcggttttgatttccctccagctatggcactgaattcatttatggaaagagacccaccacctaattggcggatgtgcttgggcttctgggtgtggcttccttcttgctgtcataagatgctggtggtgacctgcacatttggccactacctcccgctggaatccagccaccatctgtgagatggggcatgacgcggtccagtggagggtgcgtgctggagtctctcccgtctccaccacctttgttacagatgttctttccgaacgtaggtctctgccgtctcttacttgtttaaaacgcccagaacccgagtcagccttggcagtgagcttacggcccgcaccaggaggggccagcctgctgccaagatggggacggttccctgggccccgcggtctgcggtgccgcctcccacttcaccgcacggtgctctctttcccccaccccccctcagaagcgccggcatattccagaggagtcaacaaacaaatggaagcagagggttaagacagccatggcgggggtgaaattggtacttttctattttgcgggcagcgcgcgtcttgactgtttgcaggcaatcaaagtcgattgtgtttttcctcaacaaactgttgtatatatttttttttaacattcacatccgtgtttctctgtcttccttcggcacccagtgagcccagcatgttgcgatggcactgcatggctatggtgggtctgcggtggcggggacgggggtggggctctggcttgacttggagctcgtgaaacgtgcttgtcacaactgcctgcaagtgtttcttggtctcctcgttaacatgcatgccacccaccccagaacgagtggcctccggtgtcatgcccgtctgcattctgtgacctaatacatgcattttcccatggaaaaatccacccccatttgaaacatcccggattagtgatgagcttctacctagggtttctccagaccaagccaaccctgggttctgagagccttcaggacatgtgtcaccgcagacgacgttttaacttgtagtgctagctgcttgtttcaacttgctccacaaaggaaaaataactattatggtctgggtggcactgggaaaacatcttccatcttctagacctagaagtgagacttttagctgaagaaatggactccaagtccaggtttctcccagacgtgggtccaacagtctttagaaaggcagctggcattacaatgtcctacacacagaggaatcacagtgttaaacggttcttgctcccgttatcctgtgacataggtgataaaccccgaaatgcttcttggaaccctatgcgtttgcactggctcatcacctgtgggcatttttgaggtttttctgagtatttctgttgttcaagttgtccctgggcccatgcacgcacgcacatgcacccacgctgacacacagagatgtctcatcgtgatggttccagacagtgaccggcattgttttgtgttgtagactgacaaagtgaagctgacatggagagatcggttcccagcctacctcactaacttggtctccatcatcttcatggtaagttccagaaggttaaggccagacgaagtcaggggaaaccgcaaggaagtgattggcttcagccgggcgtggtggttcacgactgtaatcccagcactttgggaggccgaggcgggcagatcacttgaggtcaggagttcgagaccagcctggccaatatggtgaaaccccgtctcttactaaaaatgcaaaaattagctggtgtggtggtgcatgcctgtagtcccagctactcaggaggctgaggcaggacaattgcttgaacccgggaggcagaggttgcggggagccaagatcacaccactgcactccagcctgggtgacagagcaagactctgtctcaaaaaaaaaaaaaaaaaaggatgcgattggtgtcctccaagacctgattcagcctttcacacggtggtgccactggtcccagggtgcgccggccccatctcctcagggcagtgggtggggaagactcaccactacccctaaaatgggaagagaccagggttccaaagtgacccccagtgggggcttcacacgccagggagtacatgagatgatttctgtggtccctgatacacagctttcattttgagagacacaattatttgagtatctagtaattcaagcctgggattcaaagatatcatttaagatgaaactgaagactttttaagaaaaccattaaatgggccgggtgcagtggctcacacctgtattcccagcactttgggaggccgaggcaggaagattgcttgagcttaagagtttgagactagcctgggccacatggcaaaaccaaaaatacaaaaattagctggcgtggtcgtgcgcgcctgtggtcccagctattcgggaggctgtagtgggagaattgctggagactgagaagtcgaggctgcagtgagctgtggtcacgccactgcactccagtatgggtgacagagcgagaccctgtctcaaaaaaaaaaaaaaaaaaaaaaacctgtttatgtttattttgtgaccaaaacatgacttgagccctgatacaggcatcagcattaaattaagtaaaaacaaatttttaaaaattttaaaaaagaaaactattaaataaataacatgcagacaggacacgatagtgctactcagggaccacaagtctgtgacgtggcttgtgggcaaacatcttgtggcttttaggggatttcaatcccagggacttcaacccccaatggattcggccttggccgcctgctagctgtgtttccatcaccccccaagtactcggagccagccgtggtcatgttacaaatgaccctgccctcgtccagcccaacagcttgaaggcagcgcctcctgtggccacctagccccgagtcctggtactggagcccaggttggcagctgtgcactgagggcctcaccagagcgtctcatcactggccagtcctggtaccatccccctcctgctgatacagaaactaaagccagaaggctgcacttctcctccagtgccagccagaggtggtggctgtggtcaccatgtagtcactggcatatgcctgcagaagctggtgccagtcaggctgtctgctccaagatccatgccattctgtaggaacttggagagacagaggcggggggctgtctttgttttctgggttgagtgaggggccaagggccccctgaccaagtcatggaagaagtgggaagatccagtgtcccctcatgctcttaggtacagtaagagggacgctggccgacataaagaagtccagaggagggtggcctcagtggtggggcctgctcatcccccttacctggagaaggggaccccctcggtgggggctgggggctgggggctgttgtgctctcggtgacttggtgggagggcacccggcctcgtgctgaggggatgtgtcccctctggccaggtgccaggctagggggttgggagataaccggagcctccccatccctcacccaggggaggctagcctgaggttcagccactcccactgcagaagcagcagcattgtcgcagaagggccagtgcggggccgggaaggaggtggccgtctagggctggtctggtggccccacgatgccatcagagtcactggcttctctgaccttctgctagcctgtcctaggagtgggtcccctcttggtcacaacatggctgctgcacctccagcatcacttccactctccaggctggaagaaggggaagggtgggggaagagatgggccaggggtggcagcccctgtctgaaggtgctttcgcagaagacccaccacacctctgcttgcatctcattggtcagaactgtttcacgtggccacctcctctgcagggaggctcaggaatgagcacacactgccatctcagcaaggcgggatggtagaggaaagacagaggatattggatagggaagtagccggctcttttcccagccttgacgtactggtaaacccctgtcacaagggcttcatagggttgaagaggacacagctttgtcttcaacttgggagtttcattcagcgaacaaacgttggttgagcacctaggatgtgccccacacgcccctggtcctggggatgcgggggagatggaccagggagactggaagggagcctgctgcagggcgtgcctgttgtgggcccgactgccccatggcagggcaggggacgcgcccgctggggtggagggcctccctcgctgagtcacccacaggcctggcgctccagctgcacctccgcatgctggcacggggacagacatcctggaggcctcttggcaggaccgaggggttttccaaggaaagcccttgttccccggagctggccagggagtggtccccacgcctcgcagcagggcttctccttagtcagggtgtggtgagggctgcaggcattttcctgggcagggtgcagtcaccatgtgtcactggcagatgcctgcagaagccggtggtaacggcccagaacatgaaataagagcttttctaggtttctgaaagctgcagacaccctctggggcaaacagacccatcccaggctgcaactgggagacacacagggcagccccaggcctcctgggcctgcctgtcctgggagccacctgtgactgtgccagcagggaccggacctgccctctgcacccttgcatgggagcaaatatgcgatttcctggaacacggggacacagggtgacaagacagcctgtgtcctgcgggtggtttcacgcctgggtgaggagcctggctttgctgtgtgcttctcctgcccagccctcggtccatccatcctcaatgagggctcagaatggggcatccacacccctgggcagggcggggcagggcagggtgagggagcccagacagacagacagacagaggtgtgtggaacaatcttgtcattgtagccaactcccaccacggtttctcaggcaaccaccaacccaagttttatggaatgttctggtcccacggtatgtttggcaagaggaggggctcactctggtgggagagctagaagggtgctgctggctgggagaagggacccaaagcatctccagccagacccaaagccctgccccatcccaggccacacctgcctcctttaccaggggagtccctgggaggtggctgtgagagaggcacacctcagccctgcaccacctgaggatgtccctgagctcaccatgggttgggggagaagccccatcccgcagtcagtctgctctgggacaagccactggcatggcggccatactgtgtcctgggctgtgcttggggatggtgcctgggctccgggaagatggtagcacaaagatcttgtgaactgcaggcttgggcagaccgcctggtaaatcccagctcctgagctgggtgacctggcctgtctacgtaacctctctgaacctcagtgtccttgtccatggaacagaaactagcccctcatccatctgtctctggtgggttaatgcacagaaagcccctggcatttggcaggtgcccaagaaatgtcagtgcttgttttgaagcagaagagcgggaaggttgggggacagctggactgagggagcagatggggcaggcccaggaaggtcctgggtgggcccccaaccaagagtgcccctttcccccctgcagattgcagtgacgtttgccatcgtcctcggcgtcatcatctacagaatctccatggccgccgccttggccatgaactcctccccctccgtgcggtccaacatccgggtcacagtcacagccaccgcagtcatcatcaacctagtggtcatcatcctcctggacgaggtgtatggctgcatagcccgatggctcaccaagatcggtgagtgcccatgttccaggtactgtggcctggactcaggcagctggagtcgcctgcctcttgctgtgcatccttgagtttgttgcttaacttctctgggccccagctccctggttctcaatgggtatcctgagcacaggccatggtgcgcctatgagagccgactgagtgactgtgccagtggccagccagaagctggaccaggctgttgggggccatcccagccacagcctcagtatcatcctacccctccctctagaggtcccaaagacggagaaaagctttgaggagaggctgatcttcaaggctttcctgctgaagtttgtgaattcctacacccccatcttttacgtggcgttcttcaaaggccggtagggacatcttcagcctttccccaacctcgcttctcccaggtccaggagagggctctccctccccacaggttgggggcacctggagcccagggcagggcagacaccgtggcacccgcagccaaagagggtcagggagaaggcctgggccctgctgaggctccagagcagcgggaccctgggcagcagggagtccaggtggcagggaacccaggcagtggggaccccaggcagtgaggaccggggagtgaggacccgggagtgagggccctgggcagtgaggaccctgggccgtggggaccccaggcagtgaggaccggggagtgaggacccggcagtgagggccccgggcagtgaggacccgggagtgagggccccgggcagtgaggactctgggcagagaggacctcgggcagtgaggacccgggagtgagggccttgggcagtggggaccccagacagtgcagaccccgggcagtggggaccccaggcagtgaggaccggggagtgaggacccgggagtgagggccccggacagtggggaccccgggcagtggggaccccaggcagtgaggaccctgggcagaggggaccccagggactccaggcagtgggaagctccagcagcaggaagtccaggcagagaaccccagaagccagctccaggtgctcccacggcaggtagggaggagtccacgtagggaggagtccacaaagtggggacaaggagagaggagggtgtggaaatgcggctgctggccacttgagccctcttcacagctcctggaggagtgaaaccttccacgcctgggccctctggagccatcccaggctgcggtggggcctgcggcccacccacaatgatgccccccacccccaccaccactcctgcaagggactggctggtctgatctcagagcccccaaaaaggctgcctcctccacatcatgtgattcaccagtgccatgcccgccctcctggcccagggtcccagggccccgccaaggggtccagtgccccctgagcgcatccaggatggagcaagctcttggaagcctacacgccccacaccagcccctagaaagccgagaggttgtctatccccacccagggtggcctttggccaccacctgccccagctgcccaaggtccccagagtgcttctgtgccagctgtccatggaccccaccgtgccagcggcacatcctgagtcccaggcagctagcgcagcagcttgcagtcttcaggccgggtggtctttgccttaatcccctcctgggccccttcccgctgcctctcagtctcgtggcctctcattgaagaagttcctttttctgacccctctctgggtttgggaatccaacctttgaccaatgaaaaccactgtggtcatcttttagcagatgcaccaggcagggagagccgcctgtagataccctcgaggctcagcctgcaggactcacacgctgcacagtccccacttgggggtctctccccgagctgagccaggggctcatcttttctctaacgacctcccccatcgtttcaggtttgttggacgcccgggcgactacgtgtacattttccgttccttccgaatggaagaggtaaccgaaattttattcatctctggcagccccttctgtcttgcttacgatttgtctacaccatgcacttgggagaagcagctgcagcacatttgttcagcaaagagcagcaggtttctttccttcttgctggaaacttttctgttcccctgatgtggtggggtgggctttaatcttatctggtgtgttcatatagaatcacctagaaggataaagtcgctgtagagttaatgaaagaaaaacacaacatctggttttcttttctttttttgtgagactgaatatttctcttctggttaagatgaattaatgagggacgggtgcagtggctcatgcctgtaatcccagcactttgggaggccgagactcgtggatcacctgaggtcaggagttcgagagcagcctggccaacatggtgaaaccccatctctactaaaaacgcaaaaaattagccgggtgtggtggtgcatgcctgtaatcccacctactcgggaggctgaggcatgagaatcgcttgaacctggaagatggaggttgcagtgagctgagatttcgccactgcacttcatcctgggtgacagagcaaggaaccatttcaaaaaaaaaaaaaagaagatgaattaatgaggacaaaacagaacttggctaacttttttttttactcgacattgaaatgcttgtctctttaccctcaaacaccatgctggtggcatgtgctttctgcccagcgatcctggccatagaaggtctggttgtgccagcctggttcagcctctgtcacggcccatggacttgctccactgtttgtcccacaaccaggggctccatcagaccaagccggggcttcagagcctatcagtggttctggtctcagcatttccaacccacagagtaattcagctgatcagaaaataagagggtgagtcttcttgaaaaagaccctgtggaataagatatcgaggatggggtggacatcaggtacaggattatctggctgtctggagtgcagcctagaggttccactacctgaatgcaggcccctgggcagcccaagacacgggcctcctccacagtaatgggcatctgcgccaagcttctgaaatgctctttcctttttacatgatgatcccctgtcacactcgtcccgggtcagaaagtcatataataaagcagatggtgtaattgctttttccaaaagcatggctctccaagacaagtgtagggtttgttaggttttatttggaatgcagaacaagtttactgtgcctcaggggtcaccatgcatcactggtgttccctttgcttggacaagttaaacttccagcccacataggtttctgactgtcacctgcttgccgggtcccaggcctaaggtggcaaaggcccactgagtcagggacattaggcctcagaggggtggctgctgcctcctgtggggctcagcctgccatggtggtgcagagccagtggatgctgactggtgcatgggaccggccagtggccctggaaaaaaggaggcgccctgaggccctgccccacccctgcttactccctcccagtgcgctccccgctcccatccacagccccaagcacagcagcctgtaggcggagtgtgtccgtttcctggggctgccgcaactcgatcccacagacttaaagtaacagagatgggggtctcacagttctgaaggtcggaagtgcaacatccaggtgttagccgggctgtgttcccttcaagggttctaggggaggacctgccttgcctctcccagcttctggggactacggaagccctcatggttcctttacttgcctctccaccctctgccgccatgttcacgctgcctcttccctctgtgcccgcgccttctctttttctgaggacatcagtcctcagatgggcgccccatctgaaaacaccccagcatgaaaacaccctgacttgactacatttgcaaagaccctttttgcaaataaggccacgttcccaggtggcggggattagaacctgagcgtctttttttggaggacgcaggtcaacccacagcatgagggtgggcctccctgcagggctggggtccctctctcggtgtccctgtagcgtggctgatgctgctctctgtccacagtgtgcgccagggggctgcctgatggagctatgcatccagctcagcatcatcatgctggggaaacagctgatccagaacaacctgttcgagatcggcatcccgtgagtgtgctgcagcgggttagagcggcaggggcggggccaggcggaggggtgtgtgggtggctcctgcgggggtctgggtggacgcggggcctcaaccaagatgggggcactagaagcagggagagaaggaggacacagagggaaggtggggcaaaagccaccccaggccaggcatggtggctgacgcctgtaatcccagcactttgggaagctgaggcagaaggaccatttgagcctaggaaatcaagaccagcctaagcacaaagcgagactgcacctctacaaaaaaataaaaagttagccaggtgtgctggtgcgtgcctgtagtcccagctactcaggaggctgaggcgggaggatcgctggagcccaggagttgcaagctgcagtgagctatgattgtaccactgcactctagcatgggccacagagtgagaccctgttttaaaaaataaaaacagggccgcgcacagtggctcataaactgtaatcccagcactttgggaggctgaggcaggcggatcacttgaggtcaataattcgagaccagcctggccaacatggtgaaaccccacctctactaaaaatacaaaaattagccgggcgtggtggcgggcgcctgtagtcccagctacctgggaggctgaggcaggagaaccccttgaacccaggaggtggaggttgcagtgagccgagatcgcaccactgcactccagcctgggcgacagaccgagactccgtctcaaaaaaataaataaataataaaaaacattaaaaaataaagccaccccattttggacgaaggagggagaggaagtcagaatgacaccccactccccatgctggctgaggatgggggggtaccaccaggtgcccccaagcccgatgctggctccccagggtttccagatggaggctgggggacttggcctcgttgttaccttgtacccttcggaaatccatgtcccattcccacctccccagtggctgctgggtctctggagtcaagaacttgtcgggccattttccatgatctgtgtccttccccaagagtccacttgggcatgaccagcctccactgttcttgtgtccctgatgcctgctgggccctcctgtggttcacaagtggtcgtttgccctccctgcacctccgtttccttctgtagccagcaaagccatgacacttgccccctgccttttggggaaagggcagaagagatcatcgacaaagaaatgatggcaaacaagtaaattctggatttaaagcagaaacttagaaatatcactggaggccaggcgcggtggctcatgcctataatcctagtactttgggaggcacagatgggcggattgcctgagctcaggagttcaagaccggcctgggcaacactgtgaaaccccatctctacttaaaatacaaaaaattagccaggcgtggcagcatgtgcctatagtcccagctactcgggaggctgaggcaagagaattgcttgaaccaaggaggcagaggttgcagtgagctgagacagggccactgcactccagcctgagcaaaaagagtgaaactctgtctcaaaaagaaaaaaagacacatcactagaggtgccagacccaagcccccaaattcaccctcctgcaaacctaactgcatgatgtctcatctctcaggaagatgaagaagctcatccgctacctgaagctgaagcagcagagcccccctgaccacgaggagtgtgtgaagaggaaacagcggtacgaggtggattacaacctggagcccttcgcgggcctcaccccagagtacatggaaatgagtgagtgatggccggggcaggcaggtgacatcaggatagaaacaggccagcatgccacctggagtggggaagggctgcaggggcatgatgcccccaaccctgcggtgcccagcgtccctccataagcatcaggcagggagaagagagatgcagaccctgggatcctagtgctgccacccccttgggtcggtgagcatggctgctctggatggagtcctgtgttccagaggcccaggtcaagcagccaccgtccctaggcacggtccccaagcatggtccccagccacagtccccaggtatggtccccagccacagtccccaggcacggtccccaggcacggtctccatcagcgcagcccgacacagcctgggttgtgcagctcttcctcctcccttagtctcctcaccagccgagggcccggccctgctaagctgcaagatcgtccttacttgaaaccccccacaatccaaggtccctcctctcagctccaaggcccttcaagcatcctactttggttccatgactcatctccccttcctggtggtgagctcctgagttgcaggagccacgacttgctcacctgtgggctggcgacagctgcccccagcacagagcaggcgtctcaaaggagacccagggatcgagccttacccccctcaatcacgtggctggccaggaggatgccgagaggtggcacataccttttgggggtggccaaagagaactgggaagaggccaggtgtggtccgcacagctctggactctccctgacctggtcacttacctctccctcctgcctcctgcactctgcacatgctggcctccttgctgctccccagccccgtggagctcaggccgccccagggcctttgcacgagatgtgccctgctggaatgccctctcccaaatacctgcatggctcactctctccctgcctcccaggctctactcagaatgtcccccaacagaggggtcttccctgatcactgtgtttgaaaggggcagcccctccccgacacggccacgacccccacccctcctctgcttggtgtttctgctccccagcagacagcctcaccccgtcatccctcttctgtctccccccggtaggacggcagcctcaccctctcttgttcctcatcccatagccctacccctagagcaggtccaggtatacagtgggtgctcaatgtgtgtttgctgactgaatggatgaacaaaggcagtcaggaagactcctgcagagggggggtcccagcatgcagtgccctggccaccaaggtcaacttctctaaaatgcccgttcccaggcttgttcctggtctgctggaggtgagacctggcaggctgcatttttaaaaagggcctgggggtaagggcaccttagagggtggggagcgtttctgtttaatttcaccacaagtgctgccgtctgcccctcctgttagccgaattgtccacatatgtcgctcctggctccccagacaatcgtgcaaggagcaccttgccattgactcaggaggagaggaatcttcagtgtggcgttctgtggctcctctctgttttctcctggaataaagtccaagctgaaccagggtcaggccggtaggcagaaaatggctcccagctgtttaaactcagcattggccatgtggccaggagggacggggtctgggaggtggcttcccctgcctgcagggtcgctccttccacaggaaaccctagggagaatagagcccaagacacgagcacagcctgcagtgggccgcgagagtggcagccccttccctggatttattttcctagtggctggacatcacgtcccgagttcctgacgggtttggacaaaggggacttctggagcaggcgcctcctgcccacatacacggggagtggctcacccgttccccacactgcccccactgaccaaggcacatttccacacccactgactttctccccaccccatgggctgccagtctgctcctcccaggaagtctcaagccacagatgtggatagatggggagaacaagctcatctggaaatgccccacctccccgcccccctgcaccctccctcccaggccccagccctggcagcgcctccagctccctggtcatacccttagtgccagagtaggcagcgcctctcggaagtgaggaagcccaccctgctgagtgacccacagcctcaggcctcagcagcccctggccctcatgcacagcacacaccgccccacataagcaatgcctcatcccctccaggggcctcaggcaggaccagaggcctcccactcagcccaccttgccagggctagcaagacagcccagggagagaacttgcaggccattccccgccatggcccatcctacctgctaacagtgctcacactcagggcaccccgcacggcccaccccacatgctaacaatgcccacactcagcccgccaggcacacggtgacattctgctggcttccttgtttaccgcctggcaccaaacgcccttggactgggtcctgctgtgcagttcccgaaccagctttcctgctcagttccactcagaaaccttttcctgaccttctcctagagcctagccccatgctggatgcagcatccaaagccagagaagccccagaggcagctcccgggtgggatgatccccagggggagggccgcaggggcagaggcgagggactgtcctgggcagtgggtccccacccggatccaggagtcctgatgcaaggggaagtttgggctctggaagattcagccatgcaggcaggtcccccaggtcccagggagcccccatgatggaagcagcagggccactgccacgtcccttcccagcatgggcagggggatgaccacaggctgggcctttgagctcacgatggtccttttccttttggcgatgattttttaaaatttgacatgggctggcgaggtggctcatgcctggaatcccagcactttgggtggatgacttgagctcaggagtttgagaccagcccaggcaacatagcaaaatcccagctctacaaaaaatacaaaaattaagcagtcatagtggtgcatgcctgtggtcccagctacccgggaggctgaagtgggaggattcattgagcctgggaggtcaaggctgcagtgagccatggttgtgccactgtactccagcgtggtgacagatcgagactatctcacaaaagattagccatagataagggagcattcccgttactcaagagtcaaacactgagattcagagcaaaatttggaattctgccttcagcccactcctggcctggaggtcacccagggtcatggagggtccatcccaagagctcatctaatgcatctgcaggtggggtccatgcaggtgggctcgttggaggtggggcggcagccagacctgtgcggctcggcacacggggtggtggagtccccccttatgggctgtggctcacggggtgctgactagcactgggctctctctgcagtcatccagtttggcttcgtcaccctgtttgtcgcctccttccccctggccccactgtttgcgctgctgaacaacatcatcgagatccgcctggacgccaaaaagtttgtcactgagctccgaaggccggtagctgtcagagccaaagacatcggtgagtgaccccacgggccggcagaaccggttccgagtgcgtgctgggtttggggagggggttgctcctctccagaagctagagccagagctggccaggtgtccctcctggggctcttcactcagcctttgccgggtggagcctgggggcaggtgacacaagatgtggaggctcgcttagccctgtccccacccttcccctcccaagatgccttggtcacagaggatgtttggaaagagtgggtcccagacatctgaatgtctcaacaacctgctgctttaggaggtacaagagactacatttcctctctgatggctggcgacacccacctgtagcaattgtgtgacccccagagccagggcaagaccaacgggaaaggagtgttggctgttcagcaagtgccctcctacatggcatgtcatggcatcatttaatgttcacaaaagagaaaaggaaggaaggagcccccatctgtagacagggaagaacagtcccagtcattgcatggcttgcctgtagggatcaaagccaagatgcaactcaactccagctttttcaccccgtcactaagacaccttgaccatgtggagaaggggtgtgagtttgggagaatgtatatttaaggtcagcgtaaagaataacttgggctgagcaccgtggctcactcctgtaatcccagtgctttgggaggcccaggaggatacatagcttgagctcaggagttcaagaccagcctaggcaacatgacgaaaccctgtctctacaaaaaaacacaaaaatgagctgggcgtgatggtgcgttcctgtagtcccagctactcaggaggctgaggtgggaggatgagtgagcccacataggttgtggctgcagtgagccatgcccatgcctgggcaacagagtgagaccctgtctcaaaaaaacaagtaaaatttagctggatgtggtggcacagacctgtggtcccagctacttgggaggctgaggcaggaggatcatgtcagcccaggaggtcaaggctgcagtgagacgtgatcatgccactacactccagcctgggcaacagagagagaacctgtcttaaaaaaaaaaaaaaaaagaaaagaaaagaaaagaaaaagagtaactttaatagtcagaggtgtcaaaaacagagcagacttccttgtggattagtgagctccctgttaccagaggcatttaagcagagacagggtgacgatctgtccaggagggtgaggggtatgggagccccacgcaggcttccaccggagccagccatcacaggaagggtgatcccatcttgtcttatagtaggaccaattttcagggtgaaaacaaaattacaaaaatacattgattttatctcaaatttaacacaattttagttaaaatagcacctgcgtactaattattggaataaacaaaaggttgaattacatattggggatatcaccttgctgaaataaagattccataccagcttgataagatagctttgggttgagcttttgtaggccaaacataatcttaagaaaatgtgggaaattgaccaggcgcagtggctcatgcctgtaatcccagcactttgggaggcggaagcaggtggatcacctgaggtcaggagttcgagaccagcctgaccaacatggtgaaaccctgtctctactaaaaatacaaaattagccaggtgtggtgggagcctgtaatcccagctactcaggaggctgaggcaggagaattccttgattccaggaggcagaggttgcagtgagccgagatcatgcgattgcacttcagcctgggtgacagagtgagactccatctcaaaaaaaaaaaaatgtgggaagctttatcaattgttccaagggcttctccagtccttggtatttgtgtcattctcgttggaaacacccttcagatcatctcaccccagtacgtgttttctccttaagttgttagcggttctggctggaagctccttgatccacaccttggcccctagtggcaagcccagcatccactggtgaccaaattcaccaatcctccactgtctggttccaagataacttcaactctggcttctcttacgcttggctgtcttgtagactaaaagagatgaaatcgtcattttcacaggtcaaagaccatcagatagcagtgattcacccggcagcttcacatttgcactgcgtaaggccctggctttgaaaggggcctggaaacattggtgctttgtagggagggacatcccagggctcctgggtaagaggtcatggcactgtgtttggacacttttgcttccctacatcacctcttctctgggtgacccaggtaatgaagactcagaacacagacactctatactaaactgccctgtgagattttgtttaaaaatttcaaaggctttaaaagccatgagctaaccaaccctccgaagaccctgctaaccaccagcatccctgttttgcgtctgctgaggccacgggtgagccccttgcccctcataccacagccctccatggccagaggtggagcaagggtagagtgctgatttgctggtgctctaggtcagaggtttgcacttgttttctgttaagagccagagagtgaacgttttaggcttcctggacccagagacaatgtcctcaagtcttaggcaatggttcttacccaaaggctacgcttttcatacatttttcatttcacactttaaagtgaaaaaggccagggccgggcgcagtggctcacgcctgtaatcccagcactttgggaggccgacgcaggtggatcacctgaggtcaggagtttgagaccagcctggccaatatggtgaaactgcgtctctactaaaaatacaaaaattagctgggcatgcaaatttttgttgtggcagttttaattttttttttttttgagatggggtctcactctgttgcccaggctggagtgcagtggcacaatctcggctcactgcaaactccgcctcccgggttcacgccattctcctgcctcagcctcctgagtagctgggactacaggtgcccgccaccacgcttggctgatttttttgtatttttttagtagagacggggtttcaccatgttagccaggatggtctcgatctcctgacctcatgatccacccatctcggcctcccaaagtgctgggattacaggcgtgagccaccgtgcctggccaagccatttttaatttttaatgttggcatgcacctgtagtcccagctactcaggaggctgaggcaggagaatcgcatgaacccgggaggcggaggttgcagtgagccgagatcgcaccactgcactccagcctgggcaacacagcgagactccacctaaaaaataaatttaaaaagccatttttagcttttagggacaagtgagaaagaggctgtcgaaaaacaggccaccatggccgtctttgcacacccgctctcaagagcaaggcgagattgcaccccaagctgtgcctcagcatagcgctgctttgaaaattggcatcacagagctgcctccaacatgaactttcctcagaacctcagcctgttgtgtcctccagggaaccccgggaggaagcctgggtgaatcctccctcagtcccactttccagataggaggccgaggcccaggcggtaacagtgccgagcaggaaccagagagctcaagccctgggcctcctgcatgcgtagagggtttgcctctgaaaacctcaccctgtataccgaagaccccaaaaggggaccctgggtctgctcaccaggttctccctgcagtcctcggaaattctggagctccctgtcccatggcagtaaagaaaagagtgccatcccattccagcaggtacagctaaaaaaagaaaagaaaaaagaaaagaaaagaaaagaaaagaagagtgcagcccacactgagtcctcacaaaggcctgatgctcaggcagccgacagtaccccacccccgcccgccacctgccacatcacagtgcgcgtgtgtttgctctggcaccctctgcttcgagaagctctggctgtccccagacagtggctgaatgaagcttgcaaacccaccagggtgaaagggagcagcagctcagtggccctggcttcccgcagtccctctgcaggcattggcgtccccaccagcagcaggccttccgcgtgcctctttggactctttgcacctggctggtttttgctcagttcttacggatcagctactcacttcctggttcctgtccggttggctgaaggcataatctgccctcctttcacgagtttgtttatgggttccttaaccgtaacctttccttgaagaggcttttgtattccttctgtgatccgtgcagggcccccaggcgagctccttgagaggacagagagggcccctgtggcccctgtgacctgcgcccctgaggccctgggtggctgggggaagctgtgccacaaagcgcaggtgccttgatcaccctgtcgtccagcgggtcacagcagggacccagccgtgcgtgggaatctgctccaggtccctagccctggtttcgacttcctgttttcttcctggttcttcagagcctgctggtgggaaagtgcagcctccattcagctcccgggcactgcatgtgggcaggagtggtggcctcgccaagtacctggctttatccaaatacctccctgttctgttccagaaaatggcgcttagcatcccctagagtgggaaaaattccttgggaaagaaaccaaggaatttacttggggaagtaaaaatgaggcaattttccccaacagggctttcataaaagaagcccacccaaagaatattctaaaagcacagcatccccttttacttagagatgtcaatgaaaagagtcaaactctgtcaaatatttgaagagatttattctgagccatgagtgaccatggcccatgacacagccctcaggaggtcctgagaacatgggcccaaggtggccgtggtacagcttggttttatacattttagggagacatgaaacatcaatcagatacatctaaggtatacattggtttggtccagaaaggcgggacagggcgacttccagattatgggtatatatatatatacactttttttttttttttttggagacaagagtttcactcttgacacccaggctgaagtgcaatggcatgatgcaacctccacctcctgggttcaagcgattctcctgcctcagcatcctgagtagctgggattgcaggtgtgcgccaccagatttggctaattttgtatttttagtagatacaaggtttcaccatgttggccaggctggtctccaacttctgacctcaggtgatctgcccgcctctgcctaccaaagtgctgggattacaggcatgagccaccacacccggcctatttttaaaatttctgattgtcaattggttgagttattatcaatagaaaggaaagtctgggttatgataaggggttttggaaaccaaggttttattgtgcagatgaagcctcccggtaacaggcttcagagagaatagactgtaaatgtttatcagactcaaggtctgtgttgatgttcatgctggtcgacttttgttgaattccaaaagggaggagggcatgaggaggcctgtccgaccctcctcccgccccctgcttcctgtcatggcctgaaccagtctttcaggttaatttgggggtgccctggccgagacgatgaaccccattcaaatggttcgggggacccttagaattttatttttggtttacagagatccttagagcagtgagtgtcaccctggaatgtgcgtcagaataactcggggctcccagccccaccccaggagaggcggatcccgtgggctggggctggggtgccggttcagcatttctctaacacaccccgcggatgtgcagggccacacggagagccatccgcctggacgtagatatcctgcagacctgtcaggacaggctccatcggggcccggaagcgaggaagaccccgctcccggctccatctcatccccgcctcatccctcccatttcctgttgtctctctgggccggttgggcgatcacctgggcggacccccttgcctgcctgagtcctgcacttcgacggccctgaactcaggagccacgtccctcgggagccccaaagacttcaacctccaccccaggcccaccgcacctcagcaccccacttcggaggtctcaaactcagcgccccaagggccaggtgggccacacgcgcaagtgagactaagtcctgggagtgttcttcatggccacagagcagtgtgcctgttcccacatttcttgaaacgttcaactctctagtgggggtctgggtttagatgctaaggcggccataatggaggtcggaggtcgccgggaggcctcagcacagacagcagagctgcggtgcacagcccagcctgcagggggcgcccccgggcaccacagccagctgttgccaaggagacgcaccagccagccaggaccagagccgaggagtctcgatttttcttttcttttttttttctttttttttttttttttttttttgagacagagcctcgttcattctcccaggctggagtgaagtggcgcgatctcggctcactgcaacctccgccccccgggttcaagcgattctcctgcctcagcctcctgagtagctgggattacaggcgcccgccaccacactcggctaatttttgtatttttaatagagcggggcttcgccatgttggccaggctgatctcgaactcccgacctcaggtgatccaccaacctcagcctcccaaagtgctaggattacaggcgtgagccaatgcgcccggtcttgattttttaaaatacattttcctggtttttaagcatccgtctgcatttttaagcagtagacaagcacaacaagatggccatgctgcctggatggggcctgcctgccaccgctttgcagcctctgctccggcaccagaatctggttggaaagggctttctgcactcgtgcagtcactcagcaaacatttacccagcagcacccaccttatgtgccagacaccaagctagacccagaatctacagggatgtgcaattagcaccctgccttaggagctcggagtccacggagggccctcagccctgacacccagccaggagaagccgggtcggaagtgtttccactcctaagggagtgcttcagtgctgactttgtagggctgtgccatccaaccctcacctgcattcccaggtgctttattcagcatggggtggccttagggctgctagtgtgcagagcccatgtgactgccccaccacctgctccagcagaaaaataaactgaggaccactgcactcgtgcaaaagatcaaacggagctacaataaactcctcatctgggataaggcgatagtccccatggcccgaggactggagacaggggtcagggaagtgtgactgtcacttctcaaattgcctaccagcaatgggttgcagtgggtatttctctttttttttttttttgagacagaacctttctctgttgcccatgctggaatgcagtggcgtgatctcggctccccataacctccgcctccctggctcaatctattctcgtgcctcagccttctgagtagctgggattacaggcatgtgccacgacgcctggctaatttttgtatttttagtagagatggggttttgccatattggcgaggctgctctcgaactcctggcttcaagtcatctgcccacctcagcctcccaaaatgctgggattataggcgtgagccaccacacccagcccgcagtgggcatttctgattgatgatgattgtgactgtgatctatcattgaattgacactggctggggccagggagcaagagatcttggtctcagaggtttcatctgagcctgtggtttctagctcggggccacacaggggcctgagctcttgctgcctttgcagaccaccagcatgcaccccaaaaacggggactgggaggctcccctcagctactagggcagaagcgctatgtacagctctccctgtagcctcctgcacaggtaggatgtccacttgctccatcctggccgtttctgacgagtgctggttatcacccatctcagagctggctcagggcacagagagcaggccccaggattgggctcccagccgaaccgctgcacacaacattgctgggcatgatagggtgcagttagggtgaggcgggggtcagcccgggacactggaccatttctaggaattgcaacactgaggccctgcttcctgggccattgagggcctccttcctgggccctgctagttctcatggccactgggaagacgaatggagagaccagcatggccctgggcgctgtgttgtgatcctcttgttcatctgtgatttggtgcacccctgggtcttggagtaaagggaacaagggtgtgtctagatagggaacggttcaaccttcactgctgtggactcagtgcctccagccaggggccctggcactgttcctcaacagcaaagccatgtctggcctatccctaaatacaggtatcctccgccagagctttaggagctgcaccccaattgaatcttggtcagtttaggaattaaaaaaggtttcatctaagcgaactagcatttaaacaggtgcatggggagattgtgcagaaccactgagggagcagctgtctttaagcacctcttttagaagctggtgagcttgtcagaaagggctggtacacaccaggccctggcactggcctggcttcctcaggacctgaacaaatgactcttggttgccataagcctctgactgctgtgagaaagcctggcccctgcaagggtggtacccgctcagactgctgcctggtagctggaatgactgagagtgtagggctctttaaaactgtgacttcttcttcccccaggaatctggtacaatatcctcagaggcattgggaagcttgctgtcatcatcaatgtaagtgacatcagggaccttggcagaatggaagtcccggctgaactgccaggtggccggggccctgtggagaaggagctgggcatgggtcttctgcctctagccatggtgcagccccaggctgcccggattctctagttataaatgtcccttgaccgcatggcatggggagggtgcactctggggaggcataacaaattctcttcaacctttttctgcaagttttttttttttgaatctgagtttcactctgtggtccaggctgcagtacagtggcacgatctcagctccctacaacctccgcctcccaggttcaagctattctcgtgcctcagtctcccaagtagccgggattacaggcacccaccaccacacctggctaacttttatatttttagtagagacggggttttgacatgttgaccaggctggtctcaaactcctgacctcaggtgattcgccctcctcggcctcccaaagtgctgggattacattcacgagccactgcgcccagcctttctgcaagctttgagcaaaattctccaccatgcccaccttcgcccctaagtccactgagaataaacaagagacagagataggtgggaagacagagacagagataggagggaagacagagacagagataggagggaagacagagacagagggagagaaacacagagattccttattggcaatctttctgttctcttatttaaagaaaaaagttgatttttctccttaatctgaaacgtatggctgctctgtagagaaggtttgggagatgctgaaatggggcgagaagggagcactcatcagccttacacacggctctgctaaggatcagggctccaggcccctcagcctcctccccagcatggcagccccttccagcctctcctatccccaggcctgcaggctaggatggcccggccctcagccttccccatcggggtctgtctgactctgcccatggcctggatctccccgggtttagctgtgcccagctgtccccagtacatacttcaagcccaaggctgcatcctagacatgaaaacccgaggcagccatggggagtctgctgtgccaggggcccatggctctcgtcccttccaccctctggctgagcccaatcctccccgccaaaagttgacaccatgcacatgagggacacggggtggctccccaaagctgacggtcgacgcccctgcagggccgtgatgccaagtcagggtctcagcaggccctgggactcagtccccacagagggcagggggtgacactcagccccggagaagggcccctcagagccctctgacagtgccctttcccggtgggcaacgctttctgccaggcatgcgctcccaccagattacaggaaggctgcaggcagagtgtgcacaccgggatggccccttatcccgcccagacaaaggcgcgcagggccctgaggcagggcccatgctgtgctggagtgggtggagctgggaacagaggtacgtcctgcctgcaacaagcggcgctgtgagcagctgcggagcacagtgggcatctcctgaggacaacagcagcaacaacaataacagcaggctgggcccggtggctcacacctgtaatcccagcactttgggaggccaaggcaggaggatcgcttgaggcgaggaattcaagaccagcctggccaacataatgaaacacagtgagaccatgtctctctctctgaaaaaaaaaaaaaaagtagtagcaggaaacattcacgaggcacctagaatgttctagaaccttctaagctctttccacacactagcccactggtctgcagacagcccttgaaggcgaggactgccatggccccatcttacaggtaagacaccagaggcacagagaggttaggtgatttgcccaaggccacacagccatgtgagaggcagccgttgggccttggtttcctctcttgtaagggcaccagccagagccggtgctataatagaatgagccgggtgaggacttgagagcttgcaaagcactttcccttcctgcctcattcccttctccaacaagcccagaggcacagtgcatacatggtgtgggtgttgttagccctgttttgacaagaagaaaatggaggcacagagaggttgggtgatttgcccaaggccacacagccagcaagaggctgccagcgtctgcctggtgccttctctcctagaagtgcactgttctggccaccaggcactctccttcagctgccagggggctgagaggaacacccgcgaccctgcatccattcactcagcatgccgaggctgtgcggctatggtccccgccagaggcagtggcatatggccagggtccagtgtaactgtggatgggtcaccccctgttgcggccggcccttctgcgcccaggctgggggtccccctcactgccatgtcccctgcacaggccttcgtgatctccttcacgtctgacttcatcccgcgcctggtgtacctctacatgtacagtaagaacgggaccatgcacggcttcgtcaaccacaccctctcctccttcaacgtcagtgacttccagaacggcacggcccccaatgaccccctggacctgggctacgaggtgcagatctgcaggtactgctctctgctcccctctttgaaaagccacgtttattgggtttctgggagagcctgggtttggacggggctcaaatcaggagcaagtcatgaaacaacgcaaacttgcttaaaaagaagaagaaggaaaaaaaaaaaggctggtgcagtggctcacacccgtcatcccagcactttgggagggccaggcaggaggatcacttgagctcaggagttagagaccagcctgagccacatagtgagacctcatctctacaaaaaattttttaaatagccgggcgttgtggcactcacctgtagttctagctactcgggaggctgaggtgggaggatcaattgagcctaggaatttgaggctgcagtgagctatgatcgcaccactgcactccagcctgggcaacagagtgagaccctatctataaagaaataaacaaatgcctaaggggaggaaattagaggtgatttaccagttcctgtaactaagaagcccaggatagcttcaggcatggctggatccaggagctacagtttgccatcaggctccactctggcactgcctctccactttgatttcctctgtgttgcattgttctcttgctgatgaaaaggatccctagcagctcctggcttcaatcctttctgctctgcagcccctgtgggaagaccttctgtttcccaatagtcagtgaaaatccagggactgagtcttactgccccatcttgggtcagatgtccattcttgaaccaaccactattgccatgaggaggggggctctccttggcttggcctgggtcatgtgccagggtgtgaggtcacagagaatgggggggtcctagggaaaactggggtgctatgacttgaagaagaggagacagatgctagcaggcaaagccttgagcacagaataaagaggaacgagctggtgcgtgtggcttctgacactgggaggacagggctgcttgttcccatgggaaagcaggttgtgcaacttctgcctggcccagcagctggcaccagagccgtggcccagcctgatcctatctcaggagttggcagctcagtgctgaataggccctcggagactcccatccagctccctccagaaatcaagctccgtaggcaagggccctatctgttgtgcaccgccccccaccccggaattctccatccctggggtggggtctggcacatagtagttggtcaataaatgcttgtgacataagtaagtgagggaatgcccagactgaggcccagagaggtcaagtgattgcccaggggacacacagcaaggtggtagtcggagtgggcgagcaccagggatgtgggtccaggccagggctgtgcctgcaaatccaggtggcccttctcctagcctccccgactgacctcaggttttagtgaccaacaggggcacaaacggcccctgagcccctggaaatcctgcccctcatgggggcattttctgtccagctttgggaagcttttccaatgcagggtggggacgtcagctccattcaagctatgttccagctgatgtgtggcatcccccagattcagggagctgtggagggagggaggccctaggcagagacctcaccctgcccccacagaccctgggcatctctgggtctctgtgaaaagaggaaggggctggggagaactggagcacgggcagtggtcatgaatggggcaagcctccttcctgaggctccaatcatatccacgaagagccaaggtcagtggcaggaccttggggagaggggtgtgagtgagcttgactctccaagcaggagatcagtcagctacatctaaagctggtaatgagaaccaggggcagttccttcaagataaggaggtgaggaccaagcagcaaccctggaggaggaaaagcagccccagacccgggtagggcagggcgggccaggccggctgcctgacacgcctctgcctgcaccagcggaatgcttagcttcgttctttcgcaaatgtttgataaactgcttaagttactttgataaaatgttcagggtattgttttgctgtgttttttggttgttgtttggtttgctttttttagagacggtctcactttgtggcccaggctgaagagcagtggcgtgatcaaagctcactgcaacctcaacctcccgggctcaggtgatcctcccacctcagcctcccgagtagctgggaatacaggcgtgcactgccaggcccggctaatttttgtattttttgcagagacagggttttactgtgtggcccagactgatctctaactcctcagcctgagattacagtgctgaggttacaggcacgagccaccacacctggctaataaagtgctcagaggtttttctttggtagattccctcaaagaggggatggactggaggggtgtttcatggaacccattctgaagttctgtggagcatgggcgttgggttgaggttcaggaggttcaagcttagggaacccccccgacttcaaccaagtaggctctgcactcttggggcctattggagtttccagtgagaccttttgggaacaaaggctccactgcttttaaaagtttgcaacctcctggaccacatggtccccacccttgattctgtgagcccacggctgggcctggggatacttcctgccacatgtgttttacatgaagcccgtcaggtcctgcctggcccatgggggatcctgaccaaccccctccactgtggagagagactccgtgggtgcggggccatgggctgctcgcccaagagagggctgccctcccggaggcagccgcacaccaagctgagcctctcccaggcgtccctcgagctgcctgactccagccagagcctgagccccaccgaagtcccaccctcgactccaccacggtcttttgcaggtataaagactaccgagagccgccgtggtcggaaaacaagtacgacatctccaaggacttctgggccgtcctggcagcccggctggcgtttgtcatcgtcttccaggtgcggtgggtccctctttgtttccggtttgaagatgggagcatttagggaccatcctgtgcctacagtctggaagtcaggagctgctaaagccaggggttcagagactcctccagaggcttggagaacttgctctgggacacccgaggaggggacttggccgaccccaggccccctgcactgacagggcccaagacaacctcatgagagaggaaggccaatagaggggccggatgagcaccggcagaagggttctgactcgctggtgggtttaatccagtagaagtgtctttattgaaagagacaggggccaggcacagtggctcacacctgtaatcccagcactttgggagaccgaggcaggtggatcacctgaggtcaggagttcaagaccagcctggccaacatggtgaaaccctgtctctactaaaaatatcaaaaattagccgggtgtggtggtgcacacctgtaatcccagctactcaggaggctgaggcaagagaatcacttgaacccaggaggcagaggttgcagtgagccgagatcgtgccactacactccagcttgagcaacaagagtgaaactccatctcaaaaaagagagagagagaaaagaaggagaaggagaggaggaggaggaggacgaggagggggagggaggaaggaaggaaggaaggaaggaaggaaggaaggaaggaaggaagaaagacatggagaaaggggaccccacctctgtccctctcattctcacaccatgtctgtggtagcaggcagagtcaggacagacaggagggcagtgggctgtcagatgaccccagctgcagccagcagccaggggacccagccccagctggcccagtctctagggaggggtctgggccaactctctgaggccagagggactcccagtggagcgggaccccaggctagggtgccagctgtgcaccggcagctgaggtcccagagaggcagtatcctgggctgtgggcaccgccaagattctgctcgcaggtgtccctctagtctcgattaagtcgatgctaggaaggcagtgggccaagggctctgattctggaatccccaagactgggttcaagtcccagttctgtcacagggcaggcccttccactcctctaagctcagtggccccatccatcagcttttcacagcaagcagtgcaaaaggtgtgtggggctgggttccgcagaccagagcctgagagcccagcaaggaggggtctcggccagagacagcccagccttatcccaagggagccccggagcaggcatggcaccccagacctggcctcacctggaggcaaggcagcccctagatggaccagtcactgctttgggctgaccaggctgggaagagggagatgggatggggcataagttctgcagctgcgagcgtgagcagccaaccccagccccagctggggactgggagcaccaaccaggagaagacaccaatccagggggcaccagcaccgcccgtggcgggaacctgctcagccgggggtgctcacacgtgcttgctggacagatgttcagcaaacaagaagattccgtttttccataaaaactgacttatgttgccttctatccaccagaaatgtctccgtggaggtggtagatgttcagggagaccctgggacgctttgcaaactgtaaaagtttgatccatttgtggctatttccagtttcatgtttttccccaaaggctcgatgctcgttagatttggcgatgtgtgatccatcaggtcacttcctgagtctcctgatcaaagaattcagaatgactcagatgattttcccaattactgagttcagatttgttcgagaaagtcggccaacatttcccagaggcctgccgggtggttctatgcctcctttatagcttctggaaaactgaggcccagggaggtcaatgggccaggaggtggtggggtggcactccaccagatgggggccaggcagagaggtcaggagcacttccccaggcgccatcctcccttctgccacgcgttgcctctccttccagaacctggtcatgttcatgagcgactttgtggactgggtcatcccggacatccccaaggacatcagccagcagatccacaaggagaaggtgctcatggtggagctgttcatgcgggaggagcaagacaagcagcagctgctggaaacctggatggagaaggagcggcagaaggacgagccgccgtgcaaccaccacaacaccaaagcctgcccagacagcctcggcagcccagcccccagccatgcctaccacgggggcgtcctgtagctatgccagcggggctgggcaggccagccgggcatcctgaccgatgggcaccctctcccagggcaggcggcttcccgctcccaccagggcccggtgggtcctgggttttctgcaaacatggaggaccactttctgataggacattttcctttcttctttctgttttctttcccttgtttttgcacaaagccattatgcagggaatattttttaatctgtagtattcaagatgaatcaaaatgatggctggtaatacggcaataaggtagcaaaggcaggtgctttgcagaaagaatgcttggaaacttgagtctccctagaggtgaaaagtgagcagaggcccgtagaaaccctcctctgaatcctcctaattccttaagatagatgcaaaatggtaagccgaggcatcgcgcaaaagctggtgcgatgcttcagggaaaatggaaaacccacgcaagaataatgattgattccggttccaaaaggtgtcacctacctgtttcagaaaagttagactttccatcgccttttccttccatcagttgagtggctgagagagaagtgcctcatccctgagccacacagggggcgtgggagcatcccagttatccctggaaagctagaaggggacagaggtgtccctgattaagcaggaaacagcacccttggcgtccccagcaggctccccactgtcagccacacacctgcccccatcacaccaagccgacctcagagttgttcatcttccttatgggacaaaaccggttgaccagaaaatgggcagagagagatgacctcggaagcatttccacagatggtgtcagggtttcaagaagtcttagggcttccaggggtcccctggaagctttagaatatttatgggttttttttcaaatatcaattatatggtagattgaggattttttttctgtagctcaaaggtggagggagtttattagttaaccaaatatcgttgagaggaatttaaaatactgttactaccaaagatttttattaataaaggcttatattttggtaacacttctctatatttttactcacaggaatgtcactgttggacaattattttaaaagtgtataaaaccaagtctcataaatgatatgagtgatctaaatttgcagcaatgatactaaacaactctctgaaatttctcaagcaccaagagaaacatcattttagcaaaggccaggaggaaaaatagaaataaatttgtcttgaagatctcattgatgtgatgttacattccctttaatctgccaactgtggtcaaagttcataggtgtcgtacatttccattatttgctaaaatcatgcaatctgatgcttctcttttctcttgtacagtaagtagtttgaagtgggttttgtatataaatactgtattaaaaattaggcaattaccaaaaatccttttatggaaaccatttttttaaaaagtgaatgtacacaaatccacagaggactgtggctggacattcatctaaataaatttgaatatacga

SEQ ID NO: 255 - DNA, 268098 bp, Homo sapiens
tttggaaggcagacatgtggcccatctctgtagccatcactgagaaatctggattttcaaggtaagtgcagatgacttaggtttggggagacatgaatgaaagtgctatagaaataaagcacacttaatttgttggcatagtcctaattcagaatcttcaaatggttctgctctaaaaagcaagcttattctctgaccacaactcctcctttatagaaagaattgttctattcttactgcttaggatatgctgctctgaaagtaaaacctaatatttatgggtaaatgtgaacaaaaatgatttcagaatctctctgtcaaaaaaccagctaaacatatcatagaattttttagagcagttggcactattgaatttgtgtataattattcaaatgcttatcttttaagtgatgtcttaatttccttttgttatgaaaatcctttaactctattactgcattattttcagatagagtttgaaactattcaggcagccctagtcaatagaaggaaacaatctgtaagcaatcaagtacttagaaatttctaaaagaagtatattcaaaataacatgtgaaataatggtaattataattctttccatcccacttttaaagtactacttaacaggaaggatctgaaaataacttcttaaataagataaataaaaagaacaacatctgttcaaataattttactttaagtaaaatactttctataccagtattttctacttccaagaagtaatatttttcaaatatgtggaatgaaatataatgcaaagtttttaaacaataagtcagtaatgcctaacctgaatataggcatttaattttgtttcttttacaaatttgttatatgacttttgataggtcacttaattctctggacttcagcgttctacataactgcacaattacttatctgagaaattacttattaagtactccagaattacatgtctttgttttctgttttattgggtttaaatcagttaattaggattttaatcagtcaatagaagtaatgggaagaccaatggatgaggaatcaggtggtgtgaattctagtcctctgttttctagtaattggctgcataatttgggggaatattgtctaaggattccagaccaggggttggcaaactttttctacaaaagccttgatagtaaatattttaggctttgcaagccaagaggtagaactgaggctaatatattggtacttacataaccatttaaaactataaaaaccattcgtagctcacaggctgtataaaaacaagaagtgagccagctttggcttaggtgacacaattttccaactattcttctagcaatgattttcaacaattataaaatggaagttgtagactggataagagatgctcagctaagggagttcctggatggtctttagattgatacaccaatcctctgaaattgcatgcaaaaatgtaagtgtgtgtttttcttttcttccttttgtgcgtgtgtgtgtttctctccctccctccttccttcctgcctgcctgcctgcctgcctgcctgccttcctgccttcttccctccctccctccctccatctctctctctctttctctctttctttcttcagggcctttctctctgttgcccaggctggagtttagcgactcaatcatggctcactgactgcagcatcgacctccggggctcaagtgatcctttcatctcagcctcctcagtagctgagactacaggtacttgccaccacacctggctaattaattaatttttttttttaaatagagacagggtcttgctcatgttgcccaggttagtctcaaactcctgggcacaagtgatcctcctgccttggcttttcagagtactgggataacaaacatgagccactgtgcctggcagcacttttttttttttttttttttttttaaataagaaaaacacggattgattttcaaagtggtccaaaatccattgtagttaaggaccacaggtctagctaatttctaaaagtgctttccaaatttaaaatcaatgagcctgtgaaatgtttactggtgtctactatgggtaagccattgtgctagcactataagagacgtagcatgttgtgactaaaataatgtgttaaatatattgttaaataatatgttaaaaaatatatttttgggacagggcctcgctctgtctccaaggcaggagtgcagtggcacaatcacagctcactgaagccttcacctcctggaatcaagtggtcctctcacttcagccttccgaatagctgggagtgcaggtgtgagccaccctgcctgccttttttttttttttttttctttagagagggggtctcactatgttgccaaggctggtctcaaatccctgggctcaagcagtcttcctgactcagactcagactaaaaatattttaaagaagttagaatatgtgcaagtctgtgctgtctttcaaagtaataacattgaaaacaattttcaattgatcaaagatttctgagacattgctttgcaaagtgttttcaaagctagttcatacgttataccaaagtattttccaaattatgttattgtcccatcttattttgaatgacaatgttattattcgtgacagtcataatcaaacttaatctaagcatagtctgtttcctaaaaacataatttccttaagggcaggaactatgcctttgctacctttatattttagaacagggtttgacccataataagtacccagcatctttggaatggttatatgagtgaataagtgaatgaaatgatgaaggtattatcatggagattacgtaccatagatagtgaaggcttggaactccagatggtctaaaagcagtagttgctaagtccaaagatggcttctcttttcaaaattggatgtaactgtgatttcaaaataattggccaactcaatattgcagttcctgatgattaagtcactttttaaaaagagtgaaatttgtggaatttaattaacataggagagagaaatactttttacaaggttgctagtaacctactctctgggatggcgtgagtggagagtgaaattttgttaatgaaaagcattgccatcagcatctgagcccctcgtgtcctgagactgggtagaagatagtatcagctggaacatcatgcataactggtagcttttctgggaaatccaaaagtcaagtctggtagaatttagggcaccactctgctccctgataaagaagttcagactgagctccactgcctgcccaattgatgatgtcagtcggagcactgtttcctgggaatttcccacagctacccagggcaggggaataacttgtgatcaatcaaattgtagctctgttctcactccaggaacaattccactaaaggaaatccaatctataatatctagtatatgattcattcacttcttagggaaatttaagatttaaaatgttgagaaatggtaatgaaaaacctgagtagctttgtatatagttggtgtcatgcctgagacatccttattcaaaaaagtgcctctcacctctactcttgtcatcctctcatctcagaagctgttaggaaatagaaatatactatttgctttgggatacaattatacagtgagcctgtgcagtatcactctatattaaatagcaccattttcttcacacatttagcagttctactgaggacatattcccggatctccttaaggattgagataagtcccaaatataatccaaagaccacatgcttcatgaatgggagctcgaatatgtcttatgatccaaggtctcacttggatgtggcaggaagcttagtcccctctctgaggatttctgagactccctgggcagtgcttgcatgttctacaaattcaagactggtagcacacactcctctcgcttcgactgctgtcccaagctccattttcagatgacccctgcacttccctggaaggctttactccaaaacgtggtcaagaccccttccattccctctcaaacacaagtaaacttaaatctgtgacaaagctatttttggagcaaactttttcttaaaggaccagatcataaatattttagattttgtgagccaaacaatctctgttgcaacgatacaacttacaattgcaatgtgaatgcaaccacagacgatgcataaataaataagcttggctgtgatcagataaaaactgtgtttacaaaaacgagtggccagcccatgggatgtactttgctggcccatgaactatattgaatgcttcgtgtcaacttttaaaaactactatgtagtaggctgggcgcggtgactcacgcctgtgatcccagcactttgggaggtgggtggatcacctgaggtcaggagttcgagaccagcctggccaatatggtgaacccccgtctctactaaaaatacaaaaattggctggggcatggtggtacacgcctgtaatcccagctactcagggggctgaggcaggagaatcacttaaacccaggaggcagaggttgcagtgagccaagattgcaccattccacttcaacctgggcaacaagagcaaaactccatttgagaaaataaataaataaataaataaataaaattacaatgtagtaaaaagagatataaaactgacagttagagaatgccttccagaggtatcagcacttcccttcctggaggtgtccatcattcattttagccctggcctgaggccatgctactgagacgcactcatccttcctggccagaagtcctctctcctccttgccttcacttccacaatttcaggttcttctccgcacaggttaagccccagctagggatgtgaaaaacaagttcatgtcatagtcatctgacaagaggaaggcccattgaatagaaatgtggtccatggaggtcggaagcatctctgaaactaccagtagcacttaccttccattaataccactaaagggcttatcaaaattttcctttcttgactaaagagagagtctgccataaagacaattcttttcccctttcttttaaaaattattattatggtaaagtatataaaatttaccattttaaatattttaccagatagcttagtggcttaaatacattcagtttgttgtgcaaccaggactacaactcatttccagaagtttttcgttatcccagactaaaactctttactcattaaacagttactccccattctttccttctctcaggcccctggtaatcttatgaagctatgatgaaatttatcaaatgctttttctgaatctattgagatgattacatggcttttgtctttcattctattgatgtgatatgtcagatttgtcgatttgcatatgtcaaactatccttctatccttaggataaatcccttttggtcatggtgaataatctttttaatgtgctgccagattccatttactagtattttgttgaggatttttgcatctgtgctcatcagggatataggcctataattttcttttttggttgtatccttgtctggttttggaaacaggttaatgctggccttgtagaatgagcttaaaagactttccttctcttcaattttatggaagagtttgaaaagaaatagtattagttattttctgaatgtttggtagggttcagcagcaaagtcatgaggtcttgggcttttctttgatgggagacttttttaaaattatggattcagttttattattaataattggtctattcagagtttttgtttcttcttgagtcagtcttggtagggtgtatgtgtccatgaatttatccatttttgctaggttttccaacttgttggtgtacagttgttcatggtagtcttcagtgatcctttttttttaaaatttctgtgctattaattgtacagtctcttttcatttctgattttatttatttgggtattttctcttttattcttggttagtttagataatcatttgtcaatttcatttatattttcaaacagttaagtttttgtttcatttctcttgttattttttttcagtttcaatttcatttatttctgctccgatcgttattatttctttccttcttctaatttggggtttgttttgtttttgtttttctagtccctagagatacattgtttatttgaaatctttctactttttcgatgtaggcatttatttttacaaacatctctcttaatactgcttttgctgtgctccataaattttggaattttaggtttctattttcatttatttcaagaaattttaagatatccttcttaatttcttcatgaccaattggtcattcaggagcatgtttttttgtttgtttgtttttgtttttgtttttaatttccatgcatttttacggttttgaacatttctcttgtaatatactttggatgtcccctccgaatctcatgttaagatgtaattcccggcgttagaggtgagacctggtgggaggtgtttgggtcgtgggagcagatccctcacggcttggtgctgtcctcctgatagcgagagggttttcgcaagatccactcatttaagtgtgtagcacttcccctgtcctttcccctttcacagtgcgacgtgcctgctcttgctttgccttccacagtgagtaaaatcttcctgaggtctccccagaagcagatactggcactatgcttactgtagagcctgcagagccatgagccaaataaacctcttttcttataaattacccagtctccgatattttttatagcaatacaagagcaacctaatacactcttgttattcatttctagattatttcatcgtggtaagaaaagatatttgatattatttcaattcttttaaatgtgttgaggattgttttgtggcctaacatgtaacctatcctgaagaatgtttcatgtgttgatgaaaaaaaaaaaagtgtattctgcagccgctagatgaaatgttctgtaaatatcagttaggtatatttcatccaaagtgcagcttaaatccaatatttctttgtttattttcgctctatatcatttggccatgctgagaacaaagtgttgaagtctcctgtgttactgtattgtagtctatctctccctttagattcaattacatttgttttatgtatctatgtgctctggtgttgggtcatatatatttgcaattggtgtgttctctttctgaattgatcctttttatcattgtatgatgaccttctttgtatctttttagaattttgattaaaatctcttttatctgtataagtatagttactcctgctcacgtttggtttctgtttacatggaatatcttttttcatctcttcacttctagtctatctgtattattacaggtgaagtaagtttattgtgaacagcatatagttgggtccttttttttttttttttttaacctagttacccagtctatatccttttttttttttttttttttttttgagacagagtctcgctctgctgcccaggctggagtgcagtggcgccatcttggctcactgcaacctctgcctcccgggttcaagtcagtctatatcttttaagtggagaatttaatccatttacattcaaggttattatttataggtgaagacttactcctgttattttgttaattgttttattgtagttttgtatgttctttgttcttttttcctctcttattgtttagtattgtggtttgatgattttctgtagtataaagtttgattattttctgtttctcctttgtgtatctgctgtacaagttagttttatgcttttgcatgttttcgtgatgattgtcgttttgctttagatgtaggactcccttgagcattttttggtaaggctggtgagtggtagtaaattctcttagtttttctttgtctgggaaagatgtttttatctccatttctgaaagatagcttttctgggtgtagtcttgagtggagttttttccccccctttaacactttgaatatgtcatcccattctctcctggcctgttagatttctcttaagaaatgtgttgttaatctaacggggattcctttagagtgactttatactttttattgctgttttaagaattctcgctgtctttgacttcttttttttgtgtgggctgaattgcatgctgtttttctttctttttttattacactttaagttctgtgatacatgtgcagaacatgcaagtttgttacatagatatgcatgtgccatggtggtttgctgcacccattgacctgttatctatattaggtatttctcctaacgctatccctcccctagctccccatcccccaacagcccccagtgtgtgatgttcccctccctgtgtccatgtgttctcattgttcaactcccacttatgagtgagaacatgcagtgtttggttttctgttcctctgttagtttgctgagaatgatggtttcaagcttcatccatatccctgcaaaaaacatgaacgcatccttttttatggctgcatagtattccatggtgtatatgtgccacattttctttatccagtctatcatttatgggcatttgggttggatccaagtctttgctattgtgaatagtgcagcaataaacatacatgtacatgtgtctttatagtagaatgatttataatcctttgggtatatacccagtaatgagattgctgggtcaaatggcatttctggttctagatccttgaggaatcaccacacctgtcttccacaatggttgaaataatttacactcctaccaacagtgtaaaagcatacgtatttctccatatcctctccagcatctgttgtttcctggctttttaatgatactattctaactggcgtgggatggtatctcattgtggttttgatttgcatttctctaatgaccagtgatgatgagctttttttcatatgtttgatggccacataaatgtcttcttttgagaagtctttgttcatatcctttgcccactttttgatggggttgtttgttttttcttgtaaatttgtttgagttccttgtaaattctggatataagccctttgtcagatggatagattgcaaaaattttctcccattctgaaggttgtcttttcactctgatgacagttgttttatttttttgctgcgcagaagctctttagtttaattagatcctatttttcaattttggtttttgttgccattgcttttggtgttttagtcatgaagcctttgcccatgcctatgtcctgaatagtattgcctaggttttcttctagggtttttatggttttaggctttatatttaagtctttaaccatcttgagttaatttttgtataaggtgtaaggaaggggtccagtttcagttttctgcatatggctagccagttttcccaacaccacttattaaatagggaatcctttcctcattgtttgtttttgttaggtttgtcaaagatcagatgattgtagatatgcggcattatttctgaggcctctgttctgttccattggtctatatgtctgttttggtaccagtatcatgctgttttggttactgtagccttgtagtatagtttgaagtcaggtagcatgatgcctccagctttgtactttttgcttaggattgtcttggttatatgggcttgaggagtcacatacggctgtgtttctgtaaactgaaccaataggcctcagtggcaacttgggacaaaggggatgaagcaccttgtagtggtgagtctagaccctgggatggtggggcttagcagcatcccagacttgtgagagcaggtacagtggcagcaagtaccccagaatggtggggcacagctgttggggccctgggggagcatgaagcagcacaacaatgactctactccctgggaagaggggtatctcagtagttcagactctagggggctagtccaactccagggaagcagaatactggagttgttttgcctgtaaatgtggggtgtctcagctcagccactgctgtttcccttggatgtagggtgtcatgtcagttcagccttagatgtgcagcttcttagcttgaagtctgtaaagacaaagttcccaaggggcaatgagccacttcagccagtcctggaaggcatgactagtctggatgacccgggcaccatttccttgggatatagggcactgtttcggcttaggtgctgcagggtatgaccacttcagacagtcaaggcaccatttcctgggaggcaggttgttgcttcaacttagactttggtgaggtatgactgctttgggcagccaaggaactgtttccctgggatgtcaggcatagcttcagctctgaaacctgtgtcagggcacagtagtaactggaagggatgagaagcagtgtgcaacttcagtattggtcctgtgggacaggtgcagcagcaagtgggaggggcttttggagcagctctgccggggcactgtttacttgggaggcaatgcacagccttggcttaggcccctcagggcagggtgcagcagcaactgggagaagtatatgaagcaacttcaccaaggcaccatttccccaggaaaggttgtgcaacttgagctcaggccccaaggggcagggcgcagcaacaactggagaggtagatggagctgttctgctgaagaactgttttcctagcagggagcgtgcagctgcaggtcagaccctgtcttagtccatttgtgttgcaatgaaggaatattgaggctgggtagtttataaagaagattggtttatttagctcatggttctgcagcctgtacaagaaacatggcaggtgtgcagatcacatggcaagagaggaagcaagagagatggggaaagtgccaggctctttttaacaaccagctctcagggaaattctcacaggaattaatagagcaagaattcacttattaccatgaggagagcaccaagccattcatgagggatccacccccatgaccttagcacctcctgtttggcctggattccaacattgtggatcaaatttcaacattaggcttggagggtcaaatatccaaactacagctctatcctaaggctagagctcagtgactgggaagggtagataaaggaattccactaaggcaccattttcccagcaggcagtgtacagcctcagcttagggccctgaaggcagggcacagccacgactgggagatgtatatggagctgttctgccaaagcaaggtttccctaggagggattgcacagcttcagctttagctccaggcaagggggcagatggaggagcaggtagagtggttccactgctgcttggtctccagggaagggtgtaacagctgctcacagctcaacttggggatttcaggccacagaatgggggtggttctgtggcagcttaacttcagggatgaagaggcacccatagctccatgcccctggagcaagacacactccaacatagttccagttccaaaatggcataacacagtagccatgcaggccactgggggtgggacactgtgtccactcctctgctaagagcacagctgtgtggactccaggcagctccctcagctcaacttaatgcctgtgaggactgtagagacccactggcaaggtctgtagatgtccaaagtgtggatgatgttggctagggttctcttgctcacctttctgacaatgggagaaattcctcctggctcccagctgatcctgggtgggggatgggatgtaggagtccttgtgtttccttccgttctctatgtgggtatcctaagtttccgtgttcactcaggtttctattacttcttttaggaactccgccactctgctttagccttttttattaaaatgtagttatttattcattgttttgtctgtctttgtggtgaggacatgtgctaggggcttctagtcagccatctttctgtcactcagctatactttctctttaaacacttatgtagtgtttgaatttaaaaatgtatattgacaagccaacatgccgtgttgtcactgtgtggcggtggaggttatcccctgattatctctattctactttcagtctctataaatttgacaattttaggtcccttgtataaatgaaattacataatatttgttcttttccttaaagataaattcttgcatctgttcttggaatcacatgaaaaaataagttacccatataccttggcctccagccacctctggtttggaagtacagacaattccccatataaacaatggttgacttataagtttgcaactttataatagtgtgaaagcaatactcagtagaaaacagactctgaatcttgagttttgcttaaaaatcatttataataacgttattataaaatagctttgtgttagatgattttgcccaactgtaggttaatggatgtcttctaagcatatttaaagtagttgaggctaagctatgatgtttggtaggtgaggtatgttaaatacactttcaatttaatggtattttcaacttacgatgagtttttagagacaaaacccctttgaaaattgaggagcatccatattggaatcttgtctaagaataccctgctatgtgtttttcatgcattaccgcccactgtcctccacctgttgctcctgcaaacatatattgtcaattcccttctttggaatgttatgctctatgcctggcattcaaccacctcattttcctcagcgcgacttgttattcagcccagcacaaggaccactgatgtgcacatatggaattgttctcatttctctgtgtcatctagtataatggcactcatatagcacatctatgctgccttacaaagataattttagtttaggtttaatcttattatttggttgtaatctccttgtagaacaggatccagtctttatgctatgtgatggccttgcttaaaattttggcatgagatgcaataatgttttaaaaagttaaacaatcgtcacattaatttgatgcctactctctctctcctctccccagtcacccttcatactcatttcagatgcagtaaatttgacacaaacatatataggttttcttagttgcgttttctggaaaaaattttaatagtaaaatagaaatgattttacctaatttatctttataataccatagatagatagagagtgagagagacagagagattcaaagatatttttataacccatgcattccaggagactataattagttagaaggacacaatttatatatgtaaaactaatgccaagatcagaagactttctgaaaatctatacttgtaaaatgctttatgatttataaagaggaggtagaagtaataattcttattttactgtttttttttcccagatacttaattacgagaaattacaagttaagcgtcaaattttcttcacaggaacagatctaaaacaggccaattcggagacatttgcagaaaaacagagtgattagataatctttgttagcataaatggaaaaagaacattgagtaaatatcattaaccaaatgactgagtgggtagttagttttgtagctagttttctagaatatgtcctaatacaattaaagtttattttaaaaactttaaagccttataatacaaatggaaaaatcaaggctcaaggtcacctagccagtcaggagagtgaattttgacttccagctctaagtgtgtctcagcagcctccatgctcaggcatgagttacggatgtggaccctgaatgctgtggtggtttaggaaggagggagatcagtgaaggtggcgagatcagaaggttgactcttcactgagtctcaatgtacaaatggcatttggataaacaacaagaaaattgacactcaggcacattaaggcagtgattctcaaagtgggtttgtttcagaatcacctgaaccacttatcagcaccagtctctccacaaattctaatccagtggtctgagaagaggctctgggcacgagggatttgattaatctctttaggtgattatgaaggctagtggttaggagcctggttatctctcatcttgtatagtaagtgccaataccaaggacataactaacagccgatctgagggcttaagtttaagagaaggaggaatagagaagtttctaagatattcagagacaccctgtgcatcctggcccccgtgcctggcagcatgggatacatacaggaggcttatgccacagggtgaaatataggctagtaagtttattccttattgcctagactttctttataaaaaccgtgatgattctctctgctattgagtactttaaagaaacaagcacacctgccatattccagatgcatggccttggtcagcttcatcaagcctcagcttctcatgtaagtaaaaggaagagagtgatatctaactcaaatgaaaattgtgaggatcaaaagtaataatgtgtgaaaaatgcctaggacagagcattattcaaaattattacccttcttccctcctaccaccatggtacagtttttagtttttataacatctataaataaaaacaaactatcctgtctcactattccatcagtcaacgattttcagccaaaggccacgagaacctgtgtgtagggcttatgactcattgcggggaggggaaacacacgccatggggaatcttgaggcaacttagtaagggagtattagaaacagtctgtggaaggatttgggttttggttgggtaactggggatttgctatgtattggatgctgtcagaaagcagggacaactttatgattaggtaaagaaatgtcagtcactaattttaaccagaaaagggggtatttggtattttatgggtggcccaatgaccttgtttttgtctgtgcttagacaaaattttgcaatagacttgttttgtaccactttgtcatggccttagagtgatcttacttgagctgctctctttttttaatttctcacatctgaaataaaagaaaatgtaggagcaaagctgatatatatttgaattgtgaaaggtgaagaagtgttgagacactgaatatttgttgagcagtttctgtatcctacgtcaagataaactttgatccttctgagaatgtcacaagtatcttatctacataaggtgggatttgaagccagatctagctgacttttaaccactgaaactcccagtctggtgtgctgtcaccttattgagctgtgctttgggcaccattagagcatgtgaatgaattcctgcctgtctgttgaaatggcctggctttgactttacttataatagaaaacatactttgatccagaatcacggattggcagtttttttttctatgaagaatcagatagtaaatatttgtggttctgtgggccataaagtttgtagtaggactacccaactggcaatgtagtgaaagagtggccatagatcatatgtaaacacataggtgggccaggcatggtggctcacacctgtaatcccagcactttgggaggccgaggcgggtggatcacgaggtcaggagatcaagaccatcctggctaacacggtgaaaccccatttctactaaaaatacaaaaaattagccgggcgtggtggcgggcgcctgtagtcccacctactcgggaggctgaggcaggagaatggtgtgaacccaagaggcggagcttgcagtgagctgagatcgtgccactgcactccagcctgggcaacacagcgagactccgactcaaaaaacaaaacaaaacaaataggtgtagttatgctccagtaaaactttatttataaaatcaggtggcaggtgggattgggccctttggctatagtttgcaaactttttatctagatgataagtaaacaagatcccaaatgaacttggatttttaaaaatgtattgaacacatttaaagttgctttgaataagtaaatatgtgtaataaatataaatatgagcaaatataaatgttgtgaggttttgttttttcaggggtttatttatttacttatttttaaaaatgcttatttccaaacacgacagagaatcagcatggggcctcatgccatttgctttttccatctgtatagtgacaactggatcttgtgaggccaaagtggttattgaatagcttttctgtccttcagtctatcaggcaccatacttggcccttccttttattattccttaaatgataactcttgtttgctaaactgaagcttggagagggtgaacaatttgtcctcagtcatccagatattgtggtagagctggtgctgaaactcacactttttccactataccttatccctcaatttttacaaattattcaattgatgttctgggccaaaagaagatcttggattatcttctgaatcatcgaactaaaatgatgtgatcagattgaatttagtgcagagtgtattttgttacattttacttttttgaaaaattaggattagaggctaaatgtggaaatcacaattcagtaccatagtgttgaaggtcattgcatattgagcctcagcatgctaatttcctttttatagattcttctttcggcaaagcatagcataataaccccacctgaaaaccaagattatctaccgccaccatgtcagattgtctccactgtagcttgatggtagaaagatgaggtaaggcatatcatgagagagattcactgtgaacctcctctaccacatgctatgccactgatctcaggcaaaaggaattttcaactagaatctcctattctgtaaatgtggaaaacaaatacaaacatatataggtaactggtacggtacattgttatgattttatgtttatagtcaaataacatacaaatgatatttttcatgcaaattaattaaaacaacctcctagtcatacaatttatacattcatttataccatatacccagctcctacatatttctatggataaatatggaagatatcccaacattatcacaagtatattatatatgtaagatgaaatttgaagccagatcttcaaatcttcaaatctttaatatcgccactaaacagtattctcttttagaagagtccaacctatatttttctcctactaccagcctagtaaactcacctgccccaggaaattgtgtctgattaacctgagcgtggatgctttattcttccagtctagacaggatttgcatccttagcttatgctgaaaagtgatcatataccccattgtacatggaactatgtcattgtggtaggacattattatagtgaacatactcctagtagttccatttgcaaacttggggacaatacatcttatgattcgttgtgatttggcaaagaaaagtcttccaagtgcttcaaatggaatatagaagaaaatgtatgattatttttcctaagtctctttctttctccagtacctcattgtacattcatttacgaaaatagtaataactattaataataggaaatataaatcataatagaaaaatggtcatccatgtatttctgactttaatgtttgagtgggttgttgggagaggaatggagggagacttgcttcatgacccagggaaaggcctttgagaagcaccactagatctcagctcaattctgtcttctgttctatttcacttcctatgcagacttgccagatttagaaaatgaaaacatgggactcccagtaaaatttgaatttcagattaatggtaaatatttttttagtacaactatgttccaaatattgcatggggtatttatacaaaataatcatttgttgtttgcctgaatttcaaatttaactggttatcctgcattttatctgtcaaccctacacacaaatccttaaggctctgagttttcatgtggagagttttctcattcagtggaattgtacttaattttctgcacaaccacacataagcctttagaaaacttgcttaacctgcagctaataattcatatcgtagagttgtcatgaggattaaatggagaaaatgcaaataaatctaggttcaggttaggattcagcagctgctcgaaaatcattaggtaaatgtttattttcttttttcctctcaaacttatttcaatgctttcctaacctttccaggaagaataaggagctcctcccttttccctttcaacaggctgtacttctttctgttgcagcaacctacatggtttaaggcttgttttgtaataatgacatagacataccaatttctttcttgtttggtttgtgttttgtcagacataactttttaagatttttttctttcaaaactttccaagtcatcttatttaaaacatgtctaaataatggccttctaagtaatttttagacataaagtctgattttaaaaatctcatttttaactgtagagtttggtacacaaattatatattgataaaatgtacatctatttctgccttttagttttttgtttactatttgtcaatattgttttaggttttatttttctctcctttcttcttcccttttccctccttttctcccttcctcccttctgtctttttttccttccttcctttcctccttccttcatttcttttttaatcaagtaaacttttttcttcttcacttcgtttttttacctttactagttcggaagatatacactctatttttactcttttattgctgtcaaatacaaattttcacattagtttaagaaaacggaagttaaataatcttactttcttctcaaacaatacacatatctcggaacacatagacagaaagtccccccaggagtggggagggatagcactgggagatatacctaatgctagatgacgagttagtgggtgcagcacaccagcatggcacatgtatacatatgtaactaacctgcacaatgtgcacatgtaccctaaaacttaaagtataataaaaaataaataaataaataaataaaaataaaaaaataaaaaaataaaaaattaaaacccagttcaattcaaaaaaaaaaataaataaaataaaaattaaaaaaaaaagtccccccaaagtcatataatattgttgcctagtattttagtattttctagtattttaaactgataaatcagatattgttgattcatataaaatatgtttacccacatatttacagtgttttgaggtaacatttcttcctttattatttgattttccttcctgtgtaactttcattgtttttcaaatgtatcctccatatgtacctttagtaagggtaaaccggtagtattatctttcaattttcatttgtataaaaggtctttattttgctcacattcttcaaagaattttactgtgtacacattgtaggttgattattattttcactcatttttttaaagatagtagtcgactgtcttcctgcttccactgccacttttaagaagctgtttgtctgtgtagaggattttttttagtggtctgtcttctctaattggctgcctttaatatcagcttctttttccttagtattctgtggtttcactatgctgtgtctaggtatgatttctttttattcaccctgcttaagaacttttggccttactgaatctgatgattgatgtttttcatcaattctggaaatttctcagctattatctctcaaaaaaactgccttcacttggctctctttatcttctactctggaacaaatttaacctccatgtgacttcctttttgtaattttcatttttcttacaggaacatagcatagttgctaagaaacagaattgaatccaaactctgggttgaaatgatgcctttaactcttagttggtatataaattcaagaaagtttcttaagctttctgtgcctcagttccctcagttctaaaatggagggagcaatagtatctacttcataggattgttgtaaagattgcaagatgaaatatgtgtaaagtgctaagaagcttgcacagtgtatttgctcttattttctttttgtgttgcattctgagcaatttttttcatctctattatatggttcaccaatttttattttctctttctggttctattagtatatttttcactttcaaaaatacaactttcgaaaagtaatttttggttatttttcaaaatgcctatacattttaaaaaatcacttacttttaatatattacattattttatatatgtacgtttgcattggcatttgctattgctagttaccttctgccagatacccagaaaccctgggccatttcaaactaaattttcaacatgggattttttgagacccactgatagtatagattcctttgtccaaactctgacaaagctgtcttatggttatgaatttttgtggggagaatatattttttcttttccacccaaagctaaaactaggacaagtaagtagactgtgtctttctctggagttgatttttttttttccaagtgttttccttttcttaggttgtagctttgtgtgtgtgttagtctgttctcatgctgctatgaagaaacacctgagactggttaatttataaaggaaagaagtttaattaactcacagttccgcatggctggggaggcctcaggagacttacaatcgtggcagaaggcacctcttcacagggtggcaggagagagaatgagacccagtaggggaaatgccagatgcttataaaaccatcagatcttgtgagaactcactcactatcatgggaacagcatgggggaaaccacccccatgattcaattacctcccactgagtccctcccatgacacatggggattgtagggattacagttcaagatgagatttgaatggggacacagctaaatcatatcagtgtggtcgagtccaatctgactttacaccttatatggggcccaggctttgtccctgttgtgctgtgtatatgggtctgttaacaggaaagatctaagtctccagcattgatgaataacttcagagctgcctctgcttttatactcatttactcgcttacctttcttgatttatgtattatgaaattattcttttctactaagactttctacttatttttaactcatccatgagtttttaaaagatgtttaaaaaatgatttttcgcattttagggtactttccactgtgaaccgaggtcaacactaactgactctgcctcaaattccacatcagagttattgctatgtgctcagtgacaagcccaatacttagtatgcaatagccactctaataatacttattaaatgaataaatatatgtatagttgaatgtaaccctggtattatttagatatttctctaaaaacccaaggaaagcttactttgatattgaagacaattaaaatatgttaaatttaaaacattctattaaagctctgaacagaatgcaggcctcaatctgcaactttaggaatttttactgacttcagatgggcagtccacaattcatgtgtttgctcttttgaagaatattctgccatagaaaataatactctaaatgttggtttgatcaccagactaaatggtaaaacctatatcactgataaattatttacatcacagcataaatacatctagagaatgtattctccatttataatattatttctataacctcagtagagaaaggaaattctggggactgcgatatatcagttggattctggcttatgctaattgtctgaaggaaagtacatctgcaaatctagggtttttacattggaaattgcttgctggcctcttctcaatatgttgagaaaacatattgagggcaagaaataaagtgagttctctgacttggtaaacctgatttgaagtgacaatgagatgggggtctgagggaaaagataccaaagcctgaggctgaaaattcaaatttgcaattaagaaaatggttttcattctgggatgcctattgaaaatatttggagagcaataaaaaatatagacagctatacggtattcccataagtgagaaccacgtgtcactattttgcaaaagcttcccaggcaattctatagggcagccacagttgatgcatcaatccggatgccatgagaaaactgaaaccactccaggtatttgaaacaggaaggggtctaatgtagggaatcagaggctgcgacagcactgaacgggctgagagaggaaagaccagaaaaagctgctgctcctgttccagaaatcaggaaatgcgagaatctttggaaactaccactaaagagggcagctgctttgctccaatgagggtggtttagaagaagcctgagacccactggcgaactacaggtcttcttcctccagaagctctcgggcctgcatggtgtttacacacacacaaaaataatggcttctcttcagttctacctgcaggtgtcacagtaacagctcttattattcatggcgtctaacgctaacctttgtggccagggactctacggatgcatagaagggacaagatggtgcaagtctgtcaatagattgagaaatacttggagagcatttaaaaaccagattgagaatcactggtttgggatagatgaacttccaaaattcagagcactgttgtactctgttgttttagtgaactttaaacagcaaaatatttgtaaaagcatttatccagattcaagaagaaggcttgaggtttaacactcccagtgaagagcttttttccaccctgcagatttctgtgagtaccaggaggaagtgggaatatcttccctgaccccccaccatagttccttccgctcatctggaagcgttaaagaattcacaaatcaatggcaaaaataacttttaagaggattctagccaaacaaaggccacacttggcagaggctcagctgaacctagtactcaaatggagaggtttcatgatgggtgtcatgaaaatgtgactatacaaaaggaaaatgtgttgataccaaagttcacatcctttgttctccatatcattgcctctctatatgcaagtgacagcgtgaattttgtaggacgctttttcacatacattttcttttcatataaatcgtaatgattgaccagagacccttgcaaatagcctgggcatggacaaaggaaaataagaactgccccttcttgagatggtggctttccctcttctctctcctgagagcaaccacccacccagctggtacgttttcttctcttccacgcccactgcctcttcctctttccctttccctccagagcttccctgaccctcttctcctcccctttacctccttcctgttaaaaagtgtctggtggtggagccagacagaactgtagtcagagccttgtgggatttctcaggggcagggtaacctcaggtcctgaacctcccagaacgtctacataataatagaatgtttacttcttgccaagacaattctaagtatttttaaatttagtgctgagaatggtaatttgcacatagtttgtaccttacaagtagataccgttattaccattatccccattttatcaatgtaggcttagagaggtcaaacaacttgctcaatttcagatagctaatattcaaatcaagtggtatatatcccactgtactctgagcttccctgattgtaacatttttatgactctagttgtggcattataatttatgaaggtcattgatgaactacagtgtccaaatatcctggccctctgaggaaggtactgaaaaccatactatctttatcactctcatcaacaataagcatttatcaagtgtacactctatgccaagtcttatgatgtgttttataagtacaaaaactttatgaaacgggtaacattataatcaccccaatttacagataaggaaaataaattatggagacattaagtaaattgcccaagatggcccagctagtaaataataaaggcaagattttagagccaacgcttatagtcatatactacactagaaactttagttacttgcctgaacaagaaaggatgacaggacacagaggaagatggaggttgggagcaaagagagaaaataggaatattcagttgacaaggaaataccagctagagaggaaaaacaattacattgcaatgctacgacagggtttttctcgggaggcagatttctgcacaatgtgataaaggactttccagcaactatttttaacaacaccacagactgcctctcaaaacagagtgtgaatattttgaccttggaaattttcagatgctaaagaaatttcctaaattgaagagaacattggagtgtatatgacctctaagctagtatgtgacctctcagatgctttggatatagaagttagctcattgaaaccgtcacagcagcctgacagatgtaatgataaaattttataagtggccatactgaagcatgatgaggacatgtggttgaatccaggtaaatgactaatctagtcattgagctcagctcagaatctggtcttgtgagcatttctagtcttgccagcatttctttcatactgcctcttgacaaattgctggcaaaaaaaaaaaaaaaaaaaaaaaaacgcaaaagctggccaaaagcagcctgcatttgaattaagcagagagttgttcttgaatttattttttgtactaggaagacacatttcttcctctatgctttagaagaagtactggaatggtggtgtcccaataaggtgccatgttcagagagtggtgaaagctaaagctgaccttataagacctgggaaaaatgagtacgcatcctgtctgagagcaataatatcatgctgtacatacagtaaagtcaggggtttcctctgggaagaggcacataactccaagaaactcaagagggaaatcagggtgacatttataggatactgacctcgtacagacagggtcctttcatgcataactattagcttcattatgtaagagccacctagagtgtagaagagcaataaggtatcaaagctcaaatgctttccttaaagcacccatttaaataagtcataggggctaccatttttacaacatttcatagattacaatgtgtgttcaggtttgacatctcactcaagccttctcaacattttacattcaaagcgaactgcgtatgtaaaggcttatgaaggttttttcatatgtaatatctcatttatgtgctaaatgactctgaaatggaggtattattaaactatatttttaattaagccgagtaaaattatatatatatccacaagctatagcacctattttgagtgcatctaagactgttttgtttctgtcattaggcaactaagaaatataggataattttgcatggtgaaggtatattagaaaagcatatgaaaatagtcttattattattgcagaaaaatgagagatcatcgtacacagaaagaaataaaaattattcatgatccacctgcccaaagcagcaatgcttaaatatttggtacagttacttccaataaataaatatatttggattatttggtaaagatcatagtgtgcatacagggttgtcttctttatcacagaaattttctattttatttaatattcttagtaaacatcattttaatggcatagtagattatgtgagtggagcataatttacttaacttattgttaacaaatctcttgcatatagtatatgtattttgtacctattgctggtatccctcttcataattcctagaagagggattaccaccccaaagagcatgattgctattagtgatcttgccacatatggccaaagtgacttttagaaagtagtaccaagctcagctctaatgagcaacatcaccttgccttgccagcattgaagattgtcacaatattttaattcaccaattttatagattaaaagatattgttgttttaattttcactttgcatggtcactttacgttgtccacacaacttattaaagacatggataaaagaaatccctgtaaaaggcagcttaactggatgtttccctccaatggcaaagtgactctcaatgggccaaggtaagtactcaagggtgagggaggcttgggtattgcatacaagagctgggatcacagcagcagggactaaaggatgtctgttgtttgtcaacttgcctctctttcttccactttgagtatttttcattgcatgaacagttgccaaatgcctgccgggttccctgcacgcccgcagtaagcattctctcacagcatggattctctgttcatgaagctctctctgcaaagagtaaaacaagaatgggttgcaagtagagaaactgagagtacgtgatgacctggaggatgccccacaggcaacatttccttttgaggcattgagtttagtcatctcactcttcataatagaaaatggaagtagaactatcttttgttattgtttggattttttttcttttgggtattttttttctgcccttactcttttgttcttagattactaatttaaaaatgttattatggaaaatttgaaatctgtagcacagtagagagcaataaaccccatgtacccattactcagctacatgcaactacatagactccatgcaaggctgccctgagtgatttactctgtctcccctccaaccctgcagctacataattttgaagaaaatcccagaaatcccagatgtaatatcatttatccataaatattttggtatatatctctacaagatggtttttgaaaaacctatcatcttgcccaaaaattctttaaaattgccaaatagccaactactgttcagattttcctgattgcctcatatttttacagttgatttcttgaattgggttccacacaagatctgtatcttgcatttgttgatttgttgttgtactcactttaataagtataaataaatggtacttttagtgggaaatggtatttaaataaatgcccacagtctgagtgccagggacgcttattgcaactctgatggttattatttctggacagagctagaaagtaataggagggtatttttattttacacacaatattttgattgctatttacttatttatataacagtacaacattttttctctcctgagtatcagagttctgtatcttcttagttaaatactcagtgtgattactgtaactgatagtgttttaggttcttttgggtgagaatagggatgacttaccatgtgacctggctttcaaaatcttcctttatactctgcaacatcaatgaatcaaaaagaaaataaagcaagtggagagactgatgttacttaaattaaaatcacagaatcacagagctacgggggtctactgaaatcattctagttgatctcttcattttgtagagagatacactaaggctggaaaggtgacttgctcaaggtgatctaaatcaatggttctcaaaatttaatatgaccaggaatcatctggaggccttcttaaaacccaattgctgagcctcaccccagagactctgtttcaacaggtctgggtggggccctggtgatgctgatgctgccagtgcactgactgatttagtggcactaatccatctacgtgttgcctaaataacagctaacgggagcatcttcttggctacagccctgctaaagtagagatgaactcactttgagctacatgggagtaagtgtggaaaaatcaagtcatggggcaggagcaggtgaattgtgggttgaccaggctgttttctacctgatgtgacagatagagaagactcagctgcctcactactactgggggttgtcaatttttcatcataggttcattcctttgagataactcctccttttaaaaatcaaatccttaagaaagattctccctctccagacgaatttaagccactgatctcaatgtaagcctgttgcaaacactgctaggtatctttatgtgaatctcctaattggaggcaacctttctctgaaatcccacagcctttgcctgtatccctctcttgtccctgagtacttcctactgcatctgtttagacattcttgaacaggcagtgatctagatacctaggttatgccagaggtgcaagttttaaactccagacaaaagagtacactgattcgctcgagtaacggcttccaggtttaatttgttgcagccagagtgctggaggtttagaaaactcagtcctgtctgtatggtaaaaatagatgacagatgccctcaaagtcaggggagataccttcatttcataacaattcaggaatctaagtccaggaagcacctttaggattttaaagttgctagaagctttgtaactctccctgggtatttgagtttctcatctcccgttacttgattaacagggaaatatgaaaatccaaaaggcagatcccagggagacagaatctgctctagagagaagtcccaagggggagagtgggtgggggcatccctgggatactgagaaactggctggcctttggtacacagcaagagagaagcaatcaaattcccacctgtgatccccttgataacagtgactattcacctccatatctcctgggctggcctgaatcggtggtatatggtatagggaggaggacccaagaattaagggacccagggtgtgtatgtctgagggctgggtgggtcaagtaataaagaggatgaaagaaacaaagacaaggagggtaataaagtgatcagtgttgcctactgaatattgcttctgtttggactaatgatgctagactgatatttactcctcacactacctgcccctctgtttctccaggtaatacctcaggtcaagaacaccaggtcatgaatcaaaggccttttgtttttaagcacacctgatacctgaaagatgagaaacagtggctgcccttctggtggcaatgcatgagcagatggggacaataattttaaaataagatacataagatgcctctgaagaacattgtgtttagttagctactgccagcaaaatgccacctaataagtttatcccaagactcaatagcacaaaagagcaatcatttatccttatggacctgtgtattggccgagggtcagccagttggtcaaggctgagtttggtggctctgcagagctcagctgggcctgcttccatgtctggtgtctgctgactctagctgggctgtcctggatgatttcacttgcttcatgtgtcttcatcttcctcttaaaaccaggggctagcccagcatgtttttctcatggtaatgatagaggcataggggaatgtacagaaacaccatctcttaatgccagagccacaagctagcacattgtgacttccactttggtctatgggccaaagcaagtcacctggccaaacacagggtcaagagggccagaagtacattatgctcctacagtggaagaaactgcaaagttatatgtcaggaaatgttcatataggcagtgcatgaagaattgggcaaatagtgtccctaacacaaatatataccatgtgttatcaattaagtgaaatacatgtaagaaaatttagataaaataccattagattctgatgctaattttttattgttattttttattttcttagagatctcattatgttacccaggctggtctcaaactcctgggctcaagcaatccttctaccttggcctctcaaagtgctgcagttacagatgtgagccactgtgcctggcctgatgttaatttataatgctttcctatgaataaactgttaaaacactttagtcaatgtatccaaatctgattggtgttattcagaattattttgcttctctgtgtatagattcttctaattcttttctgtgttcctcatgcttccaaagctatacttgtctgccttgaatggtattactcaattaaaattctcagactctatatctgcaattgttctgccactttaaagatactatgtctttaaagttgctgtgaaaaagcctccagttcattctgcagaatacccatcagttatatatttacgtgactgagacgttatttctctcctgtgtaattttagttgccacatattgagaaccttctaatggaagaatctacactaaatcctttatatctgtttgtcatctcctttaaaccttacaacaatactgcagtattgattgagcaatccccattatgtaaacaaaactgaactcaggaagattaaatacattgcttaaggatgaaatggtaataagatcagaattcacatagtttggtttggctatgaagccaatggtttttctattatttttcacttatctttttttttttcatcatgtcccgtcctcttacccatatacttgagtttttagatttttctctgagatgtagtaaagaatgtttgggtggcaagtgttagtgccatctctttttattctcttgagagcctgtgagtgtggaaacacgtgttattattatcctctgtaaagctgcagggactagtactttgaagtgaagagatttacagggactgggatgcagactctgtatatttttctcttctcttatttcaattactatgtttaatcatggtaatcgaaggtgtgagagtctataattttgctactggaactagccagtgaacttggacctaaagaactatatttctttatacagttctggaagagtttgggaataataatagcatgggtgttcttcacattgcaataacatagaaataagatggcagaggatagttactatgcagccatacggcccactaggttctagagtattgggtttataaaaggatttttgaataacttgggactcttgttactagtggtcgtttacctaacttcttggacaatttaagttaaagaataacccaaaaagaagtcaaactaatttcaatttatctaaataaccttgaagaaagccaattgaaatttcttcccttccattgtcctcactttccaatgaatatgttttactgtaaagatatggtccaaaaacatgtttatttttcttcatgttgttttcatatgccattcgtgtagcaagcactgttacgccatggcagttactttgatgtgtggaaacaggatgtaagctattatgttctttgcaatggcttcccattcatctgtgtctcaagcattaggagtttcaaaaaaccctatgagtcctgatttgggttagttttatcttcatgaaagttagaaaatagcatttcttttctggatattatttgtctttatcctgaattctgcaaaacatgttataacaagaattgttggctattaatatatgttactggttttaaagttttttatttattattaacaagaattgttggctattgatatatgttagtggttttaaagttttttatttattatttatcttatttgattgtgttttagagacagagtctcactctgttgcccaggctggagtgcagtggcatgatcacagcgcactgcagccttgaactccttaggctcaagcacttcacctgcctcagcctcctgagtatctgggactataggtgtgagccaccaaacgtgtctaattcttgtttacaatttatttctgtagagaaaggatcttactatgttgcccaggccagtctggaactcctggccttgggcaatcctcccacctcggcctcccaaagtgctggggaccactgtgcccagtctattttctcctttaaatagtgttttttttcctcctttaaaaaaaaccaaacctttagatgaggaggaaaaggaaaggaaacatgatgtttatggagtgattgttcagcatccagtcttacgctgggtgctttacttagtttatcgcaatgttagttccatattacagatgaagaaacaatggcattttgataatgcaaactgcatagatctctaatttagcttttttggttgtcaggctttgatgggttcaaaatttgataggaaattttgtttgtttcctttcatattaaaacactgttcttctaccagatccctagaagactgtggccagcaggtattagcgtcaggaggtgagtattagtttaaatattgacctctgttatgttaataacatggtggcagcatttgtaggccgccaatgcacacattccactacctaaaacaagagaatttgcctttgacacccttcctgaaacgagtcctgaaattcattctgattaaaccaccataagccttatgtgcagcccaaactagtaattgtgattaggggtgaggcgggggtgaaatgcactactccatttaacatagcccaagtcaagaatcccatccttggagttgagacagagtcaacttttcagaatgacgtggatcttgaaatggaagtggcaggctttgaggaaggcagacagacatgggagtctgggagccaggcaaacccagctgtccacaacatcatttattctttcaaagacgcatctagagagcacgcttgctaagaacggtgggagaaactgacaagaattagacatagttcctgtccaggctgcctataatttattatggagagggaggagctaaattaataactataatcaaaacctgaaatgctgtgacataaaagtggcaactacctattagagtgagaaggagaattactttttggtacaaataatggaaaattttcaaagggggtgaaagatttcttagagctagaaggggtacttaggaattttttttaactctgtgtgatatgatgctgagagaaactgggacacagggagagtaagacttgttagggaataagatagacataaagatgaggagaggtaatgcccagggttttagtagaaaatatagggctccaaagaacaaaaattacccaatttcactgttttacttgggatcagtttttccaataagtgtggtcaaaaaatcagaagtgtgtggacaaaagtataatttcttgttggctgaaaaatggtaacttctatattctttgttgagttagctgtttgctcagggaaccagtgtattgcaaagtatattttctgtcagcttatctgattccttcttaagaatttctatctctgaataaagtttcaactgtatttgtttacttatatctcttttgctttaaaagaagacacaaaatacctgagctttcagctaagttttcaactcaaattctttgtttctaggtattaaggggagggttttcctttacagattggagatggataaagtgcctgccaaggggctgagggtgttgtgagcatttaaaagggctcagctctatgtaagcttcccaggaagataggtgagaggtcctctatctaagagcctcaaatttacaggatggatatgatcaaaagagaatcaagccatgtccaaaccatgggtgcatctgaggacagataggccttgctaattatgtgtgtcttccactaaggtgaaaatttgcttcatttcctaaatacataatagacactatgagggaatgtggttcagaaaatatgcatgagggcttgcgagaagaagaatgaaaagctgttttcaaagctacaaaaggaaagctcagtttctttcttctacatttaaagtaggtggcctaaaactgaaccaataaaagataattgcaaatatatttcttattgaaatctccctttcccccaaaggttaagaggattgaggacatttctgaaaaaggaggagtagatagtcaaaatctaggtggaggttgtgtatttgctgattgatgcatttcagaccataatggagaagaccactttgttcattaacaaacgtttccatatcagtgcctgccttttgtggctcatgctgtccatccctgacattttctgccccctctttctttctctcaccccccttgttgtgtactaaatcctttctgcctttaagtgtcactccaaaaccagcttcctgcatgaagccttctcagattcccccttctcccagtttggcttgttctcccacaacaatgctctgatgcactatcttattttaccttcatgaatttctacaacatgcatctgtctccttcactaaattataagctccttgagggcaggactgctcttcttttactgtgtgtccctccttcgttactgaacaatctttatacatctcttgggcaaacacatatatcttaaatctgattgtttacattgctcatgagtataattgttaaatataattgtgtgataaatgtaccaggaagtggatcccctggtctaattgccttgcgaagtattctttcttctctctggggtgaaataagtcaattatattgaaagttagaattgttaaaaagtttataactagtaagggtgattagaagccctaaattcagcaaatgttcagcaaagtatttggtgtttactaggtatctagtatcatgctagtgatgaactaaatagtcactctcagcaccctcatggggactatagtctagtgaggaaaatggtcaattcatatgcgaattagcaaatagattcacagatagacattgtataagtgctataaagaaattaaacagttccagtgatttgagaggctgatgtgagaggatcacttgaggccagacgttcaaggccacctgggcaacataacaagactccatctgtacaaaaactacaaaaattagcaggcatggtggcgtgtgcctgtaatcctagctactctagctacttgagaggctgtgacaggaggattgcttgatcccaggagttcgaggctacagtgagctatgaaccactgcactccagcctgggaaacaaagtgagactctgtctcgaaggaaggaagaaaggaaggaaggaaggaaggaaggaaggaaggaaagaaagaaggaagggattctagaaaagaaggtttagagaaaatgtgggttagaaagtcatttctgctgatgagcttgatttaagacaaattgagctatcctcatttatggagatgcatgaaaaagccactggttggcaaaggaaacaacatttgccctgagcataaatgagagagaaactgatactagagccctgtctacatccacttaacaattgctcttctgagatcacaagggtgatagagcctatgtagatctccctggctcattgaaccttaaccaagggcttctgttaggctttgaatgcacaccagcgacatagaactgaagatgcagtatcttaagcagggctcacatttgttttattttaggcttccctgataagttgtgtgtgcgtgtatatgtgttgcagggtgggggatagggttggagggcattatggaggcaagaagaataagctttcttgcctgtgcgtgaagagtttcaccagacgatttcagctttctcctgtgacctgggaaagctgtgatgtggagcatggccagtttatacttaaaaatgtccacacagttctggttggttctgccatgccagaatcaaaggttggacccggaaacaaatgcctttggctgcttggtaaccagcactatcacaagacagttgtgttgattgagcctaaggtggaagtctgtgtgagctatgagaggtggtaagatatgactgcaaaagccagggctttgtcaaatcatacactcttgggattagtcatcttgtctgaccatcagactcagtgataagtttttgtatcttgcaagttttcaatttggcaagaagtttcctgataatgcttggatatctgcatctcttcttccttcatccagcattgatggttagtagcttcttctaaccattctaacatggatctcatcttgtatttaataattgacagatgggtcctctcccatcttatatggaggatcaaaatgattctagcaacttagttcctttcctcaaaaatattgacactcacctttgccacacacgtctgcgaattatgagttattgttgtaagggactaaactgtctaatcttagagttcgccttggccatatttagaatgtacagttcataggcagctgagcagaaaaccagaaaaagggggctgagaattaggtgagaaactgaggaaatgagtgaaattagtgattctccacccagtcaggaatttttttttgaaaaacattccttcgactcctgtgagatacagcagggaatgagcttattggaagagatgagggaatgagagtgtgaggaggagcttgaatccttccagagatcccattagaaataaggcaaggatgggggagccagggcagcctttggaaatggggagcagcaggaataatggggaaagcagcccccagagagtgtcagggccagcctggaaccagcctctgaaggggtgaccagtcttggagggttactggtcaaagaggaacatctaaactactgccagggcaacgacatgaaagaaaagggttccagggtgtcgggagattgatggggttcaggaaggcttgggactcagcagggcctgggaggtgaaccaggagttgggcagaaggcaggcagagaaaaggtgtgccatgactcaagcctggcactttcaaaagagggcctgccccaggcactcatcctgggttcacagggcacagggcggcaggcacttagagataccagaccctggtgcccatcaatggctttacatggcccaccttgggctaggtcttcctggagctgagcatgtgaattgagcacaccataataatctctgagtgtagtttccagtttcaacaaaagcagagagttaagtacttaagagttcaaaaaggaaaagaaattaggccggcaccatggctcatgcctgtaatcccagcactttgggaggccgaagcagatggatcacaaggtcaggagatcgagaccatcctggctaacatggtgaaaccccttctctactaaaatacaaaaaaattagccaggggtggtggtgggcacctgtactcccagctactcaggaggctgaggcaggagaatggcgtgaacccggaaggcggagcttgcagtgagctgagattgcgccactgcactccaggctgggcaaaagccagactccgtctcaaaaaaaaaaaaaaaaaagagaaattaagaaaagggttcagaaccctctctgggatacattaaatttggggaattaaatttttagtgcagttttatttttctcttacattgcaatctgatgaactgcttttcaaacatttattggctttagagaacttgagtaggcctgttttaattacttctccaagtcctcttctagtattctaattaactgcttttcaataccctgataattggtcatagagatacaaacaatacagttgaaaaacaaggaccaattgtctaggggaatccacagctccgaaggagagcagggatggagcagtgaagaaatgtcactttttctcttttttcataggaaagggacttctgtgttgctgtgaccctgtgatgtgctgcagaacatttaggcttcagagtcaaacagcctgggtctccaatttcagggctgtcatttgttagttgagtgaacccagaaagttgcttaacttttccgagcttcatttcttcaactaatatttggaataaaagtacccttgtcctggatttcttgggaggattataagtatcatataagaaatttccatcttagtgccaggaactgaagaggcactcaggacctggtgacaaaagttatcaatacattatgctacaatagatgtgcccgttattggtgaaaaggcataaacctagaggtacctggggctgaagacagagtaagggttatcttggacagattggcctggttaatgtctcagtagctttgatttaagaaaggtcttctctgaacggctttccctttggtggtgtggtgttttccatccatagatgttggttacttctacagatgaaatgcccattagaaacatgcccaacgtgtcctaaaattattttccattcttggtcctccctagattttttgttggcgtggcagctgaacttgttggcagattatattgggctccaagacaaaggttgacaatttctccacgtctctgtttgggtgtaaagtggagacacaatttttagaacttctgggagagtcttctctcactgtcagcctagactgtggaggcctgaaagtatggtgtctgtctcagggggcaatgggttacttgaaggatatattttatccacagccttttttgtcttgttcatttcagaattttgcctacaagtatatttcacctacagtgaataaagattaatggttgattgaagtcatctggataacatattggaaaacttcttgacaggaatagtttaaattagaaagcagaaataaacttttgactttaaggaaatatttcatgtctgtcaacataaagcaacttggcactattaatctatatccacaaatactttcatgtcatatgaccacttttttattggacaccaccttctggaaaaatctaaaatatgtaaaacactaaattcacaaaagtgattgtcctagagttatttataacaataagttagaaacataacatcattgaaaatttgattaaatcactttggagacatccacttgatgagatgttatacggtcgtataaaagtgcacggaaacaggtcaggcatgctggcttgcatctgcagtcccagctacttgggaggttgaggcaggaggatgacttgaggccaggagcttgagaccagcctaagcactatagtaaggttccctctcttaaaaaaaaaaaaaagccgggcacagtagctcacccctctaatcccagcactttgggaggccaaggtgggcagatcacttgaggtcaggagttcgagactagcctggccaacatggtgaaaccccgtctctactaaaaatacaaaaattagctgagcatggttgcaggtgcctgtaatcccagctgcttgggaggttgatgcaggaaaattgcttgaacccaggaggtggaggttgcagtgagccaacttatgccactgcactccagcctgggtgacagagccagactccatctcaaaaaaaaaaaaaaaaaagttcagaaactccaaggctaagtactttggtattatacattactagcaaaaaacatggtttgaaaattgaggtgcaatattatcactatctaacaatctaacacagatgcatagaaagatattagcagaaaatacactaatattttaaaaagtggaaaaattctgttctaatttttctttttcctttccttccttccttccttccttccttccttccttccttccttccttccttccttccttctttctttctttcttttttttttttgacagagtctcagtctgttgcccaggttggagtacagtggtatcttgtaccacttggctcattataacctctgcctcctgggttcaagtgattctcttgcctcagcatcctgagtagctgggactacaggagtgtgttaccacacctggctaatttttgtatttttagtacagacgggatttcaccatgttggccatgctcatcttgagctcctaacctcaggtgatccacccacctcggcctcccaaagtgcctggattatagacatgagccaccgtgcctggcctaagagtccagaaatgcctaatttttctttagtgccttttagttgcctctttttttattaatataaaaaataccagaaacactgagaaaataaaaagaaataaaaccctagaagttactaggaagaaaaaaaaaaagtgaatggcacggaagatgagcaagcagatagtgaaatgcctgaagtggacatggtgagggagggaggaaactatgatactgggtgaagcacagagtgaatcttgtgaaatggtgatgtgaaaagcagcctcctttagtgatgtcctattcttgctctatcacattttagtgcttcatgggccataaggaggcttggaggcaaggaagttaccagcattgttggataccacgttttgcctgtctgaaggcctcgtcccttacatgtccgtatagacatgtttctctgtcttttgaggttgggtggattaagtaggccagatggtgtgtcaaaggtggcaacaaggctgtagtagcactggacactcaggaatgccaggaacacagtcccccagatttaacagtttctgagaataaagcacagttcctggacaatgaaagatttctttgaagcaaaatttctggtaaggagatggacattcacaaagatcagaattcatagcacatttcaatatctgcagacctacagatctatgcaaggctctccctgggaatggaaagaactcactgacagttccttattttcgagaacatgggtggcagcaggggtgccctgggtgccttgcagagcagtgtggctcactctacacagacacaaagcctctgagtttcagctcccacttcccttgtaggtaaccagaacttgcatcctcacctttagagagtcagcagcaatggtgaactcctcaagtgaggagagaaaggatagctcaaatccagaagcctgctctttggtgaaaaatgatgtctttgatgagtgaggctgcagatctaactttacttgaaactgcctaaaaaatatatatatacatttttttttgctattaaaaaaaccatagaaaacccaagagagtcctttcaaacttcagaaataggatgtacagaggaggaggactgtgagagagagttcgaatatgaacaaagcagggggcaatttttatatgttacttaggcatataaccttctgcagtgaatttctttagagttgatatttcttttttattgtttcccacactgcttcagatattttcagacagatttttttggttttggttttttagctacactgagctcgtccttaatgtgggagctgccatcccagaatcttttctcaatatattttggatgaactgctgcttgagtttccctgagtgagtgattaaagtgactgttcctatttgttttctgcaaacacaacaaactataattcgttctaaggagagctcaaaggcaggaagccatttgtctgctgacaaccttttctcagaacaacctgtgatgcctcttctagctggggctggacatccatcctggctcccaactggtgtccttgaggtggggcctatggggctggacttaaagcatagttctcttgattagaagctgccgtctgtcctgctgggcctctggagtctgcctttagtagtgctgtgtcacaggaatagtcccagactgagacacagaacctggaatttagccagtgacaagccgtgctagctttcaaaggtcgctgtgtgggcctcggtgtcttccttagttaaatgggtgcactggatgctataatctctaggtttcactctgacactaagaatttgtgattttttcttctgattcctggtccaagggttccttctctcctggagatggagacaccatgaccactctcatggatcttttcttcttggaagaaggggtgaatatagagaatgacaaagaaaaagtgagatgacagtgatcagtgttatgaagaacatggcttgggtagggctggttccttgtattgagtggtcaagaatcaagaaggtgaatctgcagtcccatctgttcaaggtgcagcagaaagaagtgaagccagggatggagcggggagcaaggaggaatgagcggccacatcagagggaccaggcctgcgaacttgagcagggtgaggcatccagggctcctggttcctggcacggcatcctcctagtcctctaaccagggagtttcctgctctgcccttgatatgaatgaatgaaggcagtcaccggcagcattgattctctgtcaataattctccccctcctccctcatccccaaggctcagctcagacgcaatttctttctctctttttttgcacaatggctttactgaaatataattcaccaactataaaagtcattcttttttcaaaggacaactttatggttggtgaaccacaattcagtggtttttagtgtagtcacagagtgatagacaaaatttcttctttttgtaggtggaagaaggaacaaattataaattgtgtgatttcagatgtctggacttttcattcttttattttaaaatatgtctatttaccatgtttgctttgtttttttttttccttcctgcctctgttactgctattactgtgttccatttttccttctcataatttgcaagccatacatgcaactttggttcactaattgattgctcttaagttttcatcaagaagttatattcatttttatttctctacacttaaacagtacctttaacctcctccccaccaaaaaatactgagatattcacatacaatttctctcttttatttccctcactgccaccatgtggaaaccaatgggtgttttaatttggtatgaacatgagcattttaggtttaaaatgtgtttcactgcattttgactgtaggaagtgagatcaaaggacagagagcggggaggagggatcacatcctgtaaggcctttcagaccatttccaaatcttgatttgattctgagaaaggtgagaagccattggaggattgagataagaagaatgacatcttctaatttacattctgaaagattactctggttgctgagttgggaataggggagttaggagtaaaaaatgggagaattcatgggcttgctgtaataatcccattaagagttaatgtggctgaatcccagttgttgcaatttaggcaatgaagagttgaccaactctatgtttattttatgtaatttttcataatttttaaatttagaaataattttacacaaaacatttacaatgttagaagaatgataaagagctccaatataaccttcacccagattccccaattgtaatcttttccacattggtttttctctttttgtatatccatattgtaattttttggattgatttgataataaatagaaagcatgctgcctttatccttatagtatgtggtgtatattatataagaacaggatattctcttatacaaccacatacaatggtcaagatcaggaaaataacattgatacaattctattatttaatctgcagactgtgttaatatttggccaattataccagtaatatcctttatagaaaaaatctggcccatggactctatgtggactaatatgagagacaggggataggagttgctgaaggagtggaggtgaattatgggagaaaaagaggaattagggataattgtaagatttttcacgtatgcaaatagaaaatggagttcgtattactagttaaactgcgaggactttgcaaggaagaagtttttgtgtatgtctggggcacagttcagccttggatatactaagtttgagatgtttattatacatcgaagtggatatgctaatttgttctttgtgatttgaaataacatctttatgtgtctaaatctgagtcttttctagtagtttagctcagtgctgggtgggacctttcaacataaacattttatcttttctatgtgtagaaaatgtcctttaattatttatctgagcatttcattctcttttgctgtctccagatgatgttggaacttctattaatagttttgttcttggggttttttagcttttcttttaaatcttccatctcttgaccttttttgcttctatctgtgggagtattctcaaccttcttacaagctcattgattgtgtggtttggtacattttaattaaaataacaactctgagtcttatttcacaccattctcttctctctgaggacattttaaagttacttttttccactttgccctcttagcaaaccaacccatctgttagttcttttgtctgggaaatttggtatccatctaatgtgtcattagctctcctaaaatatccagtgactgttctttgtctttttactgttgaatgtggatgaagttacctgaagcatgtacttttcttttccaagcccagactcttcaatttttgtttaatttgggggcaagctctcctaggtgggtgtcatcttgctccaatccttataatatttaaacttgaataaccctttgccaactatccaatctgttgccaaaacaagctttcaaaattgaaatattaagatgtcatttagtattctaaaattccctgcatccctcataattttcagaataaaattgaaaatccttagagtggcaacatgccgtaaatatgggaatcctcatgtacagattctcacccacgttctcctaatatgtcaaatgttccaggtacatcaaactattggtaattccccgaatgtgcatccaagcctttgcccagaatcttctctttccctggagtgctttatttcctcctctctacatctagaacttcaatgcacccttcaagatccagtaactgctacatatctgtacccaagcatcttttactttattttgatgccttcatcctcaagtacctcttaaataattactgctctttctgaattcttgcagcatttttcacgtacccataggtgtttctgtaaataattgatgtgcctctttctctcctaccaaacaggagatttaaaagcggtgatgtgttttattcatttcagaatctttgctacctactgtacagtagacagttagagtgatatcacttgtttaataaattaagtgagaaatcccaaagtaggttatacttgtttgtctgttttaaaatggtgcagggaggggttctggtgactaaggtctacacgctaatgagcatttggattatttaatgttatttttcagggttctataaattgtgtaggactctcattttgtaggctggtctctgatgttggctctaccataggtttcttataaaacagccacagaaaccacttccatatctcacttttgacattgatgtagtcctcaggccatggacaatgaccactgagacccaagcaaggttgtgggcaaggctttgggaagggggttgataagatacaagggaatagccaccagccaggcctcaggaagacctgaggagctctcttgtgtgtgggatgagatcagaccagaatcacaagagaatcatgcaggcaggatgggagaatcctggtgcaccaggatagggcagaggcttgtttagagctacaaataccagcaaggcctggcctggtatgtcaggtcagctaatatgtcagttcccacagctcccatagacaatgggatgccagggaaagtttttaaaaagagaagtgaaatcattgatgatgcaatttggacttcattctagttgtttagctgtacatttgggtcctagagaaacaagaagcaagctggaggtatgaaagagaacattccaagaatgacaggtaagtctgagtcacagctcgaggctgaaggaagggggttagagaggaggtgtcccttgaaatagaagctgaggccagcttgcaaagggcttacatgtcatggtaggaactcagagttttttcttttctctaacagtaaccaaagaaggattttaagcagagacatgacagagggcaggggaaaatcagagtttgaggccaggcttcatgatgaccttccaaggtcaatcacagaggtaaagaggggatcctcatgtggaacaaggaggtccacagccagccagagaggcagccctgtcccctgagagagctggctctgggtttgcagtttatttctgggatcctgatgtcagttgttggtctagatccaaatgtggccatatccaaaaaatgtttaatccagtcagggcactttttcaccattatttcacccattcagttaacaactcatgaccactatttaaaaattatatgctagttttgaaagaaattcaaagttaaaaacaagtccacaaatgactaaaataattaaaacagagaataagacaacaaaggtaggactgaaaggcacctgtaaagctttttgagaaaggagctgagaatgtcccgggggcctgaagggcttgaaagaaaatgcagtctgtgtttacacctcaaagatgtgcaagactgtgtgagtgggggtaatattttgggaagagaaagcgcaatgaagatatataggtgaaatatctaagtagcatcaacaaataactgttgttaatgttgtttaaaaaacaattccctggcttcttgtatttggaatggattgtctccgtggaagcagaaactacctctctcttaccttctttcaggttttcctgggatcagctgcactccttagcaaaagtatattggagaatcaactgagaaagtaactgagacatttcaatcatttctaggtgtaaagaaagaccagatcccaggaaaatattacggtcagttcaatgcctaagtataacaccagcatcactggctgggaccctcagaacctactctcctattttcccttcatcttcttctcttctttctttttcttattccttttctttgtttccccccttctttctcttctctcttttcctccctcactttcttgatctctcgctctctttcatgaattcactgaatcattgcagaagtacttgacacataccatgttccaaattctgagctacggcacatgctatatttttctacaaaataaagtgtgaggtggatctctaaataataataacaagtgtatctcaaacagtctatcctgggcaccttgtaagcttcagttgttttctcttcaaagtgcctgtgtcccaaagctcaggacaaatttcaaaacctgaacctgaatattaagaaatctaaacatatatcatctaaagctggcatccaggaaaacagagcttttcgtttgatcagagactgcatatttcttacctgcaagtgtttgttttaaccacacttggcaggttctgtatataacacgcgtcaaagccatcagttgcacttgtttttgtgactgcaggtgctggcttgcttgttccagggtcccagggcccggccatggccatggtgtttgtctctcaggcttgtctgtctcatacctggcaggctcactgcttcacagctcactgtgtctctcagacattctcttggctttcccacagtctcagggactgttctaaatagcaagctaatattctgaagtgaggtattggaagcatttctgagaagcatttattatttttgtatgtgctcaattttttagcaatgaagacatttcctttcaaggttgttaagctttgaactttccattttgtgaaaaggctcgaaatttccttcattctttgtgggcatccaactctaacagacacataaattaatagactaggaaatatttaacggtctaagttcaaacaaatatgtttactttggctgaattgatgttgctattaattgctattgaaataaaccactgtacaaagaaatatgccctggaggataaatgtgacactgctaaaattaaaactcaaatgagaattatctgcagattttaatgtttcaaattcaatttggagaattcagttctttaatgtaatactgataaaatcatgttattgatcctgcatactcatctcttctcagggattagagacaggctgttacgagtatgtagcaatcccccttgtacctgcataggtggggaggtgattgtccagctctgctggtcgggcactggatgtagtcatggctgcaagcaagtcatgcacgtggagaacgaggtgtctctctgaaagaaatgtagagagaaaattttaggtcaactaattaaaaattcccatcaatctctagaatagcatcccatatgcaaaggaatactctgtcgcccaggctggagtgcaatggcaggatctcggctcactgcaagctccgcctcccgggttcacgccattctcctgcctcagcctcccgagtagctgggactacaggcgcccgccacaacgcccggctaatttttctttttttttgtatttttagtagagacggggtttcaccgagttagccaggatggtctcaatctcctgacctcgtgatccgcccgcctcggcctcccgaagtgcggggattacaggcgcaaaggaatacttcttatacagatatataatttttttgtcccattaggaaaaaattgtgccccaatcgctttctgtcctttcttactaaatgtgaatcttgaaatgtttattgcttcatggtgttcctccatttggccccatcctagttcttgctttgcttttagatgctggggagccatcttgggagtagggtgcccattacatgagatgaagtggtcttcaaggggacaataagggagtaagtgccttgtagaaagaagcaaagtaaagaggaagagaggtttctttgtttgttttttttatttttatttatttatttattttatttttttattatactttaagttctagggtacatgtgcacaacgtgaaggaagaactttctaacttctccttttctttctctctctctttttttttttttttttgagatggagtctcactctgtcacccaggctggagtgcagtggcgtgatctcggctcactgcaacctctctttttgttattaggttgttgcaaaagtaattgcggtttttgtcattgctttgaatggcaaaaaccgcaattacttttgcaacaacctattacctaggctagagtcagagccccctcaccttgagagtgatgagttgcgagagtctgcccccagcaggcagattgagagagtgcatggtttagcagaaggataattttagctgtagtccatgggacagaatggagatgttgcaatttgatgcagatcatctgaaagtcttgtgcaatgtcctgattaagtgtggacagagcaccataaaaaaggaatttggaagttggaaacatgctgagttcaggcagacataaaaggcagcatctggaaaacctatcaggactcaatttcaggacaagtgatcataggtaggtgggatcatggaacttgacctcaaggttacactataggaacaataaataggttatgaagataatgagcagataaacagcaccaccaaggagtctcagtaatagatatgtaacaaaggagcagagcaggactctttataagagctagatggtcgtaaggagaggattggcacagcagtggttcatgcagaatctcctgagacgcagataaaacttagttctgattgggagaaggttattacaaagcttgaggtggagatgtagtcacaggaaagtagcaagaatatatgggggagctgagacatgaagaggcatttcctagaagggaaaattaggctttaaagtcaggcagatgggtttgcctgggaaacaatcaagagcgctgagtctgagccagggagctggtggggagtgagccaaagtgtgtcaggtaaggcagagaaccaaaaccagatatcaggtgacaagtcaagaatgagtaacatagagtacatgaataggtctgggcggggctgagaagatatggacttggctctatgtgcttggctagctgaatgttttgcagctatatctacaggtgcttttattatcatacagcctggcaaggaatgttattataaacagcttgggtcctaggttttgggatgggaagaagccccagctcctgggaataactgtgatgtcaccataacacatggtgacttgtcccagcaaatggagcagggacgtggatgaggaaaaccacagataagtattacagccaggcagggtggctcacgcttgtaatcccagcactttgggaggctgaggcgggtggatcacctgaggtcaggagttcaagaagagcctggacaaaatggtgaaactccgtctctactataatacaaaaaataagccaggtgtggtggcaggcacctgtaatcccagctactccggaggctgaggcaggagaatcacttgaagccgggaggcggaggttgcggtgagccgagatcccagcactgcactccagcctgggtgacagagtgaaactccatctcaaaaaaaaaaaaaaaaagaaaaaagaaaagaaaaaaaaagtattgctaggattagcatcactgttagttaccattccagttattgcccacttgctagacccctcagaaaaacagaagtttgcaggaattttgcagccaaaaggtgatgtttaaaatattcctagaagattttttccacttcatacgttggatatttatctcataaattaatcaatattggccgagtatcgtgccccatgcctgtaatcccaacattttgggagatcaaggcaggtggatttcttgagccgaggagtttgagaccagcctgggcaacatggtgaaaccctgtctccacaaaaaatacaaaagttaggccaggcgtggtggtgcacacctgtagtcctagctactgggaaggctgaggtgggaggatcacttgagcacaggagatcaaggctgcagtgaaccatgatgatgccactgcactccagcctgggcaacagaacaagactgtcccaactcattaattactcaattaatcaatattaattattatgttgtatattgttttaattttgcataaattatctaatttgtctcataacgactatatgaggtaggtagggcttatccacattttaggtgagagaaataagcctcagagaggttaagtagtttgttcacagtaacactgcaaacagtagtagaagcaagaattgaagtaacgcattgttctcttagctacatgttatgaatatttaattactcttccacttcatatttagagactatcttctatgtgttggctattgctatggataaaagagtggaaaataataaaaacatgcacagtccttgtccttgtggagcttaggagcttacaatctaggggaaagagggaagataccagcaaccagcacccattaacccaagtgattatttaatcacccttgtagaggtgattcttttatcttcagaagaggagaaaagagaaggtcagatagatctcatgtagtgtaggagttctctgacttatcttctgaaagagatcttaccaagtagatcttacctagtatgggagtcagagaaaacttccctaaagaactgatagtagacttaagacctgaaggattagtagatggatggggaggggagagaagaggtgttggtgctaaggcaagaaagagcttgaggcattgagtgaagataaggtgttatggagtgtggctgctgccagcagggattagatgatgcactttaaaatgtacaaataacagtactataacatatttacattataattgaaatttataaaagttagggaactaatctttgtatgttggggaggaagttacctttctcttgttaattcaattaatttcaagactgtaagaatgtattgcactactgaaacattaaaaattgcgttagcttctgcatcttcatgggatggaaggttgatcaactgattagagctcccaccaggaataatccaagaaatcaaataaagtaaaatacagaagttatttgcttgaagacagtggagcacagctgaggcaattagtgaagaggtcatgactcccaaggagagaaaagctcaaagcaacttctttcacaacagtagcttttccaattcagagctgagaatccaaattcttcaccaatgcatgaagacattttgatgaattctgggacttggggggatgggagactaatatcctaagccttaaaacagctgaaaaatatagcaaagatgtcagcagttttataagaccaggatttgaagtcaggccagattcatcagaaaaagtggtcagagataagactattgactgtagctaaaattacaaagggggctaaggagacccagaagtacactaagccttactagaactgcaaacaaggcttgactcaaaataatgttagtatagtggcagaaaggatgacccctctcaaggaaaagaacattacttggaaccactaccttttttaagaaaaatatacagaatttattagtaaattactagacatatcaaaggaaaagattacataatggaaaaccaagagaaaaaaacagataatagaagtatatctataaatgttcttgacgagccttttgaaataactatgattaaagtatttaagaaattaaaggaaaaggtgaagaaaatgaaatagatgagaaaatttcacaaagtagaatgtgtaagaccgacacagcctagaactgaaagtatttcatatctggtattaagaattctagttggtttagcagcagaatagaaacagccaaagataaaagcactgaacaagaatatatccaggccgggcatgatagctcacacctgtaatcccagcactttgggaggctgaggcgggtggatcacttgaggtcaggagtttgagaccagacggaccaacatggtgaaacccgtctctactaaaaatacaaacattagccgggtgtggagacctgtaatcccagttactcgggaggctgaggcaggataattgcttgaacctgggaggcagaggttgcagtgagccaagatcgtgccattgcactccagcctgggtgacagagcaagactctttaaaaaaaaaagaatatatgcaaatggaaaaagggaagaagagatggatgaaatgtatataaaattcagaaaaaattagagacagaaggaaagcagttaaaatgtctaacataactataattgaactttaagaggagataacagattgggacaaagcaatatttggcggggtaaaactgattatttcccaaaagtgacaaaagacattaacctataaatttaagaaccccaaacagtataaacagaggaaaaaaaaaaaaacacccaggcaaaagtgcaaaaaaatctttcttaaaaagaaagaaagaaagaaaaaagacatgcaaccataatagaagcaatggcaatattgacaactgaagtctcaatgatgaaaggcaagagacaatgtaataacatctttaaagtactgaaaggaaatgccaacctcggcttttatgtcttgcaaatatatcctaaaaataaagatgaaatgaaaacattttcagacacacacatacgaaagctgagagaatttatccctaagaaatttgtactgaaagaaatttaaaatggagttcttcagcagaaggaaagttatacccaatggaaacacagaaattcaagaagacataaaaatcaatggataagaaaactaaatggacaaaaataaatgactagggattgaatgttaatgatacaatacaataatattgtgtggggtttaattagatatgtagaaataaaaagcatgaaaactgagaataagggagtgggtaaatggaattaaaatgctctgaatttataacattttaaacaagagtcaaaatttctatttacaacacacacattttaaatgtaataatcataaagattgcaagaaaaagggaaaagatataaagtacacacactaaagaaaagaagcttgagtgtgtcaaaagttgatcttgaggaagaatcattatttgaaataaagaggaaatttcataatgaatatatcacttttattataattcctgtgtttataatgtctttcttaaaacccatgtagctggatcctgtttctttgatacagtataacaacctttattttttaattggactgtttactctatttacatttaatgtaaaatgtgattgaaattatgtgtaatatatcatgttagtatttgaaatccaggattctattacagcagtcccagaggaaccagataaacatactactgtcttgtcaaatggtctaatccaaggttatacaacttgcggcccatgggccacatacagtccaggatggctttgaatgtagcccaacacaaatttgtaaactgtcttaaaacattgtgagatttatttttaactttttttttttagctcattagttattgttagtgtattttctatatggcccaagaaaattcttcttcttccccagtgtggcccagggaagccaaaagattagacacctctggtctaatctgtctgcacattgacatccctcatttggttcacttttacctccaagttttgcaatagtgcaacagactagcagaaactaaggcacatacaagcactctagatgcaaaaagtctgtacagaaaagcagtccagaaagggttcgggtggatattgcgtgaactaacctatgggattgactataagcctagtaaagggaatgggaaagtaagatatccaaaaagagagaaaagcacctttcaagatatgttggcatacagccatgtgagtagaaccaaatttcttcatggcctcctttccttcttgtattacagtttagaaacttggacttaggagattcacaatgcttctccataatatataataatgagttttcgggagtgtatgtgtgctttggacactttggtcaaatgacttatcctgctaggactcagttttgtcatctaaaattcagtataataatacattacacaattaactgttgtaagggttaaattaaataagacaaagtacaggcaaggatgtagtgtagtcctgaaacatcgaagatgtgtttctcatatctggcaacgatcatggcagtttataataagaaagaggacttgggacaagtgatgtgctacttactttactttcatcaattaggagtcaatcctactaggccaatagccaaaggaaatggtgagcagaacctatagtggcacattcattcttgactcacatgtgaacacaatataatttcatgtctccttgataaaactacttttctacaaggaaaaataaaaggcaagtagagagatttcagcctacggatgaaatacacagtgtaacatgagacagctgttgcagagccaacaaaaaaatcatgttcagttaagtgagtcacaattccttaaaatttttttccatgcccacaaatgcaaaaggctttgtgaggttgggttattattatctttttttttttaagtttcattgaggtataagttatatgcaataaaaataaccaattttaagtgtacaattcaatgagctttgatgaataactacaatggtaaccaacatgatataaaacagaaactaatcctttcccccacaacccagatcttgagctatctgatttgctttttgtcacattagttttgcttcttctagaaaaagatatcatacaatatataatcttggtggctggtaccttttatttagtaatgtttctcaactttttgtgtttgttatggtccctctaatgagtatttttccctaattgtctctccccacttaatgaaattttgataccacagatatatctatatgtctatgtactgtgtatacacctgtgctttatacagagtaagatttttttcacacctcaaaatgttttgcccctcacaaggtgctatcaccccattgagaatacatgatttagtgtaatgtgtttgagattcatcagtattgtgtgtatcagaagttggttcattttattgctgggtaatattccattatacaaagagacattcaataaatgaataagaataattgcatatgtgttgcaaaggtcagggagtgagttctttctcaaatcttagtctccctggtgtcagtagacatacctctaataacacaattgttcaagtcagaaatctgagagtatcaagacacttcttttttcctcatttccccatgtcaaatccattaaagcctgccaatttcatctcttgattattgcttgaatcttgtctcaagggatcagattttgccactgtaacccagaacattccagacatgtaaggctatcaatctttatcgtaggagagatgggaagccgttgaagggatttagataggaaactgacatgactttcttagtgaaattaaaagattactaaatcttttacagcaagcaatgaataagaatatggagaatgaattagaaaggactgagagtaattgtggagcggatctttcaggagtccaggggataaatgccagtggctctgtcacgaatttgcaaggcctttgagagtaggagatgagagagttggaagacatgctatatttcagtggggcccatgggaaggcttagcaaggcctcactcactgctagaagataaaataactgtaatgagaaattcaggtaaaccttcctattgcttgctgctctcttgacttagatggtatttttggtcaaattaatcagtattctaaatgaattaagtatgaatattcttgggtcatttgctaataagtaagaaagaattagagaattataatcatgcccgtaagaaaaaaaaattgtatacttcatgaatccatcgatctttctatccatctcacaactttttaaagggttactgtagtactagtatccaagtactagctccagatggtctgcaatcctcctgaagttttatgtaaattgtcttatctacatacatctctctggggggcaacttgaagattcagattcgatttttattcctattaaagagtaagaatcaatggcttactgtgttttaggtctagggtatgcaaacattcataggaaataatcttcattcttaaagcatgtaaagtttatatcatataagcacataaatggcaaagtcacattgtcagtgctgtaaaagagataggaacaaagctctgaaagcttgtcagttactctggtgctttttctcctccaggtgacttcccaagtatgcctggccacaatacctccaggaattcctcttgcgatcctatagtgacaccccacttaatcagcctctacttcatagtgcttattggcgggctggtgggtgtcatttccattcttttcctcctggtgaaaatgaacacccggtcagtgaccaccatggcggtcattaacttggtggtggtccacagcgtttttctgctgacagtgccatttcgcttgacctacctcatcaagaagacttggatgtttgggctgcccttctgcaaatttgtgagtgccatgctgcacatccacatgtacctcacgttcctattctatgtggtgatcctggtcaccagatacctcatcttcttcaagtgcaaagacaaagtggaattctacagaaaactgcatgctgtggctgccagtgctggcatgtggacgctggtgattgtcattgtggtacccctggttgtctcccggtatggaatccatgaggaatacaatgaggagcactgttttaaatttcacaaagagcttgcttacacatatgtgaaaatcatcaactatatgatagtcatttttgtcatagccgttgctgtgattctgttggtcttccaggtcttcatcattatgttgatggtgcagaagctacgccactctttactatcccaccaggagttctgggctcagctgaaaaacctattttttataggggtcatccttgtttgtttccttccctaccagttctttaggatctattacttgaatgttgtgacgcattccaatgcctgtaacagcaaggttgcattttataacgaaatcttcttgagtgtaacagcaattagctgctatgatttgcttctctttgtctttgggggaagccattggtttaagcaaaagataattggcttatggaattgtgttttgtgccgttagccacaaactacagtattcatatttgcttcctttatattgggaataaaaatgggtataggggaggtaagaatggtatttcattacttgatcaaaaccatgccttgatgtacccaaaacaaaaggactataaaatgcaagagccctcattgtagtccttatgggatccctcccatctctgagtgatggccgtacaaagaccagtgttgttgaatccacctggagttgcaatattacattattttccagtacagaatgtctgtgtggcccatgaaagcaacataggttttaagagttttagagtttcattagctcattctaagttcctctgtttgaagcatggtctcttaggttttggactgaactcagacctttagttcttttcatcccacttcaccttaggtaagtaaattctggccaccacccagctccaaagacacaaactctccttcgctaaccaggttagatgtcccattcatctcatgccctgataaaaactgataaggggagagaatagttaaaaatttttctagggtatcataactctggtaggaagtcatctgtctagaaatcaagagaaaaagaacgtgtggcctcctgttataacaagggtttctagatttgtcctgtgaaaggtcgtttaaggacttggggatcaacttcctcaattatcaccaattgcactgttgctccaaaaatcatttaaaagcttactggacatatctacataatggtgaaactgtaatttagagactatccctgactaatgtgctggtaggcattaaaatgagttcccaagggaagtgattaaaatttttttctcttctgttttttgagagaatttctagatgtcctgggccacagttaattaagatttttaggggggacagaaagttatactgaaatctttagagctcccttccgccgttaaaattatatatatatatatttaaattataccttaagttctggggtacatgtgcagaatgtgcaggtttgttacataggtatacacgtgccatggtggtttgcggcacctgtcaacccatctacattaggtatttctcctaatgctctccctcccctagccccccacccctggacaggccccattgtgtgatgttcccctccctgtgtccatgtgttttcattgttcaactcccacttctaagtgagaacatgcggtgtttggttttctgttcctgtgttagtttgctgagaatgatggtttccaggttaaaattatatatttttaaataaatgaaaactgtgtttttaaaagaggacttttgagaagtatatagaaaaaccattaatttagactctgtgagattaggttgcatgaagaaggttttctgaatatttgaagagtggataaataaatgtcccccaaagcaataaaatcataatcctttaaaatataggaaaaataactaatgggaactaggcttaatactcgggatgaaataatctgtacaacaaactcccatgacacatgtttacctatgtaacaaacctgcacatgtacccctgaacttaaaataaaatttaaagtaataataataaaataatatggattttctttccaaattcggaattactttttgtaaaattgtattaataacttgtggcatgtggcacgttaaactgattttatttcaagaacttctgttactggctaggttgatacataggcttgtgggtttttgctttttgggttttttttgctcctgcccatacttccagtgtcttcagtgttttatcttaaaattttcccaggatctgatccagtttcatatttaatgctgcagaaaacctgaagtgattagtaacatgaatagaataacagaatgaattaagggaactttttttttcatcaaggtatatcttcgggatttaaaagtttttcataatttattatcactgtggatccacaaattcctcagatgaataagaaatacctctgtgaatttctgtgaccactaaaattactgagccacagaaattaattctgaggaagcagaagtagcaacatagttcaaacatgacttgtttccatatattttctgttttatatattcttttaaatatccttttaaacaagtaatatttcttttctttcttgccttttttcccatttattttttacattttttctttctcattttgaaccataaaatttgtaagaccgttactaagacccctgatagttttaagaaaatttataatacctataaatatgtaaaaaaaatttagaaaaatatttaaattaaaagtattcatgagaatttcattaccttgtagattatgtcatactcttttccagattttagatatgttgaggtcaggcaattcaaaagaattaatctctgtattaatctgttataatgttaacataacactatgttattttcatatattataataacaggcttattagaaatgttctcaaaagatagaaatgcaatatttcataatataaaatatctttttcatcagtatttatggaataaatagaaaaattttagttttcctgttctttgtcttgaatcaatacagaaatgaacctcatgtgacattgggagtgacattggcctctagggccatttttggatatcaccattataagagagcactagtattagcatttggtggtgggagccaaggaatagacatcttgccttgcacataattgtctgtacaataaagaagtatcaggtcttgctctctatttgaatactctattagatattaatgaagtgaaacatatactcataacaatcagagcagctatcaggttttacccagttttcgtaaacacgtagtatttttttttgtatagctttaattctctgaattttctggaaatgcagctatcatggattgaagaaagattttactttggtttcctctgagctttaccaagagttgttcagtactttggaaatgacattataagtaacaataccatttatgacattaaaatatgacacaacatacctgtaagcaatatttgtagctattgtattcaggagatattacatacaggtgtcagcatcagactcactcattttgtctctttatgtgattatgcctgagcatttacacactgaattatatactgttatccataacttttcttttcattactcatttatattacagtgagaacattatacgtaaaaataatgtgtatgtttacattattagtgtagaaagcatatacatttcattttgaaatggtaaaattatctgtaagtttccttttagaatggtaaaagtattaccaaatatttgtgataaaaagcaaggtattgggtctgagaaagctgagaaccactgaattaccacaaagggacaaaataagagggaaatttataaattttaacattataaacaggaaaaatatttcagtgtttttgaaatacttacctcatcttcattcaattctaaattacttcttttgtttctacagcaattaaatgcaacttttagaaaaatgtgaagaaaatatacatgtgtattttcttttttaataagaaaaatacactttttctgagcctcaccactctcagattggctcttgatcaatatctaccagatttttaacccagacataataatttttgaggcccagggagaaagatctcttcaggcacccattaaaagggacactatttggctcttgtttattccttaattttcctgtgaaaggatcattgagtcccctgccttcctcctcaacttcatttaaattaaggagaaattgtaggtgaaatgaactttgtgtaaagtgattcaagaggtgttaataaatccctcttgcctccccaaatcctcctcaatgaagctgccatgaaaactcgattgttgggttaagaatcagtttttctgaaggagggtattgggccaatccattctcagtcattggcttttggtgtgaagttagaatttgggatgctgtcatagctttgattggatagattttgcccactttcctctatgagacagacataggccaaagactctcacacctattggtactggtaggaacaaggaagctcttcttgttataggggccaactacagcattctgtagacagttggtactgagagctccatggtaaaggggcacagggatggcagaactgtggggataatgcccagagattgcaacatgccaagggacacccatgggtattggaaaccaggggaatctgaagacccagcaggagctgctggggaaatgagacccaggtctgagaacggctagctgagagcaggaggggcttgtgtgagtcttgctcaggagttctgagcaaacaggactgctcttggaagacagggcaatggaggcagcaaacaaagactgttttgaacaggaggtaagaaagtgctggcgagcatggtttattttatttgcagtttgtcctaatagtttatgtcattagcaatgaattatttctgccctttgttgctgatctgggccatagatctcatggaggacagggtgtggttacaaagatgtaaccactggcaacctgatcagagattttggataaagatctccagctcatccttaagtcaagtaagaaaagaatcccttggaatttagagaagggtctgaagagtttcccttctgttttcaggaaagcatcatcttacatgtcaggagtagacacttgccaaagtctacaccagcctctggcaccctcaggagggtctggaaagacatctaggccccctctccaatgatgttcaattctgtataacacagcacacttcttaccacagcccagctgggtaccccattctctgagttgtcctttgcctctcagaattccattattttcgtagcattgtgcttaacagtgggacacactactgacctgtacacttaagaacggctaagatggttgatttcatgtcatgcatatttatcacaataaacaattttttaaattagaagatatatatatatcttatatatatttagttatatatataacatttatatatatatatatttagaaactttaataggcaagaactgagctgatggagaaagttaaaatattagaaagaaaaaagctagtctgagacatagaaagacttcagtcctcctatcaagggactacctatagggaaagcaaatggaaaacacttcacatctggacatatccttggagaatgctttgaattttaagaacaaagaattagtacaaaaaaagccaggcaagagaaatgtttacctctaaaagaaagaaaaacaattagaaaggtattaagtattttccttcacagcctaatgccagaaaatgggaagcaatgtctattggattttgatttaaaatatcatggctaagaactctctaagcaggcaattactgtgcatgcccctgggtaaacaaaggaacttgagacggattttcctctccatctcggggcttatcatcccaaagccattgcttctccctctccagggtcttccacaggtaggagagcaactccacttggttatcttgaggccaaattatcttttcaggaggcaagttgctggcgaaacctaactttccttttagaataagatccattcagcactcagtctagaaaaatgtttcttccatgattcttacaataggaaggcagctttccctggcctcttgttctcacgttccattcccgcttagagccgctcccatgtcactatttccttagttagactagaaagagagccagatatctgttctgaaataattgtctctctcctcctatcacaaccatcttcaaaattttgctttgcatttgaatttttattgcatatttagtttcacaaccttatttcctaaactttcctaaaattaaatttctgcctcatctccatttttatcacaacctgttaacttattgcacatttaacctctgttctatagaaaacatgtattttgagttttatcaatggtttaaaattgaccagtgcagtctacaatgcctttccgtctcattcagaaaattcttttcagacgtgctctttctacaatttgagcagttcaggttattggccacatgtagttttttccccttattcctgtattcctaagtaagatatcaccaggccttagttttccttatcaactgtgtcagtggcttcttctcagcaactccttattatcaggcgctcttagaggcttccacttaaatgtaaaaattggagattgattaccagttcctggtgctaagtgcccaagggcaagagagaggctgtagggattatggaaaactctactaactttgcagtttcttttgtatagttattaattcccttgtgtaaagtggtcagccctgtgtacccagaatgattctggagtgaagaaactgccctttttttgtgtgtacaaaccccctctacccaatgtcagtgaacctctaagtaatcttcaatccacacacgagaggtgctgattcataataaaattttgtttttccagggaaataagaaatgcaataatgatgcactgagtttttcttaaagtgaaacatatttaatgatatattcagagacatatttttataattcactttatttgtattatatcataatgtactagaactattataagcaccatttataagattataattaagtaatctgcaagatggtggttgtgctaagaaccacacatagacaattttcttgacaatattggtcagtttccagtctttggccttagatgtcttttggccagtcttggtatatcatggacacaaaatgagttctatatctgctgttgttatcagtaaagtcaccccagatgacacattgctccaaaaatatctggcaaagtttttaaaacaataaatttttatatgcaattggaattatttgtaaaaaatcaataagtgaacacacattgaatttctctcgaagtcctgacttttgatgtatttgatgattaaaattaattctaccttttatggatattaaaagaccaataatgttaaacatatcaaagtgaagtttgttccagttggtctgtttgaatgttctttttttttctttttcttttttgacatagagtcttgctctgtcgcctaggctggagtgcaaaggcacgatctcagctcactgcaacctccgcctcccaggttcaagtgattcccctgcctcagcctcctgagtagcgggaattacagatgtgtgccaccacgcctggctaattgttgtatttttagtagaggcagggtttcaccatgttgactaggctggtctcgaactcctgacctcaggtgatccacctgccttgacctcccaaaatgctgggattacaggcgtgaaccacagcgcctggccttgaatgtttttaaaaagacctgacagagtaaaaatgtgtatgccatgaattgtgttgtgagtaaattcacagaagggcatgatgagaataacatccagcctgccaggagagtcatgcagaattacttgaaaatatgagtgttcacatattcacttcagatttattgagctaaatgcaaatgatcaaagcaactctactgcatgatattaataagttttgtctgctctaatgctttaaaaccacaaaacctttaaatacatttaaatataagatactatgctaaaagatcaatgcagataattttttgaagtaaaaatgctccaaaattatgaaactaccaaatcttgagtgttggtatataaatacgtacttattccacagacctcatcctctcttgtccactcaggactttgcctctgctactgtggcctcagactcctgcaccatcattttctctctttctactgaactacccatgtctgcataaatgatacagtattaatgaaacaaaaccactcccatcatctccagtaaatgccatgctattgctttgcctccctttataagttttctacaagaaaactccttgaaggtaacatccacattattttattttattttatttctgaggcgaagttttgcttttgttgcccaggttggagtacaatggcgtcatcttggctcactgcaacctctgtctcctgggttcaagtgattctcctgcctcagcctcctgagtaggtggaattacaggcgccagccaccacccctggctaattcctgtatttttagcagagacgggatttcaccatgttggccaggctggtctcgatctcctgacctcaggtgattcgcccctcttggcctcccaaagctgcattctgtttccagttcttcaccttccattattcccttggcccagttccatagtttcctttatgccccactccaccataccaattttgtcaaggtaattaatggtatcaattatataattcaatggttaagtttgagtcttcaccttattcaatctcaaagtagggtaggatgcagttgagaaatctctttttatggaaatactttcctcatttaattactaaaatgtctcctgctcttgggttttctcctacctcattaggtgttccatttccatttctttgctattcatcctcttcttcccagtttctaaaggttggagtgcacagggcttcatcctcagcaaccttcctgcctttctctgcacacctccctaaaacatcttaccagttttgtggctttgaatgtgatctgtacgctgatcttcaccaatttatatctctcactctgtcctccctcctagattccagctacacttgaagcctctgcttataataatacgcaacttcaatttaatttcaccagagcaaaacactggatttcctcccctcagcagccttccccatctcagaaaatggcatcactttttacccattagctcaaaccaaataccaagaagttatgctcaatgccctttgtgtccatcgggttccaattatgagacagaaactgcttggtgatttaaacagggaaagtttaatcattagctataaaaggagattgaagtgttgagagattagctactaagaggtaaagagatgtctaaagaatacaagagtaggagatgtagccagcagccactatcttcagatcagaggcaaagcatgcaaagaaaaaccaacctgggtaaggaatccgcctccttacccccaccagcccacctcacatacacacacacccagcactgaaatgcagaccttgcaggaaagggtgggtcccctggatgatggagaagttcacaaaggtgctttgctgatggaacttgctgaaaagccactcataggggtattagaaaaagctgtccaaggggagaaactgcatctcaggccatgctgggcatctgcccaaggaaccgaatgcctttggaagctgctctctgaagggcagggatggctgtccacgaggaggccacatgcattgcgtgcattaggcaggagcctgctacgagaaagcaggtaccagagccagggagaaaagcctattcttccccaagtgctgcttcagcgccttgtaatgatgaagattagtttagcatcccacccattggtaagggagaaacgtgctagtttcatggcagggcagtagagggtggatttggagccgaagacaatatatggatggatagcctttcttttgtttacacccacaccacgtatgctgtatcttctaataccgatgactctgctttaaagcgtgtctctcatctgaccacttctcgccatttctactgctactaccttctcaggctagtacaacattctccctctccctgttttcactttcgctgcactgtggtcagttctctgcacattagccatacatcgtgtgaaagtataaattcaatgttatactaatttatagtactgatgttaaatcatgatagtctccactaaaatttttcctgtggcttttgatctcactcagatgaaaatgtaaacgccatgatcagacccttgcctgtctctcagtcaacttctttctgttcctttgtttttgcctcataagctttgaattttctgttatctctgatgggaacatttcctcaaatagctggttcctctgtatcattcataactgctccagtgtcatctctgcaaagaaggtcctgatttctctatttctctatgtaaaattgtagctttttgttccctactttttatactattttatatatatatatataatatatacatatacatatatatatatattttttttttcagagatagagtctcatgctgttgcccaggctggagtgcagtggtgcgatctcggatcactgcaacctccacctcctaggttcaagagattcttctgcctcagcctcctgagtagctgggattacaagggcacaccaccacgcccagctaatttttgtatttttagtggagatggggtttcaccatgttggccaggctagtcttgaactcctgacctcaagtgatcctccccaccttggtctcccaaagtgctgggattataggcatgagccaccacacctggctactttatattctttttggcatttattattaccacaaattatgttaagtattcttaattaacaagaattaattaaatttttgtccactagaatttaagtgtcataaagaaggaaattatttttgcctggctattgtgagctaaggtttaatggcattcaataaacatatgttgaaagaataaaaaagtgggtaaaggaatgaattcctgcttttcaacactgatttgaacccatgatctgccattttttagcatataaagtttgagtcagtttctcaatatctaagaacctcaaattcttcttctctaagatgatagtttaaaacatttaactctcccaagcttactgtgaaaattcaccaggttggatgatatctcctcaaaaaaccataagaaagacttcttgatcaagcagagccatctcttgatggagtctaagtagtttcttaaaaagagcaattagggcaggatatttataggaccacaggccagcctgggagattttaaagagtgtctattaaggtttggattggacagagtttatgaaacagctgtgctttgatggacacagtagggtgagggtggtaaaatgaattaagttagcaagctgttagtcctaatgaataagtgattgggttggcttacagtcttatattctacaagcaagtgtttcaaggagcaagtagctaagtgtgttttgtttgttctcagtattgattaataaagaaacagggagaatatattgtctcagatttggttagcactggggcaggagagtatgttctatggcgttgtttatgggacagaggtattttggttccagatctcaagtgagatggtatttgtgaggtgtggaaacagtgccagcccatatgcacaatgccataaagcagagtagatatctaagtgaattgcccgtcactgagcagcttagcatatacagcctgtattcagataaaagcatcatggtttcgcttctttgaaaagttcttttcattaataaaatggtttttttggtttcttttggatgatttaaaaatgattctttcagagatgataaattatgtgcttggggaaattctgtaattctgatgggtttgtaatgactctttttgactttgcgaattgatccagtagagcataaacttcgggagtgccttaggccttaataggctatgttcttgttttaataattttgacagaattgttgtgggaatcataattagagtctctctctcagtgaatttgattaatttaaaaaattaataacatttctacgtaaacaaaaggtattaggatggtgcaaaagtaacttgcagttttgccattaaaagtaattacttaccacaattactttttcaataacctaaatgtaataaggaagagaggagagcctatccccgagcagatgtgcactttagggaaggagttgatgcttgtcctgtgttgtgaggctttgtgattgaatcagctgctcaggatatcaaagaatcttcaacctgaggaccagttacattagaatggtattgtctgcttggactcctctgttgagaagaattgcaacgattctctgagttcaggtgggaaaaagagctgtggtatgggcataggaaaggtggatgatggcctactcatagcacatttattggtacattgttgtttttgctgctgctattgctgtttcctgtttcattgatgaatcaggagtcttctattaaaaactatatgtactacttttacacatgttcacagtaacataacaacaagcataggtcttatcatccacttattccaaggctaagaataggagtcagggaagttaagtgactagtctgaggacacagggataaaatttggcagagacatggatgtggctatgcccaggtatatgtggctgaaagctggtgctctgtctctatgcaagacaggcagaggaaaacctctggttaccaaaaaaaaaaaaaaaaaaaaaatcacaacaaagctacaggaaaacagaaaccatctagaaaagaagtcaagtctccttctcaatgacagctgaactttgccaaggaattgagataactatgagctaaggctgggtaaagattctgatttaaagcattacagactttctaaagttttacttctttcaggagcaggaacaaaatcccttttccccttttatctacatgatttagaggagtgctctgctaggaggtctatgaatatttatagaggatgataataattaaagacaaaagtttcaagatatacgtagcagaattaaagaacagggttatattttgcgtttctgttagtgtttaagagaaagagatctcttagtgtataagtttttattttgtgaatttacatatcccaaatgacaaatcactgttatacatggccattagagattgcacagtatgtttacttttctcttttaggtgacaaagctatttgaaggatgtgtgtggaaccgaatataacccagttaagcattattactagaaaccaatcagggacatatgtaactttgtcacctcgctgcctaaaacacttcactggttttaacttcagaggcctctgattctcctaaattatttgtaaatgtttgtgtgtacctcgtatgcctgtattttcagggtttagaatccatagatctcactagattttcaaagtcagtatgcaactcaaaagaagtttagaaagtaatgacatgcaggatacagcccacattcctcattatgacctccataacttgatctggcccttgcctgctttttcttttttttaaattgcatttatttaaagtgtacagcatgacgtttgcttacacacatgcatagtgaaatgattgctatagttgagcaaattgacatacccatctacaaacagagttgcctttatttttcttatggagagagaacctaaaatctactctcttagcaaatgttccatatacagtacagatttattacctggagtcctcctgctagtcattagatctctaaacattcatcctacagaatagcaactttgtaccctttgaccaacatctccccatttcaactatctccccatccctatttctatgtatttaactttttaaaattccacatataagtgagattatacaatatttttctttctgtgtctggcttattttacttaatgtctcatccatgttgtcataaatggaagtatctcctttttaaaggtcacataacattctattctgtacacacacacacatatagtgtgtgtgtgtgtgtgtgtgtgtatatatatattagttttaatattaatccataaatccaccattttagtccatgaatccaccaaatgacacttaggttgttcccatagcttggctattatgagtaaggctgccgtgaacatgggagtgcaggtacctctatcatgtgctggtttcgtttcctttggatatatatccaacagaaggattactgggtcatatggcatttctatttttaattttttacggaatctccattctgttttccataatagctgccccaccaatagtgtacaaaggttcccttttttttccacaccctcatcaacacttgctatcttttgtctttttggtaacggccatcctaaggagtgtgaggtcatatgatttggaattgcattttcctggtgattagtaatgttgagcttctttttatatacttgttggtcatttgtatattttcttttaaaagatgtctattcaggtcctttgcccatttttaaaccacttgagtttttttgttgttgttgttagtgagttatgtgcatttattatatatttgtgatattaaccccaatcagatatattgtttagaaatatattcccccagtccttagatagaaataaatggaaatatatcctttgtccatggtttagaagaattaatcattaaaatgttcatccaaagcagtatgtagattcaacgcattcctattcaaaattgcaatgacatttttaacaattctaaaattcaaatggaacacaaaagacccaaaatagccaaagcaatcttgaacaagaagaacaaagctggaggcatcacacttcttgatttcaaattatactgcaaagttatagtgatcaaaagagtatggtgctggcataaaaacaaacatctagaccaatggaacaaaatagtgagtccagaaataagtccaaacatataaggactactcactttcagtaaggaaaccaatgatactcaacagagaaaggatagtctctttaataaatgctattgggagaactgggtatgcacatgcaaaaaaaggaaattgaactcttatcttacgccatacacaaatatcaactcaaaatggattaaagacttcagtgtaagacttgctgtaaaattcctggaaaaaaagatagggaatgagctcctttacatgggctttggcagtgagttttgggttatgacaccaaaagttcaggcaacaaaagcaaaaataaacaagtagggctacatcaaactaaaaaaccttacttacttttctagaaagaaaatcatcacttacaactttcttatgttttagcattatgaagtttctttaaaactcccaaagcacttcacatgttttctcgcctcagtgactttgcacacgccattgtcttgtttctctgctgccaacagtggtctctattgtttgcccagcaaattgctgactgtcctttaaaacccagaacagaattcattccttcaagaagagctgatcattccttcatctgtgcaaccctgcctattatccataggtgttttattttattatgcagtcctaaaaatggtgctgctgaacttttctttctatgaaaaaaatgttctttgtgtattattcaggaaactaagcatatgacaaatacagtgtgtgtgtttatctttacatgtaaagttatcgagaagaatttaaattgagattttagctgtactcacagttgattctgattggctttttttttttttctgaatgtctttactcctgtggactttaaagtagtaaatgtgtatgacttcggtaatattttaaggtttaagaaagcaatctattcactcttggaaaaggtgaatttaatggtgcaattgccacctttggtgaacaattaaaagcagaattgaaagaatgttgaccatgaggtaatctcattcgatctgccaagggatattttttgctgtgagggctgggtgtctagtgacagtaaaccgtagtcacagataaggagagagggtggttttcagttggaaggaggtggtatcacatgactactctctgttggaatgaggagagagaattgagcttcacagagaaggtttagttttgaagtgtaactagattcaatacaatttcttcatttttgtgtttttttcttttcaataatatatttcctaggtgcttaagtgaatattttcagaaatagaacaaataaccgaagttttaaaataaggatattcagataaaagtgaggtaaaagaatatcatctgggccccttgtggaagagtcccctggcattgccacgcatgatgggagccctccaggggaagccccacagccagagccttgtcttctctggccatgcactagtgcagcatttgacatgatttttttttctttttatttttttgagatggagttttgctcttgttgcccaggctgaagtgcaatggtgtgatcttggctaactgcaacctccacttcctgggttcaagcaattctcttgcctcagcttcctgagtagctgggattacaggcatgggacaccacgcccagctaattttgtatttttagtagagatggggtttctccaagttggtcaggctggtctcaaactcctgacctcaggtgatctgtcttggcctcccaaaatgctgggattacagacaagagccacctcacccagccttgacctgatttttaaccagtgctctcagaggtggctgattagctcttaccacagcgacgtcatcacttttgtcaaaaccaaaagataattggtagggacggcagtacttccacagagtgttagtaggacacaaacctggctgcaccctccctaggctctgtggttctagtcatcagtcccttatgtgcacttgttggcaggtacttgatatactctgctcttatgtatttgcttatatgtcttctggatcatgagctccttgaaggcaggggctgttgctgaaacaatctttatttcaaagtctgccatgtggtcatagcagttaaatatttaatctagtgtaaattaatcatttaatttaatttaactttgtggtgccataaaccagacatcatctagtgtcagcatgccttgattaaagctacagagttttggaagaaatagaatttgtgtaactctcagtcttgatgatttgcttttctccaaagtaataagatgtatctgcaagtataacttggagagtggggagctctcagattctcattcttctccttggcattcttttgggcttttgggaagagcagcacttggtcagaccagtcatttttctttcagtgtgaagaaactaatcctcgctggaggctgactttgacagaaaatcactgcgagtgcctggaacgtgggttctgagtaggagtccatgagggctagttactaaggaagaaacagtggagagaggcaagtgtcaggatcaggagggcaaaggttgagatgggcctgctttcctagttcaactgcagtctagcgatgtccaagaacatttggacagtcatctcagacaggagcccagttatattctctgaatttgactaaatttggggacaaaaaaatatttgacaaactacctgttagaaatattttctgtgcccatgtaggcaagggtgacacatgcagcattgagtgagtgaacaggcaggtgcatgtagttctgcacagtcattctcaactattcttccctattctgtgatggatagtactcacacgtggtacactatctctcccagtaaagcacacagaggctggaggctggaggatattccctgtggaatagctgtaattctgcgttgccctctcctcttccagggaacatgttggaacacatggaaaagatgtcataacagatggaacttaaatgcaggctgagaagctcacatttccattgaaagcagttttctcgctaaggctggagatgagcagactttatatttttgtacctgaagttttgtacctactgaaatagacccttttgctctcaatggtccctcttagtgatgttgctgtagatcaagtaccccactcactgttctgaaagaagaatgtgtcatccatgtcagcctagcaggagtctgggacacagaaaccttgctgtgtatggttaggcaaaatgtatctcttatgtattgatttgattctgctttatgttttttcctagaagccaaggacttttctggaagaaagagaaatagaacacaaatatcatctctgaagtttacaataattaactagaatctgtttgatgcattagaagggtggcaaataaaaccagctaccaagaaaggtcaacagggtaccctaggaggaaactcaccatcagggagggatctaaatgagtgatttggatgtaacccagagcctagatattctcagaaaaaggctggatcaagacacaatttgtggctgtaccgtaccctttcctgatgcagttcccattattttactctttcctcctatcttctactgggaagatagctgcatgtatgcaaactcaaagagctgttgtctcagagcccagaactgttgggtgttgcgtcctgtggctgttgctgtaggacacccctggtcgagtgtactattaaagagtcaaacactttcatctgttacagagaaacattgaaggatcaatgctgtagacagcatattacacagggttgctggagtgccagctgtgcaaggatggctgggccttggttaccatggtgattccttgggcaagcagagcccagcttagagctgtgggatcacactggcttactgctcgctgggtcccagcagaacacggggcttgcaccacctgcccagaagtgagcagattagagatcagctgtcgtgggcacagctggttttgtgttctccagacagatggcagcagcagggaaacaccaaggagagctgattattcaggagtataaactacagtagagagtcttagcatgacctggatagaagtccagaataaaatctcactttccaaccatgtgcttggggacattgtcattacagtttgaatactggaggaaatatgactgtgttttcattaatgaactaataagttgattcattttttattgtatatatttatagtgcacaacatgaggtattcatacatgtagtgaatttattattacaggtaagtaaagtataggtacttaacttggagtacctttacttttatagcatgaaatactacccattctttaaaaagaataaaatcatgtcctttgcaggaacatggatataattggaggtcatcatcccaagttaattaaagtagaaacaaaaaaccaaatactgcatgttctcacttataagtcagatctaaacactgggcacttatggaaataaagacgggaacaatagacactggggactgctagaaacgggaagagagggcaagaaggactgaaaagctacctattgggtactatacttactatctgggtgatgggatcatttgtacttctaaccttggcatcatgctatatacccatgtaacaaacctgcacatgtacccctgaatctaaaataaaagctgaagttatttttaaaagtgatgaataaaaggatgagagagaaatatcattaattgcatgtatagatgagataactgatacttagaataatttgtccaatatcatacagcataagcaaaacactgtctttctgattgcatttttgtactatggtacattatctagagacatgcctcattcaaatacataatgcattaaatgttataatttatgtagaatagtgtattactttcatgttacaatttttttcagttaagatgaatctagtaaacataaaattaaagtgatttaattatatgtaaacattttcattttaaatgcttaatataaaattcacccccttaccaaattttcaatatacaatacaatattattaactgtagtctccctgctgtacatcagatctctagacttgttcagcatacatcatagcatttggactctttgacctgcatgtccccatttctttttctttccagcccctgataaccaccattctaactctctgtttctatgtatttgactttcatttggattctacatataagtgagatcatgtagtatttttctttctgtgattttgtttatttcacttagcacagtgtccttcaggttcatccatgtggtagcaagtagcagtgtctcctcctttttataaggccactgaatattccgctgtagatatataccacaatgtctttatctattcatccattgatggatacttaggttgtttccataacttggctattgtgaatgatgctgcaatgaatgtgagagtgcagatatctctaccaggtgctgatttaatttcctttgtggcaaaaccagacgcatataaaacttcaagctcagaatagctctactttgagatagaaattgaggataagaaagggaacttacacagacaattaatttctggccaggaaagacttcagggggccagctaagttcactcacagaggaataaggaaaatatcactttcagcttctagggaaacagtgtcttctgtattatttcagctcttaatttagttgatttttgaatttctcttctctgcttctgacacttagggtttattaggtcagaggacaagttgcagaagaaacatttttgttctccaatttgtgtgtgtgtgtgtgtgtgtgtgtgtgtgatcttatgattaagattgtcaaagggaagaaagttataggttctttaatagcacagggagggcaaaatgtacatagttttgaagaccatatgacctggatgactggaaaaatgagaaggaaataagaaaccaactgttactgagagcctgccatgtttgacactctacatattatttaaaaaaattcatatgacatgaaatcatctgctccttgagaacagtgaccatgtcttgttcaatgcactctgtgctgtgtgaggtacatggtaggtactcaataaatatttgttgagcttatacactcttggtgggaatgtaaattagtttagccactgtggaaagcagtttagagatttctcaaagaaataaaaaacaaactaccattctacccagcaatcccattactgggtatatactcaagggaaatacatccttctacaaacaagacacatacattcatgttcactgcagcactactcacaataacaaagacatggaatcaacctaggtacctatcaacagtaaactggataaagaaaatatggtacgtataccatggaatactacacattctttaaaaagaataaaattatgtctttgcaggaacatgaatgtggctggaggccatcaccctgagtgaattaacacagaaacagaaaaccaaatattgcatgttctcacttataagtgggagctaaacactgagaactcacaggcatgaagatgggaacaatagttactggggactactagagggggaaagggagagaaggactggaaagctgcctattgggtactataatcactatctgggtgttgagataattcgtactcctaaccttggcatcatcctatatacccatgtaagtaacctgcccgcctacccccgaatctaaaacaaaagttgaaattattttaaaagacttgaataaaaggatgagagagtgatatcattaattgcgtgtatagatgagataattgatactcaggataatttgcccaatatcacacagcaaaagctaaacactaagtctttctgattatattttcataatatagtacattattattattcaaataagtaatgcattgttataatttatgtagaattgtgtattggttttatgtgacaatttttttcatgaagacaacctagtaaacataaaactaaatatgatttaattgtatgtaagcattttcatgtaaaaagttctacaattcagaaaataaatctgtccaatcatgtatttttatttgatttggaaaataatatgactggggggcagggccaagatggccgactagaatcagtgtcagtcagagtcttccattgaaaagaaccaaaacagtgtgcgaatcctccactggcaacccagatatccaggttctgtcatcaggactgagtaggaggctggggtgacccacggagaggaaggaagagcagtgtgatgggcggcccacctgagagccataaggggcggaggagacctcaacccccagccaacggaggtggtgagtgagcacactacccagcctgggaaactgtgctttttccatgcaactgagcgacccacagatcagaagatcccactcgtgaacccaagccaccgtggcctagcgtcccaactatggagccatgcagattctcaacagccactcagctagaatctgcctaagcttgcccagttcttgaggagaggggaggccatcgccacagctgcagctgcctgctgtctaagccttctgggctccttggaggaggggcggcaggcaacactgggaatgctagctgcctaacacactatgctcccagggcaggggaagggcggcagccatctctatagctccaggccacgcttttcctctgctggagccaaggaggctggacggttgggtcccaagaggtattcgccacagcctaacaaaccggctgtggcagactacggccaaagtgcctcttcaggcctgaccttgacccattcctcctcactgggtggggcctccctgcaggaattccaacaactccaaccaggggctcagggacagaactctaatctccctgggcctgagcccatgaaggggtggccatagtctccgtggaccagcagacttggtcttttgttcttctagttctgaggaatcggagcagcccagaggagtaggtttccccacagcgaggcacaccccctctaccaagggacagccaaagtgcttcgttaaatgggtcctgcatcccatgccatccaactgagtgagatcctccaacagaggttgtcagacaccttatatgggagcatttctactggcatcacattggtgcccctcgaggtcagagatcccagaggaaggagcaggcatccatctttgctgttctccagtctcctcgagtgacatctccaggcacgggagtgaacctgatgaatagggcctgaagtgaactcccagcaaaccacagcagccctagagaagagggagctgactattaaaaaacaaacaaacaaacaaacagaaagcaacaacaatagcatcaacaaaaaagtccccacaaatcctcatccaaggatcaacagcctcaaagatcaaaactagacaaacttatgaagaagagaaaaaataaaaaaaaacacagaaaacccaaaaggccagagtgcctcttctcttccaaatgatcacaacacctctccagcaagggcacagaactggacggaggatgacatggatgaactgacagaagaaacaatagatgctggcaaggctgtggagaaatagaaatgcttttacactgttggtgggaatgtgaattagttcaaccattgtggaagacagtgtggcaattcttcagggatctagaaccagaaattccgtttgactcagcaatcccattactgggtacataaccaaaggaatataaatcattctactataaagatacatgcacatgtatgtttattgcagcactatttacaatagcaaagacatggaaccaacccaaatgcccatcaatgatagattggttaaataaaatgtggtacatatacactatggaatactatgcagccataaaaacaaatgagatcatgtgctttgcagggacatagatgaagccagaagccatcttgttcagcaaaccagcacaggaacagaaaaccaaacactacatgttctcactcataagtgggagttgaacaatgagaacacatggacacagggaggggaacatcacatatggggacctgtagggggaggaggagagggagatcatcaggacaaatagctaatgcatttggggcttaaagcctagatgacgggttgatagttgcagcaaaccaccatggcacatgtatacccatgtaacaaacctgcatgttctgcacatgtatccagaaacttaaagtaaaataaaaattaaaaacaacaataataatatgattgtaaagatagatcacgtttaaagagggcagctcactgtggtgtactggtaatttttgaacaactggttcccttctccctaaaaaaaacctctgtgtgtgtgtgtatgtatgtgcgtgtgtgtgtatgtatgtgtatatgcatatatattatatacacaatattatttattataaattccatacagccagttagttcccacagaatgcttttattaatttttaccaaactcttatctatagccaacctttgtttgcaactgatgaataagttagttgacacatttgtttatctcatgtaagacaaaagtcaaacaatgaagactcacgtctcggaaattcactgttttgtccatggtgtgagcaagttccctgttgaattgtgtaatagtggttgaatactagaaaactgtatttttcatttcagtgctggtcagtgtaataactacagacacacaacacacttctaagtttaatctgctttatcaacattttctctaccacttccataagtctagacagtcaataaaaaataaattgagccctgatttgtagtatttgccaattcccaccaggccaatttcaagctatccgagtgatgtcaccaaacacagatttgggaagaaatgtgcagtgacacagcattatgtagaactcgcaacttgcaactaagacataagtaacttcaaaagtataaataaataaaacacagtaattgataagttctagtaagtgatgagttctacacattattacttgaatttttaataatggctagttggtagagaatgtaaatcagtttagtttctacagcagtgacatcagattccaatgaaggggtgagaaaagaaagtgaaaaacagaagaaaggggaaagaaatatttgagcatgtgatgtgggctaggtactttccttacatgagctcctttagagtcctttctccaactttcgaatgaacaaaatgagtcccagcaaagcacctcctcctttgaccacaggacgctgcctcagaaggagagccaccagttcctgttgctcctggctgcttttctttgtgttccgtttcctctatttaactcaaattactgagaagtagtctgcttatgttttagttataagcctctgatggaaagctggggcagccacccactagggaagatagatggccagaccctctctcttcatctctctggcagccagaacttaggtgacccagcagggcctaatcagacatacatgcccagcacttgaacatgggagccgtggatggtggagaatttattccgactagtgtgaccaactgtcctgctttgctgaagacagagggggttctcaggagcccagactatcagtttaaaaccagcaaagagttttgagcataccagcgcaagtgggtcacctgctgctggagtctgggggtggcagtttcagcctcagtgtgcagggtcaacagtgactgcaggggaatctgcagcatctgcagtgcggcgttgaccaccctaagatcaagttctgagtcttgatttgggctgtggttctggctgccctccgttcatgcctattttcagaaactagttctgcatcttcccaattattctgtgaaccaactaataaccttgcaaaacctccttttctgtttaatgtcagccaaggcaaagtttctgctgcttgcagggaatagccctggactgacaccatgcttctctcagctttccttactgttgttccatctcccagcaatggctggctctggagttcattgttctgtgctccgcataggtgaagtctccagggaaaagtgcttctttctaaggcactgtcagacttacggaagtgatttatttaatagataaaccagcactgatgacttctaaccagttaaagctgattgttttttccagtcaggaattctggtaaaaccatatacctctatccatagtgttagtccctaattgccaggcatgggctgtagagtttaagtgggactagagaccaacacacgtacgataaacaatagaggtaggaaatatacctcaaatttcctggctattgattgattcataaaactattttataatgatccaaaggattaagcaacaaataaagtcattaaaatagtgtacttaaaagttgcactttgcaaaatgggtatgttatctaggtactcgtacactatttttgtactgctggtcctgtaccagaaacatttttttttccattgttacttgctttttaaactttgcttagccacttaaagaaaatctgcttgcacaatttgcctcaaatccactcccattgtgagctgattttttaatttttccaattaaaaaaatcacaatttatgccccctcccccccaaaactccttaaatcatagtgagacaaaccttccatgaggccagactatgcccttctcattcaatagggttagtattcaggaccaaaagagctaaccatctaagtttaaatacaatagaaatataatgccagccatgtgagaaaatttaaattccctagtaactacattttttaaaaagtaaaaagaaataggtgaaattcgtatatcattttgtttaacataatatgttaaaaatataatcgcttcaacttgtaatccatataaggatattaacaatatatcttacatttcttttctttaatagtgagacttcaaaattcagtgtgtagtttaccttcaagcacatctcaactaggacgaccacatttcaagggttcagccccatttgacttggggctgctgccttaagcagtgcaggtccaagatataagcccaagcaagacaagggttgtctccgcatcctccttcatgtgagatgtggcaaggcttgaaacctctctagctctgatgccttacagtaagattagtggctgtgttagattattgatgtttcatttgaacactgacaattttatgatcctatgctttctctcagcaactagtcttctggattttttcatttatcatccagccatcaggacttttacctaaattctagatacaatggctgattgttctgcaataacattttttattgttcctaaaaaagcttgttttgaatattcaaacataagttgtttgatattgagattttttaaaatgtaccttgccaaagaaaagggaatgcaggaatacagaagccaactaagatactcttactgctagtatttattctcttgccacagctttaaaagtgcaaaccagataataaaattatgaaacataaatggaaccaagcaagaagtctgtttgtttgtttgtatttttagtaaagatggggttttgacatgtggccaggctagtcttggactcctggcctcaagtgatccgccctcctcggcctcccaaagtgttcggattacacgcatgaaccactgtgcctggcctatatgtttttaagttacattattcacagaaatcgttaggcatgaatgtccttgtgggcatatagaaaaacatgatttcatgtcatttcaaaaacagaacccagactacttttgtgcagcatttcttaagacactttcccttgaagaaggaaatatgttagaggtgcgatatcttaagataagccttgagaaaaataaaatgaaaagaagtaggaagaaggaatttatgttttttttttaaaaagtgaggaaacattcaagttatgaaatattgctaagtgcatcacaacaagggttgcaatgacacagagaagatctgcagaatcctgcacaggaggctgtgtgctgggaatgtacactgttttactgtttttcagaggaggatgaatggaaggaggacttacagtcttctcagttgtatttggagcttagttctttgaccatgactttactgccataatttgataatgggcagaccataaagaatccatgcagtaaactctgcacggatgtgttcttggcacttagccattgtatctaaaatttaggtaaaagtcctgatgactggataataaatgaaaaaatccagaagactagttgctgagagaaagcataggatcataaaatcatcagtgttcaaatgaaacatcaataatctaacacaactactaattttactataaggcatcagagctagagaggtttcaagccttgccacatgagtcaaagggtaaaggcactatgtgttgtctttaaagagatatgccaattcttgccttgctcactgcaccacaatacttttctgtactgggaggagtaggctcagggaaaagaggctcttctctagccacagtgtgaactataatgcttctaagatggactgaggaatcaacaaatattcattctgtcaaatgagatgtaaaggcagatctgcacgagggcttcaggaaatgtttttctccctgataaaaagaggcaccaggaagatatagtttctttgtcttcctctccagaaggttgtgtgatggcctgaaaattgaagcaacattcatctttttgtagtcatgaaaagaaggccatgagaccacagggaaaccaagctagagttctgccatcagtgagtgctcaagaataacctggtctggagccatccaccccaaatctcttgtaatgtgggatacaaaatctctcattttatccaagactcttgtattgggattcttcaacttgaaggcatcacttggtaataaatactactgaggctactctagatgtgatgtatccctaccttctaggcttctctatggttggatctgcctctaaaccctgcctctagggttatatctcacagaccatagtcatgcaggaagtgtggtagggctttggccaacatgtatgaggtgaacacatctggctagcccgagttaatcgttttctgctcatcagcctgttgcctgatccacacaactatgattctgcttctatttcttctctagaacactagcttcctttttaggtgggcctcaggtaaaatctggccctgttgcgtgctaccttgacacctggaatgacaaggcctcctttccattgctttagaagtggtcatctgatcaattgtattaggacaacctagcggctttcaaaagtgtggatgcccggtctcctcccagctccccacagtccatcaggaagggtcatgtcagcaagcctcccagatgactcagaagtgggttaaagctgaaagttccacataccttctgactgttctctcaccgggcccatgcatgaatgaacataaaaccaggttcattgcctctacctgcctgggtttagaatacatccaccacctggatctcctcttgcttccttgtcctcaccaggtcgaacctgcctgagtctgtcatttcatctgagcctgcccttggatggccccactgccccaatggggcaagccccttggtggtgtccattccctcagtcccatcctttctgtcttcatctttctctccagtacctgtaattaagctcaactcaattatgtcatctcccagatgtccactgataccgtgtccccatgaatgacctctatgagttaatcaaaggaaactcagattttaaaaaattgcttaaaataaaagtataagccatcaactaatgttcggtgcatgagctgggtcagcactgctcaactacttgaagaaatcaagatgcctttgatgtccttgtttattttgctttttgttcctctaaaaaaaatctcttaagagaagaaaaaattatattttgcctattttaaaaataacagaattaagataatctatggtttgcccgaagtcacgcagtactcatttgagccaaaatctcattgtccaactggtcccaagagtcctttcaagtaacttcgtcagctgtcctttgccagcatgtaatgcagtgatgcaatgctctggtagtaatttggaacaatccaggaagcaatattctcagtgttcaaggcccggcactgcccgggggaaattaaaccttatctaccccagcacatgatgcatgccattctccttgagagggcttttctgctgctgcaacgggaaaatgcaatcagtttcacccatcactgagttctacagacttttgtgtttttttttaatttactaataatagggcaattaatgtaattttaagaagttttctttcctttaaaaagaggctggcctgtgctcctaattaaaactgcttttcacactctgaacaaggcttcagatttcgattggcaaaatcccatagcgcttggcctagagggtttatttttaagggtctggtgagattttgagtaaaaaatgattagtgaaattgctcctcatcctaactagagcctgcaaaacagcgaagagttctgtagtcactggtgtattcatgacaaagtaattatttttctacttagccagaaggaaatgggaggtttctttgaaggcttgagatctgcttcttagaatgggagaccgaaatctttaacagctaatggtatttgtttgagttctttgaactgtcagagcataaattaggtcaccacaggtcccatttcgactggagcattcaaaaccagtatatcctcatggccattttgagagttatcatgtaaacaagcaaaaatcttccatcttcagaaacccttgtttgatgctatattccaccaactcctgccctcttactctgtccttctcttcaaggtcaatgaacagtttttaagccttagcttctttttcctcccagcagcatttgaccctgttgatcatgcctttcttgaaatccccttgttcttttgattccttaacaattattctcactggttctcttcagtcccattgcccccagttccaaatccaagtgcttatccagccaatttttgctcttctccaaatgtaagctgtcagcccacagctaaaagagagatgaggtgagatcacagggattaggagttgtttgataaattgtgttttctttagtagatatattcaatagaactctctctgattgagcacttgaaatgtggccaacgtgattgaagaagtaaattgttaaatgtaatttaatttaaattaattgaaagagccacatgtgacaaatggctattttattggacagtgttttgtgaagtcttgccacataaaatgtggtccatgggccagtggcttctgcatcacctgggtgctggttataaatgcctactctcaggctcctccctggacctacagactcagaatctgcatcttagcaagatcaccagatgattcgtaagcacaataatatttgagaaatagtgctttagaagtttaacttttaaaccactagagtgacagacatgtgtacaacttctggatattattataccctgaagaaagtgctttctgtgaattcttacagagtcctccttgtcacattaatcagatatattgttgattatatcttgattgacattcctctggatgtcaaaattctaagataattgtttctgtaaacagttgagtttaatctactgatctgagctacatgtcattctttagtccagagtatatcatttgttagaaaaaatgccagctcccttcctgtgctctggggaaataaatagtttctttctttcataaagacatagaataaagaagatgaaaaaaattaaacctcattgtacagtaacctgtaaagaggtcacttgcttcttctatactaaaatcagactggtactctaaggcatgagtgaagatttgcacaaaacatttaaggatctaagactaaaaagaagatcagagaaaaagtctacattggacaaaatgttttttcattcattttatttactttttaattttgaatttttatgggtatgttggtgcatatttttatgaggtgcataagatattctgatacaggcatacaatgtgtaataatcacatcaaagtaattggggtattcatcacctcaagcatttaccctttctttgtgttgtaaacattccaattatgcttttacttattttaaaatgtacaataaattactgtagactgtatgtgtgtactagatcttattccatctatctaactatatttttgcacccattaacaattgaccattcccactctgccccctgccacttccccactaccctttccagcctctagtaaccatcattctactctctatcttcattggttcaattgttttaaattttagctcccacaaatgagggaggacatgtgaaatttgtctttatttgcctagcttatttcacttaacataattatctccagttacatccatattgatgaaaataacaggatctcattcttttttatggctgaatagtactccattgtgtatatgtaccacattttctttatcccagatttctttgagttgtatcccaaaagcacaagtatcaaagcaataatggacaacagggatcacatcaagttaaaaaaaaatgcacagcaaaggaaacaacaaagtgaagagacaaagaatgggaaaaaatatttgcaaactgtctgtctgacaagtgattaatagatacaatgtataaaggagctcaagcaactcaatagaaaaaaatttgttaatgaacacttagattgattccaaatcttggatattgtgaatagtaccacaataaacatgggaatgcagatatctctttgatatactgattttcttattttgggtaaatgcttatctgtgggattgctggatcatatgctagttttatttttagtttttttaaggaacctccgtactgttctccagggtggctatgataattcacattttcaccaacaatgtatcagggttcccattactccaccaccgcaccagcattcattattgattgtcttttggataaaagccattttaactggggtgagatgatatccaattgtagttttgatttgcattttctctaataatcagtgatgttgagtaccttttcatatatctgtttgccatttgtatgtcttcttctgataaatgccattttaaattagattattatattttttcctatttttttaacttgatgtgctccctcttgaccattatttgatactcatgcttttgggatattactcaaaaaatctgtgcccaaaccaacgccctggagagttttcccaatattttcctttagtagtttcatagtttgaggtcttagatttaagtctttaatcaattttgatttgttttttgtatgtgccaagagatagtggtctagtttcattattctgaatatgaatatcctattttcccagtaccatttattgaaaagactgtgctttccccaatgcatattcttggcacctttcttgaaaataagttcactgtagatgtatggatttatttattgattctctattctattccattggtctatgtgccgattttaatgctagtactgtgctgttttggttactatttctctgtaatataatttgaaatcaggtatgtgattcctccagttttgttctttttgctcaggatggcttcggctatttggggtattttgtagttccatataaattttaggtttttttttcctacttctgtgaagaatatcattagtatttatttatttatttttatttttttgagacagagtcttgctctgtcacccaggctggagtgcagtagcatgataatcagctcactgcaacctctgcctcccaggttcaagcgattctcctgactcagcctcctgagcagctgggattacaggtgtgtgccaccatgcccggctaatttttgtatttcttagcagagactgagtttcaccatgttggtcaggctggtcttgaactcctgacctcatgatctgcccatcttggcctcccaaagtgctgggattacaagcgtgagccaccacacctggccaatatcatcagtattttgataaggattgcattgaatttgtagattgctttgggtattatggacattttaaaatactaattctttcaatccatgaacatggaatattttttcatctttttgtgtcctcgttaatttcttgcatcaactttttacagttgatatggtttggctatgtcctcacccaaatatcttgaattgtagttcccataatccccacagggacttggtgggaggtaattgaatcatggaggcagttatctccatgctgttctcctgaaagtgagtgaattctcagaagatctgatagttttataaggggattttccccttttgcttgggacttcttgctgccaccatgtgaagaaggatgtgtttgcttcccctcccaccgtgattgtaagtttcctgaggcctccccagccatgctgagctgtgagtcaattaaacctctttccttcataaattcccagtctcaggtatatctttattagcagcatgagaacagactaatataataaattggtactgcagagagtggggtgctcctataaagatacccaaaaatgtggaagtgactttggaactgggtagattggaacagtttggagggctcagaagaagacaggaaaatgtgggaaagtttggaaattcctagagacttggagggctcaagagacagggagatgtgggaaaggttggaacttcctagagacttattgaatggctttgaccaaaacgctggtagtgatatggccaatgaagcccaggctgaggtggtttcagatggagataaggaacttgttggaaactggagtaaaggtcgctctttctatgcaaaaagactggcagcattttgctcctcacttagagatctgtggaacttttgaacttgagagagatgatttaggatacttggaaaagaaatttctgaacagaaaagcattcaagaggaggcagagcataaaagtttggaaaatttgcagcctgacaatgcaatagaaaagaaaagccaatattctgcagagaaattcaagccagctgcagaaatgtgcataagtaatgaggagccaaatgctaatcatcaagacaatgggggaaatgtctccagggcatgtcagagacctttttggcaacccctctcatcacgggcctggaggtctaggaggaaaaaatggttttgcaggctaggcccaggacccccctgctgtgtgcagcctagggaattggtgccctgcatcccagctgccccagccatggctaaaagcggccatggtacagctcaggccgtggcttcatagggtgcaagccccaagccttggcagtttccacatgctgttgagcctgcaggtgcacagaagtcaataattgagatttgggaacctccacctagatttcagaggatgtatggaaatgcctgtgtatctaggcagaagtctgctgcaggggcagagacctcatggagaacctcttctagggaagtgcagaagggaattgtagggttggagaccctacacaaagtccccactgggactctgcctagaggagctgtgagaagagggccactgtcctccagaccccagaattgtagattcactgacagcttgcaccatgcaactggaagagccacagatacttaatgctagcctgtgaaagcagcaaggaaggaggctgtatcctgcaaagccacaggggtggagctgcccaagaccatgggagcccacctcttgcatcagcatgacctggatgtgagacatggagtcaagatcattttggaactttaaggtttaatgactgcccttttggatttcagacttgcatggggtctgtagccccttcattttggccaatttctgccatttggaatgggagtatgtacctccattttatctaggaagcaactaacttgcttttgattttacaggctcatgggcagaggggacttaccttgtttcagataagactttggacttgcacttttgagttaatgctggaatgagttaagattttgggggactgtttggaaggcatgattgtgttttgaaatgtgaagacatgagatttgggaggggacaggagtggaatgatatggtttagctgtgttctcacccaaatctcatgttgaattatagtttccataatcgccacatgttgtgggagggacctgatgggaggtatttgaatcatgggagtggttacttccatgctgtcctcctgaaagtgagttctcacaagatctgatagttttataaggggcttttccccttttgcttggctcttctccttgctgccaccatgtgaagaaggacatgtttgcttccccttccaccatgattgtaagtttcctgaggtctcttccagccatgttgaattgttcccattaaatcttttttcctttataaattactgagtatcagtaatagttataataaaataaatttcattatagagacctattacttatttggttaagtttatacctatgtattttactttacttgcagctattgcaaatgggattatattcttaatttctttttcagattgtttgatgttggcatatagaaatggtactgatttttgtatgttgactttgtgccctgaaacgttactgaatttgtttatcagttctaatagtttttctggtggagtctttaggtttctccaaatataagatcgtgttacctgcaaacaaggataatttgacttcttcctttccaatttagatccactttatttctttctcccatatctttgctctagttgagacttccagtactttacttaatgacagtggtgaaagtgggcatccttgtcttgtttcagatctcgaggaaagacttagttgttcctcatgctgtatgatactagatgtggatttgtcatacatgactttttttgttgaagtagtttcttctttatccagttttttgagagatttttatcatgaaggggtgttgaattatatcaaatgttttttcagcatcaattgtaatggttatgtgatttttgtcctttattcttttgatatgatgtatcacattgattgatttgcatacattaaaccatccttgcatgtctggaataaatcccacttgattataatgcatctttttaatgttcagatgaattcagtttgctagtattttgttgagaatttttgcataaattttcatcagagatactggcctatctctctctctctctctctctctctctctctctctctctctctctctctctcattttttgatgtgtttttgtctggttttggcattagggtaataatggcttcatagaatgagtttggatgtattccctcctcctctatttttcagaatagtttgagtaggattggtattagttcttctttaaatgtttggtaaaattctgcagggaagccatgaagtcccagagttttctttgctaggagatttaatttcattacttgttggtgttctattctgaatttggatttcttcattggtcaatcttggtagattgtatgtatctagaaatttatcaatttcttttggtttttccaatttattggcatatagttattcagaatagtctctaatgacttttgaatttctgtggtatcagttttaatatctcctttttcatctctgattttatttatttgggtcttctctcttttttttcttagtctggctaaagatttgttgattttgcttatctttaaaaaaacaacttttcatttcattgagcttttgtgttgtagtatttcttttcttctaataattttgggcttagtttgctcttgtttttctagttgtttaaaatacatcattaggttgtttactgtttattaggttgtttattgattattagcttgcttattgaaaagtttctacttgtctgaggtaggtgcatgttgctataaacttttcttttagtatcgcttttgttgcactcctattggttttggtatattgtggtttcattttaatttgcttcaagaaatttttaaatttccttttttttttttgagatggagtttcgttcttgttgcccaggctggagtgcaatggtgcaatctcgacacaccacaacctccgcctcctgggttcaagcaattctcctgcctcagtctcctgagtagctgggattacagacatgtgccaccacgcactgctaattttgtatttttattagagacagggtttctccatgttggtcaggctggtctcgaattcccgacctcaggtgatgcgcctgcctcagcctcccaaagggctgagattacaggcatgagccactgtgcctggcctaaatttacttcttaatttattaattgaagcattggtcattcagagcatattgtttaattaccatgagtttgtatagattcccaagttcttcatattattgattgtagttatattccattattctcagagaagttactcgatatgatttcaatttttttaatatttaaagacttgttttgtggtctaacatatggtctatccttgagtgtaatctatgtgctgagaagaatgtgtattctgcatccattggatgaaaggttctataaatatctattatatccatttggtctatagtgcagattaagtccaatgtttctttgttgatttgctgtctcaatgatctgtctgtccaatgctgaaagtggagagtgttgaagtctccagctattattgtattgcaatctatctctctatataggtctaataatatatgctttatatatctgggtattccaacagtgggtgcatatatatttacccaatatcctcttggtgaattgacccctttatcattatataacaatctttgtcttttttataagttttgtcttgaaatctattttatcttatgtaagtatagctacttctgtttttatttttatttgcatagagtatttttctagccttttattttcagtctatgtgcttctttacaggtgaagtatcttgtagatcattggatcttgttttttttttttcaatcctttcagccactctatgtcttctgattatataatttagtctatttatattcaatgtttttaattgataagtaaggatttagtatagccactttgctatttgttttctggttgtttcttggtcttgtcttccttcctttctttctgtcttctcttttctgaaagtgattttctctgatggtatgttttaatttcttgcttttcattttttatgtctgttacaggttttttgatttgaggttccatgaggcttgcacataacgtcttataaatcattatttcagctgataaaactttaactgactacaaaaacaaacaaagagaaaaactaatgaacactctatgctttaacttcatccacaccactttataactttttactgcttttctattgatatcttattatactatctctgcattaaaaagtcattgtagttattatttttgataggtgtgacttttagtcttcctactcaagatatgaataatttacacaccacagttacagtgatataatatcctgtatttgtgtactcattattaccagtgagttttgtaccttcaggtgatttcttattgcctgttaacatcctttcccttcacattaaagaactgtccttagcatttcttgtaagacatgtctggtgttgatgaaatccctcagctttcgtttgtctgggaaagtctttatttctccttcatttatgtagggtatttttgttggatgtactattctaggctaaaagttttttcccttcagcactttaaatatgtgacgccactctcttctggcctctaagctttccaatgagaaatctgctgccaggtgtattggagctcctttatatgttgtttgtttctttcttttgctgattttatgaatctttctttatctttgacctttgggagcttgattattaaatgtctttaggtattcttatttgggttaaatatgcttggtggcctataccattcttatacttaaacatgaatatatttgtatattttggaaaggttctctattattatccatttgaataaacattctaccctgatctctttctctctgcttccttattaaggccaataactcttagatatgcccttctgaggctattttctaggcttgtaggcatgcttcactctttttttcttttgtttaatctgtgtgttttcaaatcgcctatccttaagcacactaattccttcttctgcttgatcaattctgctgttgagacacagtaatgcattctgcagtttgtcaattgattttttaattccagaatttctgcttgatttaaaaaaattatttcaatctctttactaaagttatctgataggactctgaattccttctctgtgttatgttgaaattcattgagcttcctcaaaacaactgttttgaattctgtctgaaaggtcacatatttcggttactctgggatcggtcactggtaatttatgtagcttgtttgatgtagtcacatttacttagatgattttgaggcttgtggacattcactgatatctgggcattgaagagctagatatttattctaatcttcacactctgggcttatttgtacctgtctttcttgagaaggctttccaagtattcaaagggaattgagtgttgtgatttaagtctttggtcactcactgcagccacatctgcattaggagacaccccaagcccagtaacaatgtgacccttgcagacttgtaaaagcatcattttggtggtcttgggtaagatctgggtgaattccctgaattcccaagcattgtctctggttcactttccatacttttcccccaaacaaatggagtctccctgtctgtgatgagctgcctggagttggggaaggggtgatggaaccactcctgtggcctccattgctgggtcacacctgaagccaacacagtacggtctcacccaaggcctgtggagactgttgcctagctatcactgatgtttattcaaggcccatgggctctttagtcagcaagtggtatatccttccaggcctgtgtcttttccttcaggtcaacaggttcccttctggcccaggattgacctagaaatgttatctggggaatagggcctgaaatcaggaatttaaggagtctacttggtgctttattttactatggctgaactcatacccaagttgcaagacaaagtccttttactcttccctctcctttcctcaagcaagagtctctccctgtgtctgccactgccctggcccatgctgactactgcctagctactgctgatgtttatgcaaggcccaagggctctttagccagcaggttgtggtgaatcctgccaggactgagtccttcctttcaggacagcagattcctttctggcccagggagctagggcctggaacaggggcttcaggactctgcttggtgctttattttactgtggctaagttgatattcaagctacaaaacaaagtcttctttgttcttccctcaagtggaagaagtctcagagctgtgtgctgtgatgcctggagttgggggaagggtgatgaaagcaatctcttggccctgacatctcagctggtgtctcactaggtcacatgcactccaagtccactggagtgcccaggaattgcacttcttgtgacctagactatctttctttcaaatttatttaggaccctgagcactttaacctgcagtggtgaagctaactgaagctcaggttcaggccactaagatgagcgattctcctctggaatgctccctccatgggcaaaagctggattctgcctggtgttgctctccattgttacagggaagcactgatttccaatgcaaagccccacaattactcacttttcctcctgcaagcacacaaattatctctccatgctccacatggtgctgtggaatgatgggaaaggtgtgtttcaagactgtctttcttaccctcttccattcccctttccttgatctgatgttaaaaccacatactgtgattgctcacctgaattttgcttcttaagaaggtgatttcttgtgtggataattgttcaatttgatattcctttggcaggatgataaattgagggctttatttagtcatcttgctcctccctctctcattcttgattgaatgtacccatgctatgggatgcttccaaagtgttaagatatacaatgccctcaactgtgaactgggatcagaaaacaattgacttttatttttcactcatctataactaaatctgtcatttccatctattataaatatagacaaaaaaggagaattgtattagagaaaccagtgtctctgtcaccagtaggaatcacagatcatttaacattacactgcaactgtggcaaattctcagaataccatttatgcaaatcatgacttcaatattacagtgaccattaaacctgtcactagatactgtatttactatactaataaagaaacacatatattaatattaaaataaagatatacagtgccctaaaaaggctgtctttggaaatggagaaacctccagctgtaggggatttgagagatccctttgggtaccagttctggttaagaaaggaggatggactgagaatctcagagccagggcatttcaatactttctactcaggctgcctctctgggttctgttccttccctgcaaaataatgtatatggatttgatagagcctttttttaggtcagttctcctcacattcaacactgatcccagaaaagttttgaaaatgaagttaagaatgattaaatagctatctacaaaagaagggttattccacgactattctcagaaaatcatgtatagttagaccatcattgaaaatattgaattacttgaacaaatatgtgcaaggcattattctgggcattgggaaataacaataaacaatatagttagggccatgtggaatatattgttagaaaagtgttagctaaatcagcaactgctaattctcaaacctgtttaccctccctgtttacactgatcaagactataaaatgccaggtgggggtgccttgtttgattttaaagtatagtgactaagtccactaagatattggaggcagaatatctcagcagaaggcggacaaggaacccatgccaagtaatagggcaataaaaacatctggtggaaagtcatatgcaaagaattcaaatagaataatgtgatagtgcttgagcagtttcctaacactgtggcagtcaaagcagccttccccaagtaggtgccattaatactgagaatggaatgaccagggactgccccacatgtggaagtgagaaaagcactccaggcagagaaacccacaggtggaaagatcacaatgcacaaagagctgggtgggctccaggagcaaaataaaatccaagggatggagcgtggcatggtaggaattatggtcaagcatataaaaggaggatgtcgtaggccagcataaatctctctctgtattcattagagatcccttctagtggctaatctcaactctcttgctgcacttaaaatcatttatcattttgttagatgtagagagcactcttatagggcagggtatgcatttataaatatttgaagactaatatccacagctttcaaccatccaagacttttgtgtgccaactatgatttcattatttgagactatatctagactagaaaataaatgccagataataattttttttttaacatgcttgttttcttggtcctatggatgctcagaaatgctgccttggatcaccttcctctgggggaggagtgagagagacagaatgtcctttgtgggccttcatctctcatctgcaaagtggaagacagggatgggataacctatctggacacttctcatttgaaatctcatgtctcaatggaagaaaggtctattgtaccattgctgggaaatctccgttttgtggtttctcctcaggctacctctctgggttctgtttcttccctgtaaaatactttagcaacagaacccagagagtcagcctgagtggaaagcactgaaatgccctggctctgagattctcagtttatcctcctttcttaaccagctctgccacccaacgtgaccatctcaaatccactacagctggagggttctccaaattccaaagatggcctttttagggcactgtgtatcttaacactttggaagcatcccagagcatggatacattcaatcaagagtgagacagagtgagacatgcacatacgcagagaaggaaagatgaataaagagagatactttatgaatgtaggtgcctagtgtgaagagcctacacactactcctagtttctaggttggctaagactctgggattttttagatcaaacagggcaccaagcctggcatctcaagtttttggctaatgacttttgagtgtaaacaggtttggaaattggcagttgcagattttgttaccactttcctaaaaatacttcagagtggcaatttaaggactctagagaagaaaagtgacctccacccattctttcaggagcagagattgcccagcaatggccatttcaaatggcacttccatggaaaaggagaagtgagcaagttggtggcatctccagcagcatttgctttggacttgcctcagccgaggacagattgactttgtcttctgaaaatgaaattaggctaatcatttatgttaatgttttaatttaacagtttagagggggaaaataattatgtttaaagaattttaattctctaggatttaaaaataaacttctacttaaaggttaagttccaactcaaaaataagattccagatagcaaaaagaaggtggaaaatgaagccatagatagttaatgtgtctgccagagactatctcaaattccttgccatgtgtacatcatggggcagtggaaataaagacttggaacacaaaccctggttttcatctttatcttctccctaagtagccctgtggccttgtggtaaattcctaaactccgaattggggtggcttcatctcttaaataagagaattatattattctggagtaaattatttctgagctctcgtattaaggaattgttagttttctttaaaatcttggcactacccaagaaaaaagtgctgaattctgagtatagtaagaaaatatatgaaacacctgcattcttctagctgtgttgcaaatgcaatatgtacagattttagtactttgaaatcgtaatatcatcaatgtgaacaattaaagtttgtgttggtcatagttccaaattgtagctgatttttatttttatactccactcttggtcacatctaacttatttcttagtttgtcctttgttagacaagcaatccctaaatatagcacggtttctatgggaacatacattctcctgaagattccaggaacacgttttatctgaaaaataaggaactgtcagataatacgtccaaattcaggactataacccaggttttatatttttgaattaatttcatttaagtagagttgtttaaaattagttgaaaaattggtttcatgtgaaattttccagctgagttgaattggtacatatttgattttgataataagaattaaaatcttatcttttattgagagctttttttgaaataattaagcatatggctccataacatttggattctgttgttttacatctctgtggccacaagcactgttggatgattgtggagcagatggcacaggtggggacaatacttactcttttccaaagcaaatgagaactttatcagttgttacctaaacgtaggccataacgcacttgcattatgcatttttgtccttttgaattcctgtagctgagcaataatatgatttggtgctgagttttcctgtaactgctagttccttccatctttagggtgtagtcacccaatacttcctcaaaagtatgccttgatgtcttagcacagctacagatgactgtgaagttagggcagaaagtgagaaggttgacatatgaaaattaaaaacttttgaggaaaacaaccctcattgttgaagttacatcaccagaggattggacttcaaagaaaaccatatgtccaaatggcagttgatgagagaagggacctttgaaaatggaaaattatagttataaatattggacgcttactgctgagaatacaaaagtctcacaggaagtcatgccacaggtcgttttcattctgaatgtgaaacatttggggcaatacataaaagtacaatgagaaacagcattgaaaaataccttttaagtgtttcattttaataagaaatatttctgaaaataagacattgagagtgaaaatgaagcatttacttatgagaatattctcgaatgtgtttcaccactaactgtagagataaacattcctttgtggctgggatggctcatctgggctcttcattttcactgttcctccttgtgagccttcagtctaaagctattctctcgcttcctcatttttcacatggttttaaagactgttgaggttagcgaagtcttggttccagtaaactgctctcattgcctgccctgatcatgattagcaaatgactatggtaaattatatccttataaaagataatattaggagtaatattcccctgaaatactatgaaaaatatcacacggtgtacatccactgtgatattaggagtaaattccccctaggatattatgaataatatcacagggtataatatcacacccactgtgatattaggagcaatatccccataagatattccaaataatgtcacaggatgtacacaacaggtgtacatccactatgatattaggagtaatatccccataagatattacaaataatgtcacatggtgtacaaaccgagtgtacacccactggaatattaggagtaatattcccctaatatattacgaataatgacacagggtgtacaacattggtgatattaggagtaatatctcactaagatattacaaataatatcacaaggtgtacacccactgtgatattaggagtaataagcaactaatacattacaaataatatcacagggcatacacacaagttgtacacaaactgtattattaggaataatatccccctaagatattatgaataataacacagggtgtacacccactttaatattaggagtaacatccttctaagatattatgaatgatttcacagagtgtgcacccactgtgatattaggagtaatatctccctaagatattatgaataatattacagggtgtacacaccgtgaggtattcgtagtaatgtccccctaagatattacgaataatatgacagggtgtacatccactgtgatattaggaagaacattccccaaagatattaagaataatataacagggtgtacctccactgtgatattataaaaaatatcttcctaagatattatgaataatatcaccagatatacacgctggtgtacatttactgtgatattaggagtaatagccttctaagatattatgaataataccaacgggtgtacacaccaggtgtacacccactgtgatattaggagtaatgtcccttaagatattaggaataatatcaaaaggtatacacacactgtgatattaggaggaatatccccctaagatattacaaataatatcacctggtgtaaacccactgtaatattaggaggaatacccttctaagatattacgaataacatcaccaggtgtacaccaactgtgatattaggaggaatatactcccaaaatattagaaataatatcacagggtgtacacccgctgtgataccaggaatatccccctaaggtattacgaataatatcactgagtgtacagccactgtgatattagaaggaatatcccccgaagatattatgaataatatcacaggatgtatacccactgtgatattaggaagaatatcctccaaagatattaggaataatatcatagagtgtacaccctctgtgatgttaggaaaaatatccccctaagatattacaaataatatcacagggtgtacacccattgtgatattaggaggaatattttcctaagatattatgaataatattacagggtgtaaacccattgtgatattaggaggaatatctccctaagatattaagaataatatcacaggctgtatagtcgttgtgatattaggaggaatattcctgtaagatattatgagtaatatcacaaggtgtacacacattgtgatattaggaaaatattcccctaagataataagaataatatcacagagtgtacacccactgttatattagaaggaatatcctcctaagatattacaaataatacacagagtgtacactcactgtgatattaggaggaatatccttctaacatattatgaataatatcacagggtgtacacccactctaatattaggaggaatatcctcctatgatattacgaataatatcacagtgtgtacaaccgctgtgatattagtagaaatatccctttcagatattacttataatttcacagattgtacacacactgtgatattagaagaaatatctcccaaaatattacaaataatactgcagcatgtacaccgcaggtgtacacacactgtgatattaggagtaatttccccctaagatattagaaataatatcactgggtgtacacccactgtgatattaggtgtattatccatctgagatattatgaataatatcaccggctgtacacccagtatgatattaggagtaatatccttctgagatattaagaataatatcaccgtgtgtatacacgcttctatattaaaagtaaaatccccctgatatattacaaatactatcactgggtgtacacccactgtgatattaggagcactatcctcctgatattataaattacttttaataccactgtacacccactgtggtattaggagtaatatccctgtaagatattacgaataatatgagcaggtgtacattcactgcgatatcaggagaaatagcctcctgatatactacgaataatatcaccaggtatacatccactgtgatattaggaaaaatatccccctaagataatacgaatagtatcacagggtgtacacccacagtgatattaggaggaatatccccctaagatattacgaataatatcacagggtgtatgtacattcacagtgatattaggaggaatatcttcctaagatattccgaataatatctcagggggtacgctcactgtaatattaggagaaatattccctgaagatgttatgaataataacacaaggtttacacccactgtggtattataaggaatatccatctaagatattacaaataatatcaccaggtgtaaacaccaggtgtacacccactgtgatataaccgggggtacacccactgtgatgttaagagtaatatcccctgagatattactcctaatatcaccgggagtatacacccactttgatattagaagtaatatttttcaaatatattactcctaatatcactgggtgtacgcatcgggtgaatattcactgtgatattaggagtaatgccactctaagatattgtgaataatatcactggttgtacacactgggtgggtacaaatatctttctaagatactactcctaatatcagggtgtaccagttgtacacccactgtgatattaaaagtaatatttccctaagatattatgaatatcatcactgagtgtacacccactgtgatattaggattaatagccccctaaggcattacaaataatatcaccgggtgtacacactggtcgtacacctactgagatattaggagtaataccccctaagatattacaaataatatcataggttgtccacacactgtgatattaggaggaatattcctctaagatattttgaaaaccatcattgggttcccccctccaataatattaggaggaatacctctctaagatattacaaataatatcaccaggtgtacacccactgtgatattaggaggaatattgccctaagatattacaaataatattgcatggtgtacactcactgtgatattgggaaaaatatcccactaatacattacgaataatatcacagggtgtacacccattgtgatattaagaggaatcccccctaagatattacaaataatatcacagggtttacacctattgtgatataagaaatgccttcctaagatattactaataatatcacagggtgtacacagcgaataatatcgctgcgatattaggaggaatatccccctaagatattacaaataatatcacaggttgtacacccactgtcatattagaagagatatctccctaagatattatgaatatcacaggatgtacacccactatgatattaggaaaaatatccccctaagacattatgaataatatcagtgtgtacacccaatgtgatattagggggaatatccctgaaagatattatgaataatttcacagggtatatacccactgtgatattaggagaaatatccccctaagatattacaaataatatcaaagggtgcacaccactgtgatattagcaggaatacccccctaatatattataaataatattacaggatatacacccactgtgatactagaaggaatatcctcctaatataatatgaataataatacagggtgtacacctattgtaatgacaggcagaatatccccctaaagtattacgtataatatcacagggtgtacacccactgtgatattaggataaatatctcccaaagatattacaaataatacgacagggtgtatacccactatgatattaggagaaatttccccgtaagacattatgaataatatcacagggtgtacagccactgtgatatgaggaggaatatccccctaagatattccttataatatcacatggtgtacacccactgtgatattataaagaatattattttaagatattatgaataatattacagggtgtacactcactgtgatatcaggaggggaatccctgaagatattacagggtgtacacccactgtgatgttaggaagaatatccccataagatattatgaataatatcaccaggtgtatatccactgtgatattagaagtaatatccccctgagatattaccaataatatcactggtgtacacccacagtgaaattaggagtaatatccccctgaaatattgtgaataatatcacgtgtgtacacccactgtgacattaggagtaatatccccctaaggtattatgaatagtatcaccgggtgtacacccactgtgatattaggagtaatatcctcctaagatactatgaataatatcaccgggtgtacacccatggtgatattaggagtcatagccttctgagatatgactcctgataacactgtgtgtacatccactgtgataccaaaagtaatagccccctgagatattactcctaatatcaccaggtgtacacccactgtgatattagcagtaatattcctctaagatattacaaataatatcagtgggtgtatacccactgtgatatgaagaggaacatcctcctaagatattacgaagaatatcaaatggtgtaaaccccgggtgtacacccactgtgatattgggaggaatatccccctaagatattaggaataatgtggacacactgggtgtacaacgactgtgagaggaggaagaatatccttctaagatattatgaataatatcatagggtctacaccccgggtgtacacgcactgtgatgttaggatgaatatccttctaagatactataaataatatcacagggtgtacacaacgcatgtacacccactgtgatactaggatgactacacccctaagatattacgaataatatcactaagtgtacacacctggtgtacacccactattatattaggtggaatatccccctaagatattatgaataacatcacagggtgtccacatactgtggtattaggagtaatatccccctaagagattacgaataatatcacagggtctactctcactgtgatatttccagtaatatttccctgagatattgcaaataatatcacagggtgtacacccactgtgatattaggagtcaacccccccaacatattatgaataatatcatagtgtgtacattcactatgatattagcagtaatatccccctaaggtattacaaataatatgacagggtgtatacccactgtgatattaggagtaatatcccccgaagatattatgaataatatcacagggtgtacacccagagtgatattagaagtaatatcccccaagttattatgaataatatcacagtgtgtacacagcaggtgtacacccactatgatattaggggtaatattcccctacgatgatattgcaaataatattacaggttatatacccactgtgctattaagcacattgtaacaggaaaagaacaagtaaatagtttgtatagccatttgtttctgagtataatacagatccaaaaatgtctttacttggttttaataagcaagtaccatcccagaaattaagggtttttgaaagataatgttacgagtggttgtgcagtcataggatagggtcttgagggatatgaaaagtgattgtgtaacttatcccctccttctgaatttgtccttatgaatttaaatatttgtaggtttctgagaggcaatttaagcagaatgggcttttgcacgttgtgtttgtgaaatatctttatgtccattatagaaggacacatgacgttgacacttcaataacctataatatgtcagagagtctgttaggttctttgcagatgtgatctaacttcctacctacaaaaatcttacaaaataggcattatcattctcatttttatagctgaagaaacagctacagagttaaatatctgtctcatgattcaccaggtagtaaggtgtggcactacctgtctgtttccaaacatcacactgccttaggagatatgttcatataaaccatggaagtgataaataatttaggtttttcattctcttgaaattattttaaaagatcctgtatgcttagacttaaggatgaccaatattttaaaactaaatcagtatcatatttattgcttgttaagtcatataaacctactctattttacccaaaagcttataagcattacattttatatatatatatacttctaaaaatgcatattttaacacataaaacttagatcactatgtcagttgtaattatgtttttaagttgccataaaatcttattgagggtagtaaatatgccaagtccaatataatctatcacaaacaaaaagattacttattctaggaagattctgtagtagcagaggaaaagctctaagatatttagactttcactgtggaataacttttcactctgatagaatcaaactccaatctggccaggtaggcaggagatacatgaagaaaatgacacaggtcttcccagagagaatattttgagctgttggtgcctgggtttctcatactgtcagaaaaaagtctggaaaagttattgtttgtttttaaacagttagatatttactaaatagctattgatgcaaccataattttatggatcgtaactatgtttctgcccctacttacagtagagaggaagaggcaaataatgtcatcttgtggttgttgttttgccataagaaccataacatttatatggcttttttttttttttttttttgagatggagtctcactctgacacccaagctggagtgcagtggcgtgatctcggctcactgtaacctctgcctccggggttcgagcaatccttctgcctcagcctcccgagtagctggggctacaggagcgcgccaccacgcccagctaattttttttttttttttttttttttttttttttttagtagagacagggtttcaccatattggcaaggctggtctcgaactcctgacctcgtgatccaccagcctcggcctcccaaagtgctgggattacaggtgtgagccaccacaccctgccaatttacttaatttttgaatagccctttaagtcaggcagtacaacctttctcgcttcacagctgaagctctgagaagccaagtaactcacggcaggcccacagtaactaaatgacagagttggcacttatttgcagggtggcagatcgacaatgctctgtccttctgctgcgtgatcactgccccttaaactctcacttaaataaaaactaaaaagaactatcttcaatccccaacatttcaccaaaatgtaacacatcagtgcaagaagagattcaggtctaaaaagaaaggactgtaggaaatatatatattatatgctactttctgctcaatagatcccacagaaaatattctaaaatgttgtctgatatactgtcttacaataaatacacatgattagtgtctttttctctacgttttccccagttggatcgcatgacaataggagaacgacctttatatatctgacctaagtgtggactggatgtatactgatcctgcatttacttaaaattttgttatttttttcatgatattttgcattaatttttattttaaaaatgttgcttcaaaatattatttattttgtttcctgtgttttttggcccttccctaaattttacccctgaagctaatatgtctcatactagccctgaccctgatatgtgtgcttaaacttgtctgtagaatacctaggtgcacagctctgaattttatattcaaacaaacttttgttgttaatttatttcaccaacttctgtctcttaaatatgtttggtaattgggtggaatctctgacaatttttttttggtatataggtttggtttttaaataattatctggggttgccaaattcaataatattaatacacagttgtttagcttcaatatgtttatcataattttgtaaaacttttcacttaggggtttgtccaagctctgcatggcaaaacatgtagatgatcaatacatccaccctgtcagactcctcaaacatagacttagatcactgtgacatgcattgtaggataatcctcatgacactctacagtgtggttgtacttagtggcactgcaggaatggttatgatgttacgtatgatcttcaaaacaaatagccaatcaatgatcggtacaatcatcttcaatatcatagtgctgcactccatcctcctggtcagccttccgttccacctcagctattatgtcttagtcatctgggagcttggatttctttacctgccgagtggttagcatcatatatgggcatatgtactttacttttgttttctgtgtggccattgtcatactctgattactcatttatgttaagaaactccaaatgcaacagttacaaaactaccatgtagtagttttaagcattattatttggatggtgggttgcctcatttttgtcaattttttttttttttttacagtatggcatagatccaagttactcagaacaacgatgctttgaattctgcaaagatcttaaccacagagaattcattatcatgaactactctgtgattgtcactacggatgacaatggttgtgatcctcttcctgatacagacagctgtcatcattcaactgataaaagctctttgacctgacatgtggacccatcaagagtatagaccccaaatcaagagtttcttcttccttctagtaatagttgtctgttttgtaccccaccatgcattctgggtacactttattcaaaataattcagagagaaaagcttctaacttagttctttataatgaaatttatgttgctttaacgactgtctgttgcctggatatgctgtgtttcttaagtggggttatacattaagcattcctatgtctcttccttcacagtattttcccacctttgtgataaaatgctttaactgaatgagtgttactgtgatttcaaaatttttcatcttaatcatcatcagaattgttttttttcccaaaaaggtaatgaggattgattgctcccctctctttagagaaccattaccagttctatatttaccatacaatatgttcaatctcttagctctatataagctgactgcatcattttttccagacttaactaccttcatgcagtacttaacttgagctaagcacaacaattggtttccctgtactctccagggaaatttgctcacagatttcacagaacaagataaatgtcagtgtactcaaattacattgtgagcaaaagttgtgacatttgctctctctttgagttctgaccctagaacattctttccctccatctccacctatcaattttttaagatccagagaacctggaaataggaacagtataaactgggctctagagaatacttaagttgacatagctgcttcttgaaaactactgattgtcagtaaagcttcagttactgtctttggtatttggaggaaaacattagctcggataggaagtcaacagagagaaaactctttcaggaatgactaggcataataacttgccattattattgttactataattattaattatatttgaaaatgctatagtagacccactttataattttgctaccacataacaggataaatggcagtgcactcaaattatatttaatcaattttcttagggcacatggtgtgttttaagtcagtcttctcaagatagacagtattcattattgtcagtactcaacttactaattcattaggtttcacaagttcgtttttaatatggtaggcagcctctaagaggagctccaacgattcctgcctcctaatatttcctgtataatgaccatgtggaatctcctccccttttactgacttcttattaatagaacaaggcagagtgatggaatgtcatttccaaggttaggttacaaaaaagctgtggcttccatctcgagcactctttctgtctttcttggattgcttcactctggaggaaaccaggtcataaggcagccctatggagaagcccatgtggcaaataattgaggccttctactagccatgcgagtgagcttagaagtggatcttctgagacctaccaatagctgtggagcaagctcagaagcagatcctctcccacctctcccatttgaaccttgagatgttggcagcctggctgggaattgattggtgcttcatgatagaccctaagccagaaccactccgctaagctgctgctagattcctgacttgaaacttgttgttttaagtcctcatgtcttggagtaacgtattatgcagcaatagataacgaatatagtaagttatttacacctatagaatgctgccacataagacactagtgtctgacatttacaacctgcttcttagtctctgcttattccagttgctgatgataaaaatatatccttgcctgttgtttgagtcaataagaactgtgcctggtactgtattagaagttttacttctatgcctgaaaagtaggggtatgagcatataatgtacatggagatacactgggctcatttagagtaaagattgcaagggggtcagttgaagagtgggtaagaattgctctgttagtcatgttgaaatctggaccattggttctccatatgtggccctggaccatcactaccagcagcagtagcacctatgaccttgttagaagtgaaaattctaagaaggaaaaatcagtggagctccacctgagacccactgattcagaaattctgggtgtgggttagaggttcaacaagccctccaggtgattttgatgcaggctaaaatctgagaaccactgcactggattaagttgataaattgaaaatgggcacaaattctttgaaactgctccaattgagaggtggaatttatatctcctataatttactatgggtggaatttgttattgcttcaaccaatagaacacaaggaaagtggtgctgtgccaattctcagctgcaggttttaagaaactagcaacctccgcttcctgtctcttgaagcatgggttcttggagcctgaactccatgaaagaagtctgacttgcatgctgcagaacatctagagatgcctgagattacatggagatacatggagatgtgcccagatatagccagacttccagtgaaggcaccaggcacgtaaacgaagaagctgtcttgggccctccagaacaacctatctgccatgggaataccactatctgacctcagcccacacaacatggcgcagaagaattgcccactcaatactgcctaaattcctgatccacacaattatgagagaaatcgttgctttaaaccactagattctaggattatttgttacataaaaatagataattgccacatgtattatttaaaattttctacttaccatattaaaaattttaaaaggaagaggcaaaatccacaataataataatataatttgtttaacccattatatctagctagctatcaatcatctacttttctttctatttatctattctagctttctttcttttatggattctgactttggtgctgtctttaaaaagtagtcaccaaacccagggtaatgtagattttttcctatgttatcttctggtagttttaaacttttgtgttttacatttacgtatgtgatccattttgaattagcttttgcgaagggtgtgaaatctgaatctagattcatattttttgcatgtggatgtccaattgtttcagcaacatttgttgaaaaggctagcatttcttcattgcattgcattttcttctttgtcaaagatcaattgactctatttatgtgggtctatttctggcctctctttttcattgatctgtttgcctatacttttgccagtaccacacaaacttaattactatagctttgtaatatgtcttaaagtcaggcactcttcatcctccaattttgtgcttctccttcattgtgctggctattctgggtcttttgcctttccacataaatcttagaataactttgttgatatccacaaaataacttgctggaattttaattgggattgtgttgatcctataaatcaagttaggaagaactgatgtcctgacaatattgagtctgcctctccgtaaacacagaatatctcttcatttactgggctcctctttgatttctttcatcagctttcctcatgtagatcttgcacatattttgttagatttacacaaaagtgtatcattttggggggcacaaatgtaaatgttattgcgtttttaatttaaaattccacctttcattactggtatatagaaaacagattgacttttgtataatacccatgcatcctgcagccttgctgtgcttattagttttaggaggttttattatctggtttgttctttctgactttctacatagatgactgtcatttgtgaacaaagatggtttttatttctccttgcccgtcagtatgctttaaaaaaaaacttcgtttatttggttagctaggacttccagtatgatactgaaaagaagtggtaagaagaccatccttgccgtgttcacaatcttagtgggaaagtttctcatttcttatcgttacgtgtaatgttagctgtcagttttttgataaatattgtaggggaggcaaaattttacctctacccttgtaaagtcccagttaagcctgagaattaaattgacttaagagagtaatgggagagaagcatacaaattgaatttaaattttacatgatatggagtcctcataaggaaatgatgatccaaagaagtggcgagtttgtatgcttttatattaggttgaacaaagagaggtagtcatggaaaagtaactaaattatatggggaggctaatggaaggtagaaaaggtagaattattttaacaggatttgtttgcccagaattctctggatatgattctctattgaaggatgtttcttttctcctgctatagagggggcatcttccctatgagtttttctcttctgttttcaggaagaaaaggggaagattagaatgccttcttgcaaatgatgttttttaagtgcctttagtctgaagtaatactatgtcaaagtggcatattttgaggtggcgtgttatgtcacccttcaatattccttatctagtgtcctctattcctagtttactgacagctttattgtgaaagcatcttgaaatttataatgatttttatgtatccattgatatcatcatgtgatttttcttctttagattgctgatgtgatgaattacattaattaatttttgaatgtcgaaccagttgcccaccagggataaatctcactatgggtgtgatatataattcttgttattcattgctggatttgatttgttaatattctgctgaggacttttgcgtctatgatcataagagatattggtctgtagttctgttttcttgcagtgcctttgtctggtttgactattatggtgatgttgacctcatacaatgagttaggaagtattccctctgtttctatattctggaagagattgtagaggattggtataatttcttccttaaatgtatggtaaaatttaacagtgaacccatctgggcctggtgctctctgttttgaaatattattaattattgattcaatttctttaatagatatagtcctatttagattgcctctttcttcttgctttgtcagattgtgtctttcaaggacttggtccctttcgtctaccttatcaaatttgtgttcatgcagttgattataatatttcttgattatccttttattgtctatgggatctccagtgatgtctcctctttcacttctgatatgaagaatttttttttttgattgacctagctagaatcttacctattttctaggtcttttcagagaacgagcattgggtttcattgattttttcctgttaatttcctatcttcaactgtgttgatttatgttgtaattttcattatttctttttttctgattaccttgaatttaatttgctcttccttttctagtttcctaagatagaagcttagatgattgatattagatctcccttcttttctaatatatgcattcaatgctataaatttccctttaagaactgcttctcctgcacccctcaaacatttataagttgtgttttcatttcaatttagttcaaaaatttttaaatttcttttgaaatttctcttttgactcatgtgttatttaattttgtttgatttccatgtagtttaggattttccaattatctttctgttattgatttctagtttaatttcactgtgatatacaccagatattacatgacatttctattatctttgatctcttaaaatgtgctttatggccaagaatgtggtctattttggttaatatttcacatgagcttgagaagaaagtatattcggctgttgttgtagagagttacagatgtccagatgattgatgttgctgttgagtaaaactatgtccttgctgattttgtgcctgctggatctgttcatttctgataggaggtactgaaatcttcctccataatggtagattaacctatttctccttccagcataattagtttttgcctcatgtatttttactctgttaggcacatacatgttaaggattgttctgtctttttgggtaattgatttctttattattaagtaatgtccttctttacccttcctaactttccttgttttgaagtccattgtgcctgaaattaatacagtgattcctgctttgttttcattagtgttagtatggcatatttctccttttcccttcccttcccttcgcttccctttcctttccatcccttccctttctttctctctctctctctttttttttttttttttggcaagtttttgctctgttacccaagctggagtgatcatggctcactgcagcctcaacctcctgggctcaagtgattctcctgcctcagccttttaagtagctgggactacaggcacatcccaccacatgcaggttttttttgtttttttttttttttaatggagacaaggtctcactatgttgcccaggctggtctcgaactcctgaactcaagcagtccccctgtcttggcctccaaaagtgctgggattactggtgtgagccaccacacctggcccatccatctacttttaatctatgtgtcattatatttaaagtgggtttcttgtagacaacatgtagttgtgtcatttttttttcatccactctgccaatctctgtctttcaactggttattttataccattgacattgaaagtgattattgatatagttgaattaatatttaccatatttagtgttttctatttgttgtttttggttctttgttcttattttgtctttcactctttctctgccttttgtggttttaattgaacactttatatgtttccatattctctcctctcttagcatatcagttatgccttttttcacttattttagtggttgccttagagtttgcaatatacatgtataactatttcaaggcaacttccaaaaacactgtactatttcacagctagtgcaggtaccttataataacaaaataattcaaactcctcccttctatcccttgtatcactgctgtcattcattttacttgtatgtaagcatatataagcacagatagacatatatgcataagatatacacataagtatacataattgaatgcatagttgctattattattttaaacaaactgtgctgtggagtgaatgaagacactgattgttttgcttgtacctccagcacactgaagccaccatattcaaaggagtccagtctgtcttcctggtgagcccctgacctctctgctcttcatcccctggcttggacctgcagcacagccatcctacttccacctgaatgttctcattggcagcagctccatgtctttctggggtggagttccccgaggcaactgacagccccctataactgccactgcagtggatgcccacccttgctgccaccagactgggcaaggaacaaagagcccgagtgctttattcacacctccatgccacagctgctctatggagaagaggccagactgattttacagcaagcctccaatcctccagctcttcaccgggaagggccgcctggcttgaggcccacaatgcagctgccccacccccagctgatcattttgattggtagcagctctgtgcttctctggggtgaatccttcaaagacaagtgaaaggccctctgccattgccactgtcaaggtccccacccctgccacccccaagctagggagagaacaaaaagcttgagttcacaaaggggctacagtgcacagcctgggagtgccaagctgagatatatggccaacacttgagtgggagaggggcccacactctcagagcactgagagagagcatagctgcaattgaggaaatacagaggaaccatgtggctgggtaagagcctatctaccagccattacggttaagtgccatctactggatggaagcccaaactttaacaccaaaaatacattgctaacatacctccccataaaattaaggacaagaattcagccacaaataaagaccctgcacaaagcatcagccctctgaaaacatccagaaacaaattcaactgactgtactcaaattacaccacagttaaaggcacatcagcccacacagatgagcaaaaacgcagggaactctaaaagccagagtgttttcttattcccaaatgaccacactagctcctcaatgatgtaggagttaaaaagaaattacttaggcagacagtgaggtaagaaagtctttagtaaggttttccttttaatgaaaagcagcccccaaatcattttcttttctaacaaagagcaacctgtaaaatcgagctgcagacatagaaaggcaagctagaagtttgcacggggaagtgatggcagctatgccagtaggaaaggagctacctggggactaggcatgttcaaaatgtcagctccttctttccttttctttgccaaaccatatgtacagtaaggcgaagacaacatggcgctgacagggcaaatatcccatttgcataataagattagggtggggaagccagcttcctcacatgctatgtaaatgtcaccctagtctaatcaatctttgggtcctatgtaaatcagacaccgcctcctcaagcttttttataaaatcctgagcactccactgtgggccagaagtcccatttgggcacccctctctaaagcaggagagagaagtgttctcctttttctttcttttgcctgttaaacctccgcccctaaacctacctcttgcatatgcatacttgatttccttggcatgagatgatgaaccttggttatttaccccagacaatgatgccgcttcaccagtgatggttctcaaccagaatgaaatggctaaaatgacagacatagaattaagaatctggatagcattgaagatcattgagattcaggagaaaattgaaactcaatccaaggaatctaagaaatccagtaaagtgattcaagaggtgaaaggcaaaataggtattttaagaaagaacaaaactgatctgatagggctgagaaactcactaaaagaatttcatgacacaatcagaagtattaacagtggaatagaccaagctgagaaatgaatctcagagctcaaagcacagttcttcaaattattttaatttcaaactattttagtcagacaaaaataaaacaacaaagaatttttaaaatgaacaaaacctttgaggaatgtgggactgtgtatagagaccaaacctacaacacattggcacccctgaaagagagagagagagagaccaagcaacatagaaaacaaatttgaggatattatccacaaaaatgtctccaacctcactagataagtcaacattcaaattcaggaaattcagagaacctctgtgagctactttacaagacaaacatccccaagacacatagtcatcagattcttcaaggtcaatgcaaaagaaattatgttaaggcagctagaaagaaggggcaggttaactataaagggaaccccacaacattaacaatagacctttcagcagaaaccctacaagtcagaagagattgggggcctatattcagcattcttaaagaaaagaaattccaagcaagaatttcatatccagccaaactaagcttcataagtgaacgagaaataaaatctttttcagataagcaaatgctaagggaattagttaccactagacccgccttacaagagttgcttaagggagtgctaaatatggaagtgaaagaccactaatggccaccacaaaaacatacttaagtacatagactatttacactgtaaagcaactacacaatcaagtctacctaacaaccaagaacatgatgacaggatcaaatcagcacacatcaatattaaccttgaatgtaaacaggctaaacacctcacttcaaaggcagactggcaaattggataaagaaacaggactcatagatagctcttattattttgagatacgtcccatcaatacctaatttattgagagtttttagcatgaggggttgttgaatattgtcaaaggccttttctgcatctattgagataatcatgtggtttttgtctttggttctgtttatatgctggattacatttattgatttgcgtatattgaaccagccttgcatcccagggatgaagcccacttgatcatggtggataagctttttgatgtgctgctggattcggtttgccagtattttattgaggatttttgcatcaatgttcatcaaggatattggtttaaaattctctttttcagttctgtctctgcccggctttggtatcaggatgatgctggcctcataaaatgagttagggaggattccctctttttctattgattggaatagtttcagaaggaaggtaccagttcctccttgtacctctggtagaattcggctgtgaatccatctggtcctggactctttttcgttggtaagctattgattattgccacaatttcagctcctgttattggcctattcagagattcaacttcttcctggtttagtcttgggagagtgtatttgtctaggaatttatccatttcttctagattttccagtttatttgcatggaggtgtttgtagtattctctgatggtagtttgtatttctgtgggattggtggtgatatcccctttatcattttttactgcgtctatttgattcttctctctttttttctttattagtcttgctagcggtctatcaattttgttgatcctttcaaaaaaacagctcctggattcattaattttttgaagggttttttgcatctatttccttcagttctgctctgattttagttatttcttgccttctgcaagcttttgaatgtgtttgctcttgcttttctagttcttttaattgtgatgttagggtgtcaattttggatctttcctgctttctcttgtgggcatttagtgctataaatttccctctacacactgctttgaatgtgtcccagagattctggtatgttgtgtctttgttctcattggtttcaaagaacatctttatttctgccttcatttcattatgtacccagtagtcattcaggagcaggttgttcagtttccatgtagttgagcggttttgagtgagtttcttaatcctgagttctagtttgattgcactgtggtctgagagatagtttgttataatttctgttcttttacatttgctgaggagagctttacttccaactatgtggtcaattttggaataggtgtggtgtggtgctgaaaaaaatgtatattctgttgatttggggtggagagttctgtagatgtctattaggtccgcttggtgcagagctgagttcaattcctgggtatccttgttgactttccaatatcatactgaatgggcaaaaactggaagcattccctttgaaaactggcacaagacagggatgccctctctcaccactactattcaacatagtgttggaagttctggccagggcaatcaggcaggagaaggaaataaagggtattcaattaggaaaagaggaagtcaaattgtccctgtttgcagacgacatgattgtatatctagaaaaccccattgtctcagcccaaaatctccttaagctgataagcaacttcagcaaagtctcaggatacaaaatcaatgtacaaaaatcacaagcattcttacacaccaataacgacaaacagagagccaaatcatgagtgaacacccattcacaattgcttcaaagagaataaaatacctaggaatccaacttacaagggacatgaaggacctcttcaaggagaactacaaaccactgctcaaggaaataaaagaggatacaaacaaatggaagaacattccatgctcatgggtaggaagaatcaatatcgtgaaaatggccatactgcccaaggtaatttatagattcaatgccatccccatcaaactaccaatgactttcttcacagaattggaaaaaactactttaaagttcatatggaaccaaaaaagagcctgcattgccaagtcaatcctaagccaaaagatcaaagctggaggcatcacgctacctgacttcaaactatactacaaggctacagtaaccaaaacagcatggtactggtaccaaaacagagatatagatcaatggaacagaacagagccctcagaaataacgccgcatatctacaactatctgatctttgacaaacctgagaaaaacaagcaatggggaaaggattccctatttaataaatggtgctgggaaaactggctagccatatgtagaaagctgaaactggatcccttccttacaccttatacaaaaatcaattcaagatggattaaagacttaaatgttagacctaaaatcataaaaaccctagaaaaaacctaggcattactattcaggacataggcatgggcaaggacttcatgtctaaaacaccaaaagcaatggcaacaaaagccaaaattgacaaatgggatctaattaaactaaagagcttctgcacagcaaaagaaactacaatcagagtgaacaggcaacctacaaaatgggagaaaattttcgcaacctacttatctgacaaagggctaatatccagaatctacaatgaactcaaacaaatttataagaaaaaaacaaacaaccccatcaaaaagtgggcgaaggacatgaacagacacttcttaaaagaagatatttatgcagccaaaaaacacatgaaaaaatgctcaccgtcactggccatcagagaaatgcaaatcaaaaccacaatgagagatcatctcacaccagttagaatggcaatcattaaaaagtcaggaaacaacaggtgctggagaggatgtggagaaataggaacacttttacactgttggtgggactgtaaactagttcaaccactgtggaagtcagtgtggcaattcctcagggatctagaactggaaataccatttgacccagccatcccattactgggtatatacccaaaggactataaatcatgctgctataaagacacatgcacacgtatgtttattgcggcactattcacaatagcaaagacttggaaccaagccaaatgtccaacaatgatagactggattaagaaaatgtggcacatatacaccatggaatactatgcagccataaaaaatgatgagttcatgtcctttgtagggacatggatgaaattggaaatcattctcagtaaactatcgcaagaacaaaaaactgaacaccgcatattctcactcataggtgggaattgaacaatgagaacacatggacacaggaaggggaacatcacactctggggactgttgtggggtggggagaggggggagggatagcattgggagatatacctaatgctagatgacgagttagtgggtgcagcgcaccagcatgtcacatgtgtacatacgtaactaacctgcacattgtgcacatgtaccctaaaacttaaagtataataataaaaaaaagtaaaaaaaaaaagaatattaaaaaaagagttgattagctattaaaatgtacaatgtaaaaatttaaaacagcatgaattattcttcaaaattctatttccttatataatatgacatgaaatacaaagtttttaataatttattttgaggactaagaagtattaaaagatctattagtctgttgaaataaaacatgttaaatggtatacaatttatttatgtggaaaaaagcctatttttaagtagctgactaaacctgaaaatgattgaaaatataatgtttaatataccattaatggaaattaaattactgggagaggaaaaaaaaagaaacaggactcaactatatgctgacttcaagaaacccatctcgcatgcaagtacacacataagctcaaagtaaatagatggagaaagatgtatcaaacaaatggaaaacaaaaaagagcaggggttcctatttttatctccaagaaaacagactttaaaccagcaatgatcaaaaagaccaaaggagggcattgcataataataaagggtttcattgagcaagaagacttaactatccaaaatacatatgcacccaacattgtggcacccagattcatgaaacaagatcttaaaggacttacaaagacacttagattaccatacaataatagtgggaaacttcaacactccacgacagtattcaacagataatcaaggcagaatattaaaaaagatacttgagacctaaacttgacacttggctaaatggacctaaaatcctcttatagaacacttcacccaagaataaaatatacattcctctcctatgcacatggcacatactccaaaactgatcacacacttggccacaaagcaattatcaacaaattaaaaaacaactcataccaaccacacactcagaacacaacacaatccatcctggctaatgcggtgaaatcccgtctctactaaaaatacaaaaaagttagccagtcgtggtggcgggtgcctatagtcccagctgctggggaggctgaggcaggagaatggcgtgaacccgggaggcagaggttgcagtgagctgagatcatgccactgcactctagcctgggtgacagagcaagactccgtcttaaaagaaaaaaaaaaaaaagaacacgacacagtaaaaactaaaatccacatcaagaacatctcttaaaaccatacaattacatggaaattaaacaattggttcttgagtaatttggggtaaacaatgaaattatagcagaaatcaataaattctttgaaataaatgaaaacaaagataccacacaccagaatctctgggaaacagcaaaatcattgttaagaggaaagtctacagcactaaatggccacatcaaatttagaaaaactttaataaacaacttaatgtcacccctagaggaactggaaaaataagagcaacccaaccccaaagctagcagaagaaaagaaataactaaaatcaaagctgaactgaatgaaatagaggtaagagaaaaccatacaaaagatcaacaaaatcaaacattgtttttttggaaaaagtaaataagacttgtagaccactagccagactagtaaagaaaagaagagagaagatccaaataaacacaacaagaaatgacaaaggggacataaccactgagtccacagaaatacaaaaaaccctcagggactattacaaatacctgtatgcacacaaacttgaaaacagagaacaaatggatagattcctggaaagaacctctcaagattgaaccaggaagaaattgaaactctgagcagaccaataatgagttcagaaattaaatcagtaataaaaatcctaccaagcagaaaaagccctggaccagagagtttcacagccaaattctaccagacatataaagaagagctggtaccactcccactgaaactattccaaaaaattgaggagaagggactcctcccttactcattctatgaggccagcatcattctgatatcaaaacctggcagagacacaacagaaaaagaaaatttcagggcaatatctctgataaacatagacacacaaatcctcaacgaaatgctagcaaaccaaatccagcagcatatcaaaatgctaatccaccatgatcaagtaagctttattcctaggaggcaagaatgcttcaacatatgcaaatcaataaatgtgattcatcacataagcagaaccaaaaacaaaaaccacaagataatctcaatagatgcagaaaaggcttttggtaaaattcaacatcctttcatgtaaaaaccctcaataaactagacatcaaaggaacatacctcaaaatagtaagagctgtctatgacaaacccacagccaacatcatactgaatgggcaaaagctagaatcatttcccttgaaaactggaacaagacaaggatgcccactctcaccactcctattcaacacagtactggaacttctatccagagcagtcaggcaagagaaaaacataaaaggcagacaaataggaagagagaaagtcaaactatctctcttcacagatgatatattctatacctagaaaatcccatagtctctgcccaaaggctcctagttctataaacaacttcagcaaaattttaggatacaaaatcaatgtacaaaaatcagtcacatttctatatgttaataatgtcccaagctgagagccaaattaagaacacaatcccattcacaataggcactaaaagaataacatacctaggaatacagctaactagggaagtcaaagatttctacaataagaatgacacaacactgctgaaagatatcagagataatatgaacaaatggaagactattctgtgctcatggataggaataatcaatattgtaaaaatgcccataatgcccaaagcaatttataggttcaatgttattcctattaaactatcaacattcttcacaaaatttaaaaaatactattctaaaattcaattgaaaccaaaaaagagccagaataagcacagcaatcctaagcaaaaagaataaagctggaggcatcacattacctgaccccaaactatactacaaggctacagtaactgaagcagcatggtattggtacaaacacagtcacatacaccaatagaagagtttagagaacccagaaattaagccacacatgtaaccatctgatcttcaacaaagctgacaataacaagtaatgtgaaaatgattcccttttcaataagtgatactgggattattggctggctatatggagaagattgaaactggaccttttccctttaccatattaaaaaaatcaactcaaaatgtgaccagtcacagtggctcacgcctgtaatcccagcgctttaggaggctgaggtgggtggatcatggggtcaggagatcgagaccatcctggctaacacagtgaaaccccatgtctactaaaaatacaaaaaattagctgggcatggtggcgggaacctgtagtcccagctactcgggaggctgaggcaggagaatggtgtgaatctgggaggcggagtttgcagtgagccgagatcgcaccactgcactccagcctgggcaacagagcaagactctgtctcaaaaaaaaaaccaaaaaaacaaatcaactcaaaatgtattaggcttaaatgtaaaggctaaaactatagaaaccctagaagaaaacctaggaaataccattatggacataggccctggcaaagatttcatcacatagactccaaaacaattgcaacaaaaacaaaaactgacactgggacctaattaaagagcttctgcacagcaaaagaaactatcaacagagtaaatagacaacctatagaatgggagaaaatattgcaaactgcaagtcacatccaacggaggactaataccagaatcttaataaatcttaagcaaatcaacaagcaaaaaacaaacaaacccgttaaaaaatagacaaaggacatgaacagacacttctgaaaaggaagacatacacatggccagcaagcatatacaaatgctcactatcactaattattagagaaatgcaaatcaaaaccacaatgagatgctgtacacaagtcagaatggctattattaaaatgtcaaaaataacagatgctggtaaagatgcagagaaaaaggaacgcttatacattcctggtgggaatgcaaattagttcagccactgtgggaagcaatttggagatttctcaaataacttaaaatggaactaccattcaacccagcaatacctttattgggtttatacccaaagaaatatgaattgctctaccataaagatacatgcatgcacatgttcatcacagcactattcacaataacaaagacatggaatcacataaatgcccatcaagagtggactggataaagaaaatgcggtacatatacaccatggaatactactcagacataaaaaaagaagaaaatcatgttctttgtagcaacatggatggagctgaaggccattatcctaagtgaactaatgcaggaacacaaaaccaaatacttcatattctcacttataagtgggaactaaatagtgagtacacatggataccacaaagaaacaaacagtagacaccagggcctatttgagggtagagagtgaggtttgaaatattacctattgaatactatgctgattacctgggtgacaaaattatctgtataccaaacccctgcaacatgcaatttacccatgtagcaaacctgcacgtgtgccctcgaacctaaaataaaagttggaaagaaaaataaatgaataaaataaaatcaagggttttattttaaaaaagaatagtaacaataaaagttatttcatcctcttattccttctatttattgattgattgatttttatttttatttatttatttatttttgagacagagtcttgctttgttgcccaggctggagtgcagtggtgcaatctcggctcactgcagcctctgcatcctgggttcaagctcctgcctcagcctcccgagaatggctattattaaaatgtcaaaaaataacagatgctggtaaggatgcagagaaaaggggacaccaccatgccccactcattttttttttttttttttggtatacttagtagagacaggtttcaccaggttggccaggctggtctcgaactccgggcctcaagtgatccacctgtctcagccttccaaagtgctggggttacaggtgtgagtcactgcacctggccagatgtgttttctttctttatgtagatccaagtttctgagctatgtcacttttcttctctctaaagaactcctcttaacattttttgcaaggcaggcatactagcaacaaattttcggagtttttgtttgcctgagaaaaatctttatttcttcttcatttttgaagggtagctttgcagattacagaattttaggttggtggggatttcagacatcaatttgggaaaattctcagttaatattgtttcaaatatttcttctattcttttttctcttctggtattctccctcctcatatattactacttttgtagttgttccacagtactgagatattctgctacatttttatgaatttttttctattggcctttcaattttggagatttcttggagacattgtgaagctcagagattgtttcctcagctatgtccagcctaccaataagcccatcaaaggcattcttcatttctgttagtgtttttggtttgcattccttttggggactttcttaggatttccatctgtctgcttacattgcccatctgttcttgcctgctgtctactttctccattacagctcttagcatatgaatagttgtttaaatgctgggtctgatcatttcaatatccttgctatatctgggtctggttgggatgtttgctctgcctcttcaaactgtgtattttgccagttagtatgtcttgtaatttttcttgctatctaggtagacatgatgtgctgggtaaaagaaatggccataaataggcctttagtaatgtagtggttaaggtgttgggggaggaaatacattcttagtcttatgattaggtgtcagtctcgtagtgagcctgtgcctccggactatgaactttacacatgattctcaggttttatttttttctctcctttggtgagacaggatgaagataacttatgagcttactctatctagctagagtgagctggagttgggtatttccattccccaaggttagttaggcttgataccatcccagcaggttaggctcttcagtttctcctgagaacagtttttgttaagaacagaatgctgtggtatatttaaaaatgtccgttttaccctccccctgctaaaaatgtgaggtttttctctgaaatttactgttggaaccccaaaggaatttttgtctcatatttactgtgaaaatctcctgtggagatttctatgaatttctgcttgagaaaagttgtaatgccttgtgcctctttgtctgtctctccaatttggggagcagcagtttgtgctatgacttcacttctcttagagatctaagaagaattgttaatttttttcattttgctcagatttttacttgttgtcaggttggagaggcaacacccaatctccttgcatgtggaaacagctcatatattttattttgagctattttctgtaccatgttgtgttgtgtttgcctctttattgatattaaaacttctctacagcattcttacacaacagccttggtgttttgtatggttaaaataaggagatgatcaaagtatgattttattcatcacaatcatacagtttattgccacataaaaatgctctgctttttccaccacactcaaagagagggagaataaggagaataaacctcacagagaacacacttaatagacaaggtacattaagcacatagtgagtgaattccaattttgtttagagttcaattattaaagtctagctgctcaattaggatggaagcaggcatctgtgaatgtaaagtctaatggaggtttgaggcttatgttaaagcaaactaaatatggcctgagaaggactctgtaattctatatttgagtccttgtggatgaacttgtaacctagcttaattggcagacaaaattgaaaatctaacttaagggtatgcgcctgtaacaatagctgagtcttggccaaccccaggggtcatacttaaaccactcataggctgctaagtgttcaaactgtgttcaaataaggcaaacgccaacctgcaaccaatccagctgtttctgtgcctcacttctgatttctgtatgtcacttccctttttttggactataaatttgttctgaccatgaggcatccctggagtgtctctgattctgctgtgattctgaaggctgcccaattcatgaatcattcattgctcaattaaacgcctttaaatttaattctgctgaagcttttcttttaacacttaacctttctacaagaggttcttgaaagagacgtttgatgaacacaatgatatgtaagctccttcagtgctttcaaatagtgctggtgttggtgggcaaagctgtagagagtagctcaaaggctggcagaaagtaccctgccacactctaagctcttaatgtctgtcaaagtcttgggtttatatgtgttttggagtagttgaggccaataactcgcatatgtggtctgataaggtgttataacattcttctggggagagagattacactccatgctcttaccacagcaaaacatgccacccacatagaaaattatatgtttggaattttctatgtgaaaattaacctaagtagcctaacacttaggttattggtgctttgggtgaatgaatacaataaagtggaatagagagacaacaggagccataggacacaaaatgagaattctgctgactcttggaaatgagagcataaagtgtccaggaaattctaaattttggagaatttttggaaatatttgagaagtcagtgaatcaccacaggctgtacagttttctgcaatggtttgaatcattttatttggttgtgaaataagagtgacctcagaatgctagagtacttgtacatcaccaggttccacactaaatacatgatgacaatgatgataacaacggtgatgacaacactcaaggaggaaaaatactggcttggtatgctgtaaaaatttactctgtagcttttcttattcaccttagctggaatgcattgtaaggattcagttgcctgtatctgggcctcactgcaacttcttagagattttccttcatagtttgtttccgttgaaggctctcttactgctttttcttctattccccttactctccctattcaggctaaagcttattaagtgctggcactttatcagctacatttaaagcccggattcagggcagcaaccactgaaagcgtaccctgagacaaaggatgtaggtacacaccgaatgagctcctcaagtttctcaagtccaaagaatagttggcactgcatactggtaacttatcagtacacttcagagtgagttaaaaacaggaattattttagactctggataattacttattgttagctcttgtgcatatgcaggcttccttagctcagttaacccttccttcttttcccaaggcctccatcaccactctcatacactatctggggctccatcctatttttgcattaattcctttggtatttcccttttaatattttcattccaagcctttagcaaacaataaaattaaaaacaaaatgagcatcaagatacagtaggaaaattgccaacagatacttggcaaacatatttgtagagacatctatcgttgcccttgttacataataatttgtctctatggaattctctgtcagatatgccactgcccatttcaccaaatatttgagagcaaaaaatcagtgtcatctgattgtgtatgtttacctataaatcaaaactttctttaagcaaagaatgagagcttgaatctgtgaaatctaatattctgtcctcaagtatcatttatctgtttatgagactctgcctaggatggaagctgctaacataacagagaatagccaatgatctcacaacctgggcagatgtgagattgtgcaaacacctctcaatctagatgatgataaacattgatacttcagagtgaacgttatcaaattggagagcagaacagatctcagacattatctggatcaaatacagatcttttgattcactgatttactattctctgatattttccgccttcaccaggtatgttttcactttatagcaaataaatctttaataaaattgtgtgcataaaagttcactatcagatgctccattcacaaggaactacaaggaggataaactctttatctactttattaataccaaatctataatcttcaggcttagaaaggggatgccagctggatcaaaaactcccagcctttatttagtcaagggcccattaggaaacagatgatcctcacaaatcaaaataattcaaggataagaggctagttacaaaagtgtggagacagcatagagaaaccacaaacaatagtgaagtaccacactactactaacagcagtgctatcaatattcctaggcctgaatggcaaagggagtgagtgtttatcaaaggtggaaagagggaataatgtggagagagctgctttgaaagacgctctgatcttaggttcagaaacgcaaccatctcaaggcaacaccacagagcatcaaccggtggaatacttatcacaatcttattcttctccatccctcaaatcttttgttgttggggctgaattcaccagaagccagaaggcaagagagcctgttgatgtagttcacatagatcagcttctctgggtggagcagggtagacaactatggagaaaagtgttgacaaagcccctttaaaaaaagagtttcttattaaaacaactgcctccaaaaccaaagcaaaaagcagaggtaaaacttgtcagccatagtaagaaaataaaaggcaataaaatataagctggcatatctcaaagaataaacaaaacagaaatttagaaatcaaggccatgctgaaaacttcataatacagaattgaaattgctgaaaacataacaaaggactcagaaatcggaattattaaaagcaaaaataattatatgaaaattttttaaaacaaaaagaattaacaagaaaatgataattgttgaacacagaaaaggagattcaacatatgtattgttatcctctaagaagttattatttcagatacaacataaggattatagttagtaaaattgtattgtattagagatttttgttaaataagtaaattttagctgttcttgtcactatcaaaaagtaactatgtgagatgaagtaaatacatgttactcttcttcagtatagtaacaattttagtatatgtatgtattctataacatcatgttgtaaacctcaaactttaaaatttattttataaataatgacgaaaaccaaaaataaaaggaatctgggttgacagttctttcatttcagtacagtaaacatgttccactatcttctcacttaaattgtttctgatgagcaatcttttggcagctttaacgttgatcttctgtatataatatctcttgctttcttgtaactacttttaagattttacctttatctctggttttgagaaatttgattatgatataaattggtgtagttttcttcatatttcttgtgttcggggttttttgagctttttggatctgtggttttatacctttcatcacatttggaaaaattaagccaccatttcttcaaataatttttctgatgtttaccctcttttttgaggactccagttacatatatactgtgcttatggaatttttttccccagtttactgatatgcttttattttcttttttcttttttttaactttgaattatatattctctttttttattttttattttttttaaattttattattattatactttaagtttcttttaagttgtggttatatatatatatatatacacacacacacacaacataactcagtagtcttggaaccagattgagtttcatgccaaacaggtgtttctcaaggaggaagcaagacagcccacagaaacccttgtagccagccagagctccaacaagcccttgagagaccctgagactcccagatcttcaggttctatgtgcaatagatggaagccaaatggcaagatactagggagattgtccctcaccattctgcaggagaacaactcgtctggcaccctgacaccatgacaggtaaagcaagagaagggtaagcagtcttcactaagtgaaaatgttagtgaactaaaggaaggagccattcttggaactgggcaacttctgaaaagtggaagacagcatgggagcaaggccaggacaatgacaaggaaaatcagcactttcccttggtggagtgctaagccctgcatgaccccagcaatgcagtcacctagggcctggtggatctgtgttctctcaacccttctttcccagggatattgaggaagggcttgttttcttagactcctcctcaactaccaaactgggactaagagctttattggggaaaaaaaatagaattttaaaaacattgttaaagaatttttttttaaattctttgtttagctttttgagggactgctgaactgatttttacagaggctgcaccattttacattctcactagcaatgtatgagagttccagcttctccacatccttgtcaacacttgtgattttctatgttaggttttttgttcgtatgtttttaagccattcttgttaagtgtgaaacggtatctcattctggttttgatttacatttccccagtgactagtgatgttaaacatctttttatgaacttattggccatttgtatatcttttgagaaatgtcttatttatgtcttttgtccatttttaaattgagttttctgtctttttgtttagttttagttgtccattatttattttgaatattaaactcttattagatatatgatttgtaaatttttttcccattccgtagttgccttttactatcctaataatgtcttttggtgcacaaaattaagatcttttattttctttgtcagtctagctaaaggtttgccaatttgaaaatttcttttctaagaacaagctttttgtttcattgcttctttttattatttttcaattctctacttcatttatgttcactataatctttattatttcctttcttctactagtgttggttttagtttgctcttctttttctagttcctcaagatgtaaactcaggttgttaattttagatcttttttcttttcaattgtgtttacagctataaatttccccctgaacactctcttccctgcaatgatgcactcttgatttttaaaagttaatttttcactgtgtgtttgatttttggggagtatctttgttttgtcttcaactatgctaattttttatttctgtgatgtctaagctgccagtagtctcatcctgtgtttttcatatcagccagaatatttatctgtattattttgatatgaatcatttttatgtgtttgatatctcttctctactttttgaacatatagaacatgattatgattactgttttaatatccttatctgttaattctagaatctggcagctttattgattttctgatttttctcctcattttgggtcatatttacccgcttcttcacatgtctgacaatttttaattggggatgtccttcattgtaaatttcatctgattggatgttgagtatttttatgtttttataaatatgagtgtgctttcttctggaatgcagtttgatcatttcaggtgttgcttttaagatgagttaggtgaatccagatcagtgctcaatctcaggctatgcatttcccactatgtaggcaagatcttcttgagtaccgtattcagtgttccataaattatattcttcaatgtacctggtggtaacatctaccattctcagagctatgtaaacactggacactgcccctactaattctttcatattcttctttctccagactgatcagtattcagcggaacacttgagctcagggaggaggatagggactctgtaaatgcctgtggttctctctgttttgctgtctcctttcttctttctgttaccctgctctgcaaattctagctgcttgaattttcagtttggcctcctcagatcccagggatggcttctcattctgccagtttcccccttaggttgcaaagtagaaactttcacaaggcagtaagttgatcacagggctcatctcatttgtctttcatctgtcattgatcactgtcattctttgcttgatgcccaatgtattgaaaactattgttatagggatttgccagtttttaactttttcggggagtagggcaaatctggtctgtcttactacgtcttggccagaaccacaggaatttcatatgtaacaacaagccataggtattcatgaccttctttcatattctgtgggctgagcaatttgtctcagatgatataatgttaagatgacctaaatacagatgctgtaatcaaattttgtttttctgatttagcaatcaatcaatgagtcatttgtctgaacagacatcagtatctaacatcttaaaacattttagtcatgtaattcttcccccttccccatccccatatctgtcccttggcattccttcttctgcatctccattctattctaacttaatagtgatagaaattagtttgtgaaaatacattttctcaaagttcaggtagagtaaaattttatacggatatagtaatgaaaatatattaaagttatatctctgcatgacagtaaataataattattgaatgctcaccataagttagagatttttctaagccttttacatatttaaaatcattgaatcctcacagaaaccatttgataagttagtttataatctccagcaaagatattggggttcagggaggttaagaaacttacccaaggtcacaaagaccaccactacccaatattgctgtatggagattttacccccaaaaaagtgtatatgtttatgtgtggggagctaattagctaggaaaagccctaatgtaatatgctttatttattttcaaattactgattgcatagaacaatgttggcccaaacctaatgctattgtgaaaatggacttttgtcttattcattgtttccttggtaatcatcatatgtgtggatcataataatcctggtttaactgtcaatagtggtagtgagtcttcttccatcttgtcattctaaaagtcctgaattcatgatctacccttcagatctgatcttccttttacgtttctcattaactttgttaaagaaacattattctttgacacttattaaagatggtaaagaaggttctactaagaaaggggattatggtgatgagtgtaggaaccacgtcaataggagaagagagattgggtctgaattcaactccaaggaaaagtggagatttatagccaaggagcagagtgggagtcaatggatgaaaaattactaggaagaaatatcaagggttagggggattcttgctagacagactcaacagaattcttgttgaagacaactcaaggtgataagaatggagagtggttggatactaagggtgggaaattttcactaaactgacttagcaggattcttgctcagactggattctataagaatagagagggaagctgaagcttgggcccagttgagcagagggctcagaagagcctgattaaaatttggtcaaaggagagagagtctttgtcaatatgaaaggcatcattccctcacccaaacctgaaacttaggagatttctgtggttctccccctccctcacccctccacagagtaagtccgcaagtccccttgatgctaaaccccaaatatctctcgagtcagtctcttttgctccttactcacagtctctgccttagtttaggcccttggccgagctcctctgggttgcaccaacaggcccatatctccttatctcttgtttcacttcccacccacatttactacaattgccacagtgatgccacagtggtttttctagacttgaaaccttttcctgtcattcatctatcataagtcttcccacttaaaactttgagaagcttcatactgtttttgtataaggcccaaatttattatcaggcttattgcactccctatgctgcagccaagcttgcctttccaggcttgtcatgccctcacatgaattcctcacatcaggtaaagcatcaaatccacaggcacctccatacatctggctctcccatccctgtgactacacttacttcctgctgcaccttgaagtcccttcccccaaaatccctttatctccatcttcctccctctatgctccatgctcagctccaccttattgtgttctagtcttacctctagtcctttatggacagtggcgggagtgattaattactcctatgcatctgttgcaagaactcatatgccaggatttcaggatgctccttttctatctccagactgattatgagactcctcttaaccaactcccctgtcatcttacctgtgcctctattgcagtgactgtcatttggcaagctatgacatagtaccagacagggaaatcataaagagagaaaactaaattatacttctctctgtgtcctcatgctctagaataatgccttgctgttcaataaatatttgccagggaataaatgaatgaagaaataagctgagcaatttcctaacatttttccctttagaaaacagaaaaaaaggttgaaatctgaactcatacctgaaccaatcccagttgaccattttctactagtgacattagtgttgccattgaaatagtataaacataaaatgaaagtttgataaagtcacctctgataaaaatacataatatataacatgtataacatcacagaatatatattatatacatgtgtattataagagctgtcttttttatcttatatatgtatatacatatcttacatatacatgtatgtgtgtatatacatgtgtgtgtatatctatctatagatacacacatgcacacatatatacgataagaaaggagcttaacaggcagtgatatgtagatttctctccaatgaagcctgaaattattttgcgtgaacaactacaaatgagatgtgttacttttactgcggactgtttacatgagcataaactggatgctttaatcctttgttattttttcttgcatttcatacaaatttttaaatagttgtgattacagattgactggataaagtcacggccaatggatatggatttttaaaatggtaacatttttgcaccacagggatcctcaaagatgcttgtaatagaaataatttgcataaagacgctagaaaagttattgaaaatataagctatttaaatacataaaatggagaaaaacaatatatggaaaggctgtattttttctttcggtcatgctagaggaagcgcccctcctctcatctgacgtattttcttcacctgcacctcccatcttctatttcttcaacttctactctcctgactgttaaaaatcagcatttaaatatagtattatagtcaaacttcttcctccttgtttaaaaaagaaaaacgagccctccagcactcacattttttgggcaactgtctcttctctgtttccatttcttcacccttacgcttctggaaatagttgctgattctgtctccacctcctgtctttatagtctctcaagggactttcccagaccacgctactgaagacactcttatgatcaccactggcatctttgttgctcagtccacgtgagtgacattttatttggccagatcttgttttatttggccactctgtaacacttggcaatagtattgctgcctcagcagcatctcattctttgatttttatgacatcacttcttggttcttctcctgcctttttggctgttcctcctcattttccttcatcagctttactttcatgacctgttcctgaaagttgatgttcctagcgtatcctcctggaccctcactttctcaaactacacaaatttcttggccatctcctctgcttctattcccctaatgtgctgattatcaacacatctatatctccagcccaggtatttcctaagtatctttcatatccagtagtctccaatgtgttgtgtacgccttgcctggggtgtgcaatataaacctatgaggctacacaaagaaaaatacatgtatatttttgttgattttcttatctgaaatatgagaaaagatagtgctaatttattaatggttatcatatgcatcatcagtagtgtcctcaatggcttttcgtcctcctgtttccagttcgcacggacacactttgtctctggtttttcaaccaccacacatatgcaaaggtaccaggaagctcaaggtttgttgagtgtctcctacaaggagctggtcacataggaacatcccagctattggtcagccttgaccattaagctccctctccctccttatccctgggctccagcaaaaccaggtggtataggtctaaatccagttattattcctgagcaatgctgataaactggtatgtccactccaaaacaactcgcaaaccaatggttacagaatattatttactggttatctcatggcaaagttcatttttattttgtaaaaataaaatgttttaaatttgaggacacgtggctgtctaaattttgctatctaagaggtatatttgaaaaaattatcatcattatctattcccccaagattaaagtgatgttttgaaacagtgaaaaaattactgctttttgaaataactcatggtgaggaggtggaaatgtatgaaaaccaatatttgaaatttttctataattaacatggcttaatagtgaaaatgagcatgacttataaacccgctcacaattacacccttaaaataccttagcatcacaaattttctattgtgttaaaaaatttccccaaaagttacatttttaagtcatttgtcaaatgcaaacccctcccatttatttggtagaaaaagcaatttagattttttaggatgttgaaaagttacagagtaattgtaacaaaagtcttttcataatttttggaagatactgaaagataaatatcttttgttttaaatggcattttcttgtgagaaagtattttcagcattgaaataaatttaaaacttagaagcaggcatttgaatcactccatcacacaatattaaatcaagatttcaaaaacaatgaaatcatatttcaattacatttctcactaaatattaataacattaatatttgtttaagcatttaaatattaataacattaatatttggagaaagccatgaagttctgaactagtacgtaataaataagacgcaacaagtaaaaaatagcatatatttatatatttaatcagatcataatctgagttaacgtttttgttgttttttaacttttttttttttttttttttttggtagaatcagggtctcactatttttcccaggctggtcttaaactcctggctcctgggctcaagtgacccacccacctcagcctacccaaagtgctgggattacaagcgtgtgctaccacactcgacccatttttggttttgtttaagcattataacatgcagaagtgatgagtaataggaaaaatatttaatctattaagacataaagatatctaatttgatgtgcaggtttaaatagttttactggtgtaaatgtgttgtcaggtacctcctaatcctcttgtggatccatatactttcttctgtttttccttcagtcttgcagcagaccacccatctcactttgattcccccagtttttctgtttttccatcctgtcctctctccttcaacccattctccagtcccagtcagagtagggtttctaaaatgtaaaaatgagcagtcactttgctcagtagaaggctgcggtggttttgcttgccctcaggctgtatacccagttcttcatacctctcccaggctcctccagatctgcctcctgctgaccttgtacccagctgcagcgacaccgagctcctcacagcttcccaaagtgggctggcccctctcacgacagggtcatcgcacaggctccctctgtgggggaacacaacgggagtcatttcaacaccactttcttcaggaagcctattctgatccttggtactccaagcagctgttgtcaatgcctaccccaggtgataccatgccatactgattttattttcctggatacttaatcacaggtaaagtcactgaggccacacaaccctgaggagaaaatgcttgagcaggcaggattttgatgatattttgtggatgatactccattctcaaactgcctacattcacacttcttttcaccgagagaaaattaagccactatgcttttaaaccattcttacttgggttttgtgtaacatgcagcaacatggaattattacggatacaattggttctgacttgtatggatacacttatagaaaaacgtgtgaggatatattgaacagcaaagtactgatttttttcttattttgatttgtctctgatgaacacatatttctttatgtaaatgtattagaaggaattaataagaatatgttgaggaacaaataaattgccaaatcccagtggcgtagcacactgatggttgatttgtccgtcacacaaaggcccatgcaggttaactagggctagctcgagccagtgactcaaagatccaggctccttctgtcttgtgattattaagggtagtaaagaaaagagaatgtggcggtggcagaccccctgctagaaactgaaggtgccatttctagtcacaggccactggctagactacatcacatgaccttgcctgtcaggaactagcattgcagacttaccagcatgaccgagaaggaaatgagagcatatgtagggaagcacgcattgtctctaccaaaatgaaaatggaagtttaaaaatgcaagtactcatgggaaaggtaacacactgcacatcttagccactgtcttccctgactgcaatggcagagggtagaaggggagggaagaggtgcgcatatatggaggcgcatgtagattctttacaatttgtctcaggtgaggaagggttaatgtgtgtgctcagatgtgccagtgagtaaagaaaagagtatgttttcaagcttcgcaccaaatgtgaaagtcacttgtttcttttttcccttttaattctaaatctgagaaaaagcagtgctccgctttgaatttcaaatgtcttcaacattgaagtctgttaatcaggctattttcttatcagctctgagtctcaaatgctgcatctataagaagagaagtcctttccagttctaagagcagtgactgtgtgtggcttcaggaatgataattacacattccaaaatgcatcctggattaatttcttaattcacatctaccagagatgtgagtacccaatgcttaaagaactatggttccatgactaacaagaagtgattcactgagcccaacaagcaatctaatctaattgcctctaagtgttgtttagtaggggtaactttggctattttaatgaaatgtgaatttttagaaattatagacaacaaaacaaatgtgtgttcagcaattcctgcctacaggagttcacactcacttaaggaaggcaaggcacgtgcagttgaaacaactagcgaaaaaacaattctaaataaactagcgttgtataccgatataattaagtgctaaagtgtgcagttcaatcagataatataagatttggaaaagaaaggtgataaagtatgcccccagacaaaatggactccctgtggctaactgaggagctcaaagttaaaacagaactaggtgtccatagctgggtgacagaatggtcacatgttctgcgctctcagaaagatgttgtaaaagtatcaaaggacctcccattctacaatcaagctgaaccagctcctgttctgttgttgggctacaagataaactgctgcaaaaagcacagcacctgcccacacctcccagtgccgcaagccccaggccccattggccatttgaaagaaacatctgacagggactgctggtttggggcttgggaagcaaccagagatcacctcccctagccaattaaggctcagctgtttgggccaatcagaactcagctctgtcagccagtcaaaaccaaacaagactcaaccctttgtttgcataaatagacctggttgggaacctgggtggggacttttcctataaaaccccaggcatgccatcccttcattctctggaatggaccttcattttacacagcggcctgcatgtctgcctgatttgcaaacagttctctggaataaaatctctttcctccagattctttttcagagagcttttgttcacaaaggggataaaaagattaagctaagatgaaaatcagaaaaaaaaaaatagaatcactgcaataataaggctcattatttccaagatttttatgtatcctggtctgagtatgtccgtccttaaagcatatgaactgaaaagaataggaattggatttatgggttttgatccatttaaaatatcagtattacaaagttttctagtgaagttaaacgaatgcccgcaagtaatttttttacagaaacccagttgagaagggctgcaagaattaagagtattttgaaaatataccagagtaagcaaaaattgcaacatatgatggttaaaaaaaaaagctcagtagtatatcatattaaagatttatatattaaatataacagaatttagaaattatttatgtgtatgggacactgtttttatcattttttcacgtagagttgtcaccatcattcattgtgaagaacagtatatttaatattcataggaacatagtataaacattcttctatgtaatattaaattcacaacaaatggagtatttcttgggttacatgggaaaaaaaatagcagaatcttgctgagcctccccagacagattctatcaccaggacagctctttaagttcccagatgcgggtgcctcccttccttggcagaatgcctggtggacttggcagctgccttctcagcccttatcacagctgaggcttcctggggagtcacgcttctcctcttccacccactgtgggcgtggggtgccaccccacggcttctcctggtagctctgatgctgccactgcagtgaccctggcaccatctggtccctggatgtacttgctgacactgccatcatcatcacctgcacctctgccccaagacaaggttgaggatatttttcccagaccagtttccccagttggggatgtttgtcctaggcctagatgccattctagaatcaggaacttaatcaaatcatagatcttcacttgaagaaagcataatgtcgatggccatgaaccagcaatttttcttcctttctctcatctccctactcctttttagggctattctgcccagcctcatttccccgttctggatggcagatccatcttctagaaataactttcaagatggaactataatccaggtctttggttgtaatcgaggtcttctgggagttccgttttgggatccagacttatatcaaatcctacatttgcttctggggaaagttaaaattttgatatacaagagaattaaaaaaatactgtgccatcagagattaaaatgctaatggaaagtaattcaggagagaagaaaaattgattatgctaataaaaataatatcaatttggttgaaaatgcaaaatacagtttaggtcctcaggggccatggtagagagtgtggtaggattaatgagagaaggagtggggtagtccctgctttgtgcggggtctagtcttgaggggttattcttgctgttcatggttgatgtgtgacgacacctccatacttgtgttggaatcctagggatttctgggcatcggctcccacttctaaagacagggactctcctgtgtcggagcttttggggttctgctgagaaagggggaggctgagtagcacgaactatcatgattgattagtaacgtctgctacaaaagtgggagggtgggggacggctcatatggcaaatatttatcaccttaccccataacatgctttctggctgtattgtcaggctgctaggaaatgctttccactcggaactgagacctaaaactggaaactaggctgcaggaccacctgggtacgtgtgaattacagaggttcatgcatttccaaatgggggtgtcattttagaactggggcgtaagatgatgagcaacagaaaagacaacgccgagcccccgggtatgagctcagaactctttacatgtttgatgctccaaatggtctagggcaggggggcttcagagccttggcagcagaacgtggtcgcgtagatgtttatctgattttctgttgcgctgctgctcaaccgccactacggaagtgcacactgccaccttatggacgtcttgagaagttacacttacacgttattaattatattaaataaaattcaaatgtaataaataatgtcaggggtagtttttataaacatttgcaatgaaaattcatatgaggacttcagacagaatatattcaaatgaagagttgatttcgatttcactgatgaaattaaataacaggattaagatgaaattctcagctattttagcattttagtgtttttctgctactgagttgtgggaattccttatatgtttcggcttgtcataaatatggttgacaaatattttatctgattttatacgttttttcactctattgattatttccttggttgtacagaaactttttaattttatgtagtcccacttgtctattttttacttttgttgactgtgcttttggtgttgtattcaagaaatcactgccaagatcattatcatgaagctttctccctatgatttcttctagaagttttatagttggggtattacatttatttatttatttaaagacaagatattgttctgtcactcagctgcagtgcagtggcacaatcaaagctcactgcagccccaacctcctgggctcaagtgatcctcccatctcagcctcccaagtaactgcaggtaactacaagtgtgcactaccacaccaggctattttttgtggagacagggtttctctgtgtttcctgggctgatttcgaactcttgaactcaagtgatccttccaccttgccctcctaaagtgctgggattacaggtgtgagcctccaaccctggccaggtcttacatgtaagtcattaatctattttgagttgaatgttgtgtgtggtgtaatatacacatgtgaatatccagttttcctaacatttgttgaagaaactactgtgtattcttagcatctttgtcaaagatcaattaatcatatgtgtgtgtgtttatttctgcactctccattctattccattgatttatgtgtttatctttaagccaatacaatacagttttaattgcagtagctttgtaatatattttgaaatcaggaactatgatgcctccagctttctttttttttctagagattgttttggttcttctggatcttttatagtttaatatgaatcttaggattgtttttactatgtccgtaaaaaatgccattgggattttgatagaaattgcatttaaactgcagatcactttgaagaatatgattatttcaacaatattaagtcttccaatccatgaacatgggattttgtgaatattcttgtatggttttagcctaattagaatgtttctaatgttttgattttacatacaatgttagctgtaagtttcagacggaattatttctcaactcttagtttgttcagagctttctaaaattattattaatgaaagttaatcatttttggcatagacttggtttttaactttgattaagtccagttattacttttaaaattttatgatgactctttgtgttctaagaaatatttgattaccatcccaagattgtaaaaatattctatacttttggaaaagctttatagttgtaaacttttatgtgtaagtctgtgatccatctgaactacattgcatattttatgaaggtgaaggttcattattttccatatggagtttaaatttttccagcatcatttatttgaaagaatttcctttccctgttgaactaccttgatgtctttggagaaaataaattgacagtatgtgtgggactctttctgaactctgtatttttttcattgatctatacatggcattaccacaccattttaattgctgtagtttaatagtaaagtgcacgttttctaccttttttctttctgactcttctgggtacttgacatttccaaatcaattttagaatcagattgtcaagtgcaacaaaaaatggttgggatttttattatgattgcattgaatctatagaataatttcgattaaaagtgacatcttgggccgggtgcagtggctcgcacctgtaatcccagcacttcgggaggccaaggtgggcagatcacaaggtcaagagttcaagaccagcctggccaacatagtgaaaccccaccactgctaaaaatacaaaaaaaaaaaaaaaaatagccgggcatggtggcaggtgcctgtagtcccagctacatggaaggctgaggcaggagattcgtttgaacctgggaggtggaggttgcagtgagccaagatcgcattgcaccactgcactgcagcctgggtgacacagcgagactctgtctcaaataaaccaaaaaaagtgacatcttaacaattagtcttctaattaatgaatatgatacacttttttggtttctttaatttttttcagcaatactttgttgttttcagcaataagatatatttctctttttaaatttatgacatatttttatcttctttgatggtattgtaaattttaaagttaattttattttccaaaccttcgatgctagtttatggtatacaatcaattttttatatttaccttgtattttgcaactttgcttaatcatctattagttctagtaggttgatttttccccaagattccttaggatacaaaatcgtgcctttgcctgtatgtatatatttttttcaatctttatacctattatttatattccccttgtattgcactagctagcacttcaatataacatttagtagaattgggggaagcagacattcttgacttgttaaaggtattatgggaaagtttttaataattgaccattacatataatgttagccagaggtgttttatagatacactatatcaaattggagcagtttgctaagagattctgtgtgtgtgtttatcacgaatgaatataaagcttatcacattattttcttcatttatttatatcatgatatagtttttctcttgtattatgctaatatggtgaataaatgcttcattttcaagcttgcattgatagataaacctcatttggtcatgacacgtgatctttttcatgtattattagaatcagtctgttaatatgttacatatatttacatctatgttcatgaggtatattggtcgataagggttatgctggcctggaagcagacacatgtcaggatatattcctctttctctattttgtaaaatagttcatatagtattaaattatttttcttatttgggcataaaatttcctttatacaaatattttaattatatactcagtttaagtaacagatacatggtaattcagtttcttgttaccctttgctaaattgtatttttcaagtaatttttatttaatctaagttttaaaagcttatggcataaagttgttgtaatattccatcattgtgtaacttcattgctatgaggtctttagtgatatgccctctttcatttacaatactgaaaatttgtatatagcctatttttcttatgtagtctagctttgggtttgtctttttctatctttattaaaaaaaccttgtatgtttgtcagcttccatttttttgttttctatttaattaattttctaacttttgttagtttcttctctcaattcactttgaaaaataagtcatttatttcagctcataagttgtaacttacatccttattctgaacatgttgtattctctaatataagcatttatagtttcccactaagaactgcattagcaacatccaacaaactttgatatggtatgttttaattatcattcaatttaaaatattttctaggctgggcttggtggctcatccctgtaattccagcactttaggaggctgagggggtggatcgttttgagctcaggagtttgagaccagcctgggcaccatggcaaaatcgtgtctctacaaaaaaatacaaaattagctgggtgttagtggctcacgcctgtaattccagctacatgggaagctaaggcacaagaatagcttgaacctgggaggcagaggttgcagtgagcagagagaacaccactgcactccagcctaggcaacagaatgggatcctgtctcaaaaataaataaataaataaatacataaataaaatatgttctaatttcccttttgatttcttgtttaactcatggattatttggtagtatattgttaactttcaggtatttcagactttaccattattgtattgttcttaatttctaacttatttctattgtgatcagagacaatatagtgaaatatgtaaatatttgaagtttattgtgattttattatctggcttatgattcattaaatattcaatgtgcatttcaaaagaaagtatattctgcagttattcagtaagtgtcaatttagtccagatgattgacagggttgttcagatcttccgtaatcttactgattttatatatttatatcaattattgagatgtaatgagttatctgtttttcatttaattcaggaaatttttgtttcatatattttgaatctctgttcttaaatatacacacatttaaaatacttatgtctccctaataaacccttttatcatcaggaaatatttgtctgtgaaaatattccttgtactgaaatctactttgtctgacattaacatggtcatgtcggcattcttactttttacattatattttttccatttttgactttcaactcatatatatctttaattgaaaaagcatgtccttttgccagatgctatatatcatgggtattctaattttgcattttgagtatagaaatgtatgtcaattgcctactagaataataaaatagaaatgtttaaaataacacaacagaactcaaaattgttacaaggctggctttattatctacaatgtccagttttattactaaaatttaccagatatgtaaaaagatggaaaagtatgacctatactcaaaaaagggcaatcaatagaaattgactgaatgggcccaaatgttataattagtagacacagatttcaaagcagttgttaaaaatatgttgaataaattcaaaaaagttcaataattaaataaaatataatgttaattaatagactagacagaaaatcccaacagacaaatgcaaactatgcaaaatgtaaattctaaaggtggaaagtacaataactgaaataaaaaagattcactagatgagctcaacaaataataaatgacaaaaaatgtataaacttgaaaataaatcaacatatgttatctgcacccaaagaatgaattaagagaataaaactaaacagagttacagagacctgtggggcaacatcacactctcacatatgtgtaattggaatacgagattgagaatagagaaagaaggcaagaaaatgttagaaggaatatgatcaaaaacttgaaattcgatggaaaatattaacgtaggagtctgagaaactcacaaaacacacgcagaataaatgcaaagaaaaccaccactaagcatatcatagtcattttgttgaaagccaaattaaggagaaaatcttgataggcagagaataatgacatattgcatactgcagaacaatgataatgttaaatactgatgtctcatcagaaactatggaagccatcatactttagaaagatacattcaaagcactgaagagagggaataaaaaacatgtcaagcaagaactctgtatccataaaacatttttaaaaatgaaggaaaaattaatacattttcagataaacagaactgagagcgtttgtcactagaagacttacattacaagtaatcctatagtgttctgcagactgaagagcgatgaaacgagatggcaattctgatgcctagaagaaatgaagacaaccaaaaatgatggtaagtatgtgagttagtaagttaagaactcttctctctctctctctctctccctcccctcaccacatatgtgtgtatctgtattttctaaaaaacatgacattttaacaaaaattatagcactttattgatgagtttacaagatatataaatataatgcctaaaatgataataacattaaggatgggggagagatgactagaaatatactgttgcaagttttctatatttcacctaaaaaaaaatcaatactaattccaagtaggtaaggctaagttataggtgtatattttacgctctaaagcaataagttaaaaataatttcaaaacatatagttagaaaactaaaaaaggcattaaagtggaatgcttaaaaatgttcaattaaaataaggcatctaaggaacaaatgacaaaaacaaataagacaaatagaaaaatgggacacctcagtacaaccatatcagtaattacattaaatgtatatggactagatactccaataaaaaggcagcaatcaagatttttcaaactgtgtaaaaaagtaagaaccatcaatatgccatccacaaaataatgcactttaaatataaaaacacaaataaattgaaaataaaaggatggaaaacagtaaacataataaagtggagtagccatactaatatcagccaacatgaaattcaagacaaagatactagagacggagggacattttgtaatgataaagagacagttcaaaagaagacataacaactgcaaacatatgagcctaataaatgaacttcaaaatatatacaggaaactgacagaactaaaggaagtcatgcacaattcccacagtcataattggagactctatcagactttctttttgccatgtagattttccaaatgttaatattctttttatttatcaggttttataaaggaataaaacattacaaatacagctgacgtcccgcctttctatcacattctcctccctctttctttgggcattggtaagctaataataattcaggatgtaaatctctggagtgtgtgttcttggagtgcagcactatatcttattaatcttgaatttttagctaatagcagtgcctgactctagaagagacaaatgaattttcaaacaattaaataataaatgaatgaaagggattgtttttataataataataatttttatctttgccatatgtaataggggctctgtaaatgtttgatgagtttgggaattaataaaatagctttgatttcttactgagaataattgcccctaggtgtttttttttttatactttaagttctagggtacatgtgcacaacgtgcaggtttgttacatagttatacatgtgccaagttggtttgctgcacccattaactcgtcatttacattaggtatttctcctaatgctatccctcccacactctcccaccccaggacaggccctagtgtttgatgttccccaccttgtgtccaagtgttctcattgttcaattcccacctgtgagtgagaacatgcgatagttcttgagacagtttgctcagaatgatggtttccagcttcttccatgtccctgcaaaggacatgaactcatccttttttatggatgcatagtattccatggtgtatatgtgccacatttgcttaatccagtctatcattgatggacatttggtttggttccaagtctttgctattgtgaatagtgctgcaataaacatatgagtgcatgtctctttatagtagcatgatttacaatcctttgggtatatacccagtaatgggatcgctgggtcaaatggtatttctagttctagaaccttgaggaatcgccacactagttcaatggttgaactagtttacgctcccaccaacagtgtaaaagcgtacctatttctccacatcctctccagcatctgttgtttcctgactttttaatgatcgtcattctaactggtgtgagatggtatctcattgtggtctatcagactttttaagtaattgttagaacaactacaccaaaaaaaaggtccttaagaatctgaatgacaaagtcagtggctttaactcaaatgacatttgtagaacactgcctccaactactccataatacacattgtttttttgtttttttttttttttgaggtggagtttcgctctgtcaccaagctggagtgcagtggcacaatctcagctcactgcaccctctacctcccggattcaagcaattctcctgcctcagcctcccaagtagctgggattacaggcacgcaccaccatgcccagctaatttttgtatttttagtagagacggggtttcaccatgttggccaggatggtctggatctcttgacctcatgatccgcgcaccttggcctcccaaagcgttgggattacaggcgtgcgccacagcacccagcctattttcaaatgcatatgtaaggcttaacaggctagactataagctgggccattaaacaaatcttagcagatttcaaaagcctggaatcttacagaatatgttctctgaccacaacagaattaaggaaatcagcaatgataaaacacctagaaaagtcctatctggaaatcagacaactaatatgtaaataaccaacccataagtaaaagaaaaaaaaaagtaaattagaaaatatttataaatgaatggtgattttaaaaacacaacatgtcgaaatttataggatgcaattaataagtcagttcttcaaactttataccttaaacattttatgttagtgaagaaccctttaattttgaagattatgttaactaatttttattactttgttcataagcctcatgttgcttttgttgttgttgctgttattagcgttttcattgaaatatatatcttcactcatataaatatctgtcatatgcctaataacaaggtgccaggttttcttggttttactcacctacacatagttggtgattgaatgcactttgaaaactagatctagtgaaatggcagacatctggtgctgctcttcttgtcagaagtcagatcgtctcctcttctctaatattctgaacgcatataccatactcatcctacatttccattccttcttttcctatcgctgtccccgtgtaagccatcatttaaaattattatccagcagagtcgtggaaccaccttatgctagttaatgagaacaaattgttaggtttcaggaattatgtgagatgatcattaatcacaaccattacaaaaaatatataaagtaacaaattatttatatttaaaatataagtaataaatttctcaaacttattacttccttatcactttatcacattttactattttctgtgctcttaaaattacttatatatattgtatctttaggtaaaaacaccaaccatataatgaagtgttagtgcatatcttttgtgtcccatggcatcatgctggtaacttgaaagtgaacatggtggggatatttacaccatggaaatctgcaaatgctacaaattagcactttattgatttgttgatcattaatgcagattaaaagttaaagtgtgttgcatctgtagttgttacattctaaaaagcacccaatatttgagaaataatcttccagtatttgcaaactattaccatattcagcaagaagtcgtttatgtcattgatgaatcggtgaaattctaacttatatcttcattgtttcactttgtccaactcattaatgtatattgaaatgttgaccaacattcttactggacctacacacattcattgatgacatgaataatttctttgctgaatcatatagtaaacaagcatttattcatcttctgaacaaattgcaactgtgaattagctatggaaacatgagtttggcaaaaattaaacaaaaacacttttgtaaaaatcaattgactatatgggatttgcagtaaagagtactgtatattttataatatatattaaaaatgtgaaacatcattttaacagttaaattcgtaatactttgttgtatacatttttttccaagagaactggttattaacatttaccagcataccaccgattatgactctcaggatgtcacaagttaatttttccattttctcacccttgcttttcttatttagaaagaactgtgatcttccataaatacagcaaaaaaggtagtaaaaggtagaaaatagtacataaattgcattatgaatcagtgcctggactgcagagggatggctactgttttggtttattgcaactcgctgagtctctgagccagaaagcagacagggaggtccaaagcctctttctgattagtttcaggctggcagatttgctcggatatagaaactgcacaaaatgtttatctcaatccaaacccatcaatcttgcagttcccaacaggttgcagttgtaataggttcacccattctgttttattattatgagtttttattattctcagtgccttaatttcatatacaatgggaaaagagaatatgtaatttagtattattatgcaggtgacttttaaaattggaattcagaatccgtgattttgatctagtggagataggagaaattttttaaaagttatataaagttctcctggatagatgactagcttacttctatctctagctgaagtgataaaattaaagtaagtccctataccatttattttctttatagtctacttaattacctggaccagatttcttctttttttaagcattgtgtctttattttattaaactttaaaaatatttttcaacttttattttagaaatgaggggtacacgtgcagatttattgcatgagaatattgcatgatgctgaggttttgggtacaaatcccatcactcaggtaatgagcatagtacttggtaagtagtttttcaacccacgtctccctcgttgtctcccacttatagtaatctgcaggtctattgttccaatatttatgtccatgtgtgctcagtgtttagcttccacttacaaggaacaacatgcagtatttggttttctgttcccacattaattcatttaagactataacctctaattgcatccatgttgctgcaaaggatatgatttcattctttttaatggctgcgtagtattccatggtgtatatgtttatatacacattttctttatccagtgtaccattgatgagcacctggattgattccatgtctttgctattgtgaatagctcagtgatgaacatatgaatgcattgtctttttggtagagtaatttactttcctttgggtgtatatccaataagattgctgggtcaaattgtagctctctccattttaaattctttgagaaatcaccagacagatttcttggattcaaaaattaagaattttgtttatcttcattaaagagtacataaatgtgtcaagaatatctgctatttccaaatgcactagcttgctatctaattttaaagtgtttatgcaaaaatggtgatgctaggtgccagagaggatttcaagaggaagagagcaaagcgaaaacaattctacaatccagttcttattttctgggtcttcatatatatttagaagtcatgagaacacacaaatgaaacaattaggcactaataaacttgtgccccaaggaaagcaaattgagcactatacatagtgctgtgtgagggtaagaaaaggcaggtcaatataagagagtacctttaatgaatgttgaaagataaagtcaaatatatttaaggagcaaaacaaactattaggtcccttcaaaagtaacatctctcataggctttttggcagttatagcttacactctcctataataaaatatacattgtcttgtaaccaacattttcagagaatttgcccttaaagtcaattctgggcagacccaagtcaaaggctcttcaggtttatgttttaaagcctcaacattcaaagtttttgcaattagtagtaatgatgtaaaaaaacaaaaaaacaaaaaaaactaattacaccttccttccatgtattggccactggtaaatgtttgttctaatttgagaatacattgaaacttcttgcatcaaagtgttatatgaagaatttgcctgaaatatttgcatgagcatttcaccatgtgaactattgtgttgaatcaaagaagaatcaaaagtcagtttactaacagtctgactctggtgaaatagcaattataggaaatacataaaacttctttgaaaatagcagatggttttagacccttgaggaatcgccacactgtcttccacaatggttgaaataattacactcccaccaaccgtgtaaaagcgttcctatttctccacatcctctccagcatctgttgtttcctgactatttttaatgatcgccattctaactagtgtgagatggtatctcattgtggtttcgatttgcatttctctaatgaccagtgatgaaaaacttttgttcatgtgtttgttggcctcacaaatatcttcttttgagaagtgtctgttcatatcctttgcccacttttggatggggctgtttgtttttttcttgtaaatttgtttaagttccttgtagattctggatattagccctttgtcagatagatggattgcaagaattttcccccattctctaggttgcctgtttactctgatgatagtttctttggctgtgcagaggctctttaattagatcccatttgtcaattttggcttttgttaccatttgacccagcaatcccagtactgggtatatatccaaaggattataaatcattctattataaagacacatgcacatgtatgtttattggagcactattcacaatagcaaagacttggaaccaacccaaatgcccatcaacgatagattggataaagaaaatgtggcacatatataccatggaatactatgtagccataaaaaacgacgagttcatgttttttgcagggacatggatgaagctggaaaccatcattctcagcaaactaacacaagaacagaaaaccaaacaccgcatgttctcactcataagtggaagttaaacaatgagaacacgtgggcatagggagggaaacatcacacactggggcctgtcagggggtggggggctaggggagggatagcattaggggaaatacctaatgtagatgacaggttgatgggtgcagcaaaccaccatggtatgtgtatatctatgtaacaaacctgcactttctgcacatgtatcacagaacttaaagtataataaaaaaaaaaaaaggaaagaaaattgcagatggtgaagtgaaggagtactacatgtcctgtcttgataggatatgatcctggtcaaaaatccttctgtaggtagccgtgctcatctattaggtccactccagggatgaggatccctacaaaaaggttcattgtgtccctctctactctacagttgctttctgtatctcagcctgtggattaatcagaaactattgtgaaaaattatttccagatgctgcaagtgggagggaggaaggaaagtaaagagaaaaagaacgaaagagaaagaaagaaaaagaagaggaagaagaagaagaggaagaagaagaggaagaagaagaagaagaagaagaagaagaagaagaaggagacggaggagacggaggagacggaggagacggaggaggaggaggagaaggaggggaagaggaaggagaagaggaaggagaagaggaaggagaaggagaagaagaagaagacgaaggagacgaaggacacggaggagacggaggagacagaggagacagaggaggaggaggagaaggaggggaagaggaaggagaagaggaaggagaagaggaaggagaagtggaaggagaagaggaaggagaaggaggaggaggagaagaagaggaagaggaagaggaagaagaagaaagaagaagaagaaagaagaagaagaaggagaaagaagaaggagaaggagaaggagatggaggagacggaggaggaggagaaggaggggaagaggaaggagaagaggaaggagaaggagaaggagaagaagaagaagaagaaggagatgaaggagatggaggagacggaggagacggaggaggaggaggagaaggaggggaaggggaaggagaagaggaaggagaagtggaaggagaagaggaaggagaagaggaaggagaaggagaaggaggaggagaagaagaggaagaggaagaagaagaagaaagaaggagaagaagaagaagaggaagaagaagaagaaagaagaggaagaagaagaaagaagaggaagaggaagaggaagaagaggaagaggaagaagaagaggaagaagaagaagaggaagaggaggaagaagaggaggaggaggaggaggaagaggaggaagaggaggaggaggaggaagagggagaggaagaagaggaagaggaagaggaagaagaagagaaagaagaagaagaaaaagaagaaggaagaagaagaaagaagaagaagaaaagaagaagaaaagaagaagaagaagaaaagaagaagaaaagaagaaggaagacgaagaagaagaggaagaggaagagagaagaaagaagaagaagaagaagaagaagagaagaagaagaagaagaagaagaagaagaagaagaagaagaagaaggaagaagaagaagaagaagaagaagaagaagaagaagaacaagaagaagaagaagaagaagaagaagaagaagaagaagaagaagaagaagaagaagaagaagaagaacaagaagaacaagaagaaccaaaccagggtagatgaagacaaagttaaaaagaaagaaaaggctggtgctggcagagagccttctgctccgatttgaggtgtatgcattttatgctgtaaagcgtggccagtcacaggaggattcaaaggcgaggagagatatgatcaaatctgcacttgggaaagcgcaccttggtgcgcatctggggatagaggaacgtagggatgggaggatgggggatgggagtttggggatgaggcagctgaagaacagagtcttgtgatggtggaaccaggacttcgttgttccttcattgtgtgggcagaagaggtggaggattttaggcgccacctggtcttgtccccactgcccaggtatagctgctgtctggagcaggggcctcgagacgccgctcaagtctcacgggcagatgggttggacaaaacattgccccccttcttcttcccagacaggcagggaatccctcttcttccttttgctgaatcagctggagaagaaagcccagcaggaggcctgctagcctcagcctcgggccctaccagggtcctaggtactggaatggaacttcgccgaggtcaccgctcaaacggccacaacgagggagccgatttagatcctctgggcctgttccttccttttctttaaacgtcccagtctagcttagaggaggacctgttttgtgtaaggcttgccggagcaaccagcacctttcctggaatacagtcttgtttgtggcttttcctttgttgtacgctagcgtgcactatcgcccgcacgctgactgacccctgttctacaccgcccctgataccactgaatagggagtttgagaagtttatgtcgtgccccagaaaacactagtggccttgttctcaagattaaatatccttagagcagccagatctgaagagggaccccagaaagatccacgggcatgttcatttgtttgcaattgataatataggaaacactttctaatatttcaggaaaacaaaacctttaaaaaaaccagacgacgtgtaactcctaacattcttaccttgcttcaggactgttgggaggataagatagtgtggcagctataagcatttagcatagagcctagcatacaatagtccttccatgacattagcttctctctccccagcaaagatgacactgcataatccaatgtacagtggggaaatttttcactagtacattaagatgttatttgcagttagaaagaatgaatactgtaatcccagcactctgggaggctgaggtgggaggatcacgggtcaggaggttgagaccatcctggttaacacggtgaaattctgtatctactaaaaatacaaaaaaaattagcccgccgtggtggcgggtgcctgtagtcacaggtactctggaggctgaggcaggagaatcgcttgaacccaggagacggaggttgcagtgagcccagattgtgccactgcactccagtctggcaacagagtgagactatgtctcaaaaaaaaaaaaaaaaaaaaagaacaatgaataagacctagtatttgctagcacaaacaggtgactgcagtcaaaaaatctaaattgtacattttaaaataactaaaagagtataattggattgtttgtaacacaaaggataaatgcttgaggtgatggataccccatttaccctgatgtgattattatgcatggcatgcctgtatcaaaatatctcagatttaaatacacaaatatttaagtacataaatacagagatacataaatatatacacctactatgtacccacaaaaattaaaaattgttttaaaagatgttatttgcatgcataaagaaaatgttatttaaatttcctacttaaaaatttttctttctttttcctatgatagtagataaatggcaagcaaaaaacgagaagtccagttacaggtgggtctgacatatcaacaattctttatctggtgcactagtgcttgaataccttttacagtgccttccactttgcagacagtcatcaataatcaaagcctgtgggatgagatgttgcagaacaaaggcttaacaggtataaggactccccggctgtctggccacctggggtttgacccggagctcctcctggcaccctgtccctctagagtccccactttgaccaagaaatcctgcagtgcctttgccctggccatggctccagattgggataactgctatcctagattggtagactttgttatttcataaatatcatcatcttctagtgattgatgtttaccaagcctggtgtggaccttgcagagcaatgcaacctttattcagaaaattgaaaaatgaactgaacgaagacgaaattctgcattttgctgtcgtaagaattttgttttcattaaaccactgttttcacattatattaagtttttaagtatcctctaatactttaagtattgtcttaatttaaacaacctgtcagttcttcaaaatagatagtctttacttggcagttttactatatatttaattctactagatctgagaatgaatatgatttttatcccattcttataacgtcgaggctatttaccatgactgtgaaagtcagaaaagtgtaataatggacacatctattgttctgtttcctttcacctgaccacatgttcagtgtgtgtcctttagaataagggctacaaaagctgtttactgggtatcattgagtagtgccctggcattaacccagttaccatattttccagtggcaatgatttttcctcatttatttgctacctacttgcaataagggattaaaatattatagccaaacacattttactgaattgtactgttttttcaatctattcacataaaatgatcaactaattagaatttcgttgtccaacatggtagctactaggcataagtgactatggagctcttgcaatgtagctggtccaactgaggagctcaatttttaattttaatgaatttaaatctggattttcaaactgatactccattgagttattgtaaaacttttaaaatctgggataacttgagtatgtgaatctactacttaactgtaaatgttattaaagctaattaaggattaattatttctgattaacatttagcatatgaattaagacatactcaagtgtaagagacacattagattttaaaaatttaatatggaaaaagaaagtgaaatatgccatcaataattttatacattgattacatgttgaaatgataatattttggatgtatcgggttaagtaaaatttattatcacattattttcacctttttttgtttttaaatgtccctactggagaatttatatgtgtggcttatataatatatttatattatatagaaaagctcccaaaccaactagacttaagatacaggagcagataacagatgataacagatctttactccttatctctgaaatacatagttcctaatgcagacatgcaaccacaacccactcatgttctcccagttacaggtctttcatggcccctttcaacccaaacattggaatgggtttgcctactgaccttgtatttcactatccatccccttctttaaatgcattttccataggacttattttccttagttcaagatgatgaataagcagtttaaagcctagacactcacctcttattatttttctattcaagagagtaagtggctgtctacagtagttaaatcctgttgtcctggtgaaggaattgactttttttttttgtcttctgaaataaggactttgtaaggttttcattcctttaattttttaaaaaatgtctttatatagatgttatttttagagcagttttaggctcatagcaaaatttaccaggaagtaaagagttctcatatatcccctatccccacactctcatagccttttccaccatcaaaatcccacatcagagtggtacattgttacaacggattagcctacactggcacatcattatttaccaaaagccgtagtttacattaaagttcattctcggtgttgtacattttagggagtttaacaaatgtgtaatgacatgtacttactatattatggcatcatatagtatagtttcattcccagcaaaatcctctgtaatctgttcatctctccctacctcataacctctggcaaccaccaatcttttgactacctccatagttttcccttttccagaatgtcatatagttagaatcacatagtgtggagccttttcagattggcttcttttacttagtgatatgcgccatgtcttttaatgatttgatagctcatttctttttagtgtcaaataatacttcattatctggatataccagggtttatttatccattcacctgctgaagaacatcttggttgcttccaacttttagcagttaggaaaaggctgctataagcatccatgcttaggtttttgtatgaacatactacactttcaactcatttgggtaaataccaaggagtaagattgctggatcatgtggtaatgatatgttttattttgtaagaaaccaccaaatcttcctaagcagctgtaccattttgcattcttaccaacaatgaatgagagtttctgttggtccacattctcaccagcatctgttctctggattttggtcatcctaataagtgtgtagtggaatcactttgtagttttagtttgcgtttcccaagattatgtgaggtggagcatctttatatatacttatttgccatctgtatatcttctttgaggaggtgtctgctaaggattttggcttatttttttaattgggttgtttgttctcttattgttgagtttcaagtattctgtgtattttgaataacagtcttttatcaggtattacttttgcaaatagtttatcccagtctgtggctggttttttcattctcttgtcattgtagtttttttaaagacgagattctgtaacaacctgtttcactctggagaatcacaaccaccagaaaggagctaggaaattattctagacttgattcttcacagagaagaaaaatcaagttagaagaccagagaatagagcctaaaggagattgccacatgcagttggaaaggggttgatagaagttaaaatacagtatcacaagtgtctaacagctgacagatggatcacagggaattgaggatcaggaaattcttgtgaatcctggcagttggcattaggaaagtggcagtagacgttcacatagactaggggttccagattctggtgacctgcccataaaggtgaaagaaaattatatctccaaacctccattgtgagcagcaatggagggatgccctctgccggacatattgttttctgctgttaatcaaggaagaacttgaacatgtaggtccaaaattaaaatgtatgaggttatttcctattaaaattgccctgagctgaatggtcagtatacaatttttttctgctgtgtgcctttttaaaagaggaacattaaatattttatatatatagagagaggcatataaaaatttagttaatagtgtttattatagttactgttatattattattaaattatttaatccttaataatttatgtattataatataaacattataattataatacctgaattacttctaaatagagttgacccttaccaatgctggagttaggggtgctaaccccccacgtagtaaaaaattcatatatgacttttgactccaccaaaagcttaactactaataacctactgttgactggaaaccttatgggtaacataaacagtcgattgatacatattctgtatgttatgtgtattatatactatattcttgcaataaagtaagctagaggaaagaaaatagtattaagaaaattataaggaaaacaaaatatatttactatgcattaagtggaagtggattaccataaaattcttcatcctcatcatcttaacattgagtaggttgaggaggagacgaaggaagaggagttggtattgacgtctcaggggtggcagaagcagaagaggtggaggaagtggaaggggaggcaggagaagcaggcatagtggatgtaattttatggaaatacgtggtaatttctgtctgacgtttttgctttttcattgctctaaaaatgtttctatgtggtaccaatccttcttccaccatttgctttggtttcagtgcccatatcatagaagggtccatgtcataaatgaagtcaaaagcagtcttgaataactggaattcttctgccagatgttctaatgtcagtttgttttctggcactggctcttctacatcttctccctcatcgtctggcactgctttagaggcactcatctctaccaatttgtcttctgttaattcctctggtgtggtgtctctcagctcttggatttctccaacatccatatcttgaaacctttcaccccccacctttttgccacatacacaatctcttttatgacttccttaattggctctgtcataaatcccatgaagtcatgcacaacatctggacacaattttctccagcaggaatttattaatttgtgcttgatagcttttgcagctttttctataacaatgatggcatcttcaatggtgcaattctcccagactttaatgatgttctatcagggttctcttccatagcactgacattttttccatagagtaccacgtgtaatgagccttccaggtccttatgagcccctgatctagaggctgaattatagatgttgtgtttggagacaagtagatcattttgagacctttgatgtcgacctcatgggattctcagtgaccaggggcattttccaatatcaaagaactttaaaaacagtctctcactggcaaggtacttcctgacaccagggacaaagcactgatggaaccaatccagaataaaaggttctcattgtccaggatttcttgtacaactgaaagactggcagctggtgttatcttttcctttcaaggattgggggttagcagttttattgagaaagatagccctgatcataaacccaactgcaatgcataaaatggttgagttagcctatctcttcttccttaagtcttggtgctcacttctcttctttactaaataacgaactttgcggcattcccctccccccaccaaatcccaagttagggcactttcatctgcattaaaaacctgttcaggtagacatcttttctccttaattattttcttaaaggcatctggaaacttttctgctgtctcttggtcagcagcagctgcttctcctgatatgttaatattttttaaccttttcaaaaattatcaaaccatcctttgcaggcattaaattctccagctttagatccctcgcttacttttgctttaagttgtcatatgataactttgcttttttgggaatcatattagagtctataggcatgcctttcttatagtaatcctgcacctgcataaaagctgcattttcagtgtgagataaaaaggtatttcagaaaaagtgcaagatctatatgcctgctggcacagctgcagcaatggctcaatgaacttcctttaaaaaaaaaaacccaattactcttagactggattcttttatcttgaaatggtgggcaacttcagctgcagacctcaatctagggtacctatcaggcaagtcagctctttcttgtaatgtcatgatttttctcagctttttagcagcacttgcaacatccctagtagcactttatctggatctcaaggtgttagtcaaggtttatggtattgcactgaacacaatgaaaattccactttgaaaagcattgccttagattacaaaaaccaactgttataaactgaatgtttgccatcaaatttcatacgttaaaatcctaatctccaatgtggtgatatttggagatggagactttagaaggtaattagagtaaaatcaaagcttttatttaaataaaggaagagacatatgatttcttccaggtgaggacattagtggagaagagggccttcacttctggcacccagactgtgctggcaccctaatctgagacttccagcctccagaactatgagaaataaatgattgttgttcagccacccagtcaatagcaatttgctattgcagcccaaactgactaagacaccaactcttacagaagaccctaccaaacgatctcattctggcagctggaccaatggatactatgttaatatggaagaagacactattattgaatgtatagttgttcataattaatttggaacaacttgaaatttatgagaaaatattaagaaaattacagacataaaattcaaaatctttaaaagttgactactaatttattcaaggaatgtttagtaaacctcttttaatgtatggccctatgactgacagagggagatgagatacaaacgtggataggaaacatactatctctgtgcacacaactctccttctaacagagcaggtgtaacaggcccacacgtgcctgtagtagaatattgaaagggacataggtgccttgggagaggggcagtaacgtgctgtgcagaacgagagatgatttacagcaaaaggaagtgagacagaattggaggaaggatagttgaacagggacagtaaaagaagggcaggaccagggaggaaaagatgagtaaataagtttggctaaaggttggttaatgtaaagggaaacggtgcggaaaggttaaggccaaatgacgtagggcttgaatcgccagtatgtgcagtttgatccctaaaaccactaaggcataccgaatgttgcagtaaacctaaaaattatatatatctctgcattgtttcaacatagtgtatcaaattacttgaatatagttttatttattattatatgaaatgtttactttttccaggcagaagctgacaacattgtgactttgcagccatttagagataaatgtgaacctgtttttctctttagtgttgtaagtatatttactttctcaattgcattatcagattccagtttgcagttaagaacaagtaacattgtaaaattaccatgaaattgtttgccaatgacagtaattacacaatgtttgccttatcttttcttgactatttataaattttataatttggctgctaggagcttattatggattgaagggattagatgatgacacactggattcatcagggaaaggaaaagtaagatggcgtttatctttactaaggaaatgatcggagatttgcacaataaattttttacaggagtaaaaccttggaaatttcatagatacctagcaagagagaactggttataaacattcatgcatatccatacaagaaagcatctgtatgatcagtcttttgtaatacacattactcttatctctatatttataaagaagaaagcaagtggatccaccaaaatgttatagcagttttctatgtgtgaggaacaggtgactaatttaagttttattattcatactattctatattttccacatattctgtgaggaacacacaactttaataatcagacagaggccaggcatagtggctaacgcctgtaatctcagcactttgggaggctgaggtgggaggattgcttgaggccaggaattcaagatcaacctggccaacatagggagaccacatctccattttcaaaaataagtaataataaaataaatataaaatataaatgaataattagaaagacataaatagtgctattttctaaaagcagagtgtacagttagtgctaaattgtgtgacacagggtatagctgctacagagttcgagaactgagacagaagaaagaaagccttcacggaggagatagacaggacttggactgttcctccactgtggatatttatttttgatattagaaatactcattaaaaacacatcttggatataacttttttctgctattaaacaatattcttgcaaccctttcaaagagttgaatcgctgggttaatgattaaaaaatgcattgaatggtaaaaaatgcattgtagatctcctctaagttggatgtttagaattcaacgatttaggtgaggggtcagctaacgttgtttttgttgttgttgttgttttgttttgttttttgtaaagggccagggagtgaataatttcagcatgattaaaatacagtctctggactgggttgaggtttgctgactcctaaactagatgtcattacactcatgaggggaccagaatgaataacaacacagaggcagaatgggcttggggggctcatggaacaatgaggaggctttagctgcacgtagtgggtaggtgcatgggaatgagagaaaagattgggcaggtgggtcacattgtagaggctggagctctgggatagtcgataatatagtttggatatttgtttcctccaaatctcatgcagaaatgtgacctccagtgttggaggtggggcctagtgggaggtgtttgggtcattggggcggatgcctcataaatggcttggtgccctccctacagtaatgagtgagttctccctctattagttcatgcaggagctagttacttaaagagcttggcactgtctcacctttctctcactccttctctctccacatgacatgctgtctccctttcccttcctccatgagaacaagcttcctgaggcctcaccagaagcagatgctggtgccatgtttgtacagtctgcaaaagtttgagccaaataaatttttctttacgaagttcccagcttcgtgtactccttgataacaacacaaaacagactaatcgggccatcaccccgaccgctagtccagtctgaccagtagacccagccccactctccttaagtgtaccatccaatccatgttctctaatgcctgcaatcagtgcccagagtttaagtccacccttcctcatagccatgtttcatccatccttctaatgcttattctttgtcacacccagttctccaactcttcccctatctcccaaacctttccactctatgacatctggaattaaaatgacttcctaagatttttgaccatggctctgagcttttgtctcgcttccttggcttaccttagttctaccttcttcctttggacactctctccacagcccagaagtgataactgtttatttcagaatgtgaagtatagttggtgtttgctttacttcttagttcttcaataactttcttttctttgctattactagaggtctgtttcacgtggctaaatctccaattcccccatctcactcctgtcatttaccgaccttcagatcaggtctattgatgactgaagtctttggcgtgtggtttaaagtcttactctcaatcctgagtcctgccatcaccttgaggactttagtatccacactgacaacccgcccaatatcctggcctttcaattcttgacctcctggctgctaataaacttttcttccaataaacttcatcgaatcactcctgcaatcatgtctcagactgcccattgctccacatccataatcattaatttaagaatagaattctgtgatcacaaaaacaccatcaagtccaatgctcattttattcagatattccctcaatgtccctttgtacgggtcagcatttttagctgacaacagattcattccagctagtctcagcagaagccttcctcaagagatattagataattcacagaattgttgaaagatactttttagttggaaatggtaactagagtttcaggtttcatttaaaccttactcaactgtatctttctcattggcttttgaatatgattaagtcttttcaatttaaaaaatatataatacttctttctgatagcatatccctctctagccaccatccatttcttgtcttcacctcacagctaagttggtcagaagactttttatatttaattttacttcttttcttttcatcccattaactcctcaatccattctacctgagctctgattattccaccaaaattgctgttgctaatgtatccaagtaccagcctgtactaagtataatggatattgttaggtattcatcatttgtacctcttaaatggtttgaatatggtgaccatgccctcctttttaaaatatttgcttcttttggcttatgtgacttggttttcctttcaccttcctggatgccacttccctctgttcctttggcaaattcacccttctttattccacgattaaatattgactttatcaggctgtacgctctccttagaaaatttcctctacacacagtttcaatcaccaccatctgtatatcaataaatcacgtttacatcttcagctgaatgctatgctttccactcgcagcatttccagttggggtctaggcatctcctattggctttctcaaaatgcatctcacagcaaactcattcaataccagatcttcctccccacaaaacacagtccccttctattgtctctgaatttggcatataatatgataacttataatttatccagttttcaagtgagaaacagaagagtcaccttgtgacatctctttacatcacattctatccaagtcataccttggacctgtaaattttactgcccaggtctctgtcacactcatctacctctttccatcctttccatctccaccaccgtcatctctccacctccacctctagcatagctcctaacttgtctgcgaatattttcttttgctccccccagcattttttccacacagtaggtgaaataatttttacaaacaattttaatcatggtcatggcctctgcttaaacattctgactgcacttaggatgaagactgaatccctggcccaccaggctgcgcacagtttggcttctcctggttgctgggcttcaactcacaccaggctccccctcactttgtcacctggccttgtcacttgccatcttcccttccagctttagaacccttatgtctgttattccttttgctctttcttctcctttttgcccaattagctcttacccgtctttcatattttaaaccaagaatcacttcctgacattgagaagtacctttcgtgatctctttgaccaaaacccattcttataggagctccaagggctttgcaccactcttggtagcacctactaaggttgctgtttcacatgtttgtgtttttatgtagggctttttaaaaaaaacctaattaggtcaggtaccagatccattattttataccattgtgcctggtacggcaccagtaaacagatgcttagtaaacaggtgttaaaagatgagtgagtgaaaggggcatggtgtcaaaaataactagggaggatgtcattgggaggcctatccagaattgttcaactttaaagcaaggatgcctcaggagagattgcatcaggtgagagctcctgcagggggatgacttgctgcaaggtgctggaggacatgcaaattggaggtagaactcaaagagctgagtttatcaagtcaagaacattcacagtattaagaccttactgtaaaacgttaattaccatagctaaaagaggattcatgaggatgagagtagggtagaagggagggatgacttagtccagtttaagtgttagttcttggtgtgttctccaaatgaaagttcccctcctgttttcatttcccttatagaatggcaaaattatcgaaaagattcagggtgcaaatgcaccgcttgttaataaaaaagttattaatttgatcgatgaggagagaaaaattgcagcaggtgaaatggctcgacctcaggtaatactttggattaacaacagtttgaagacaagcttatcatttagagtgaaatagaacaaaatgcactactggtgctaggtacctctaaaggctttgagtactttatgtcttttaattttaaaaaagtacattaccttttatttgatgttatcctaagttgtttaacctaattttgtaactatccaggtgtgtaaatggtgcaacttttctgggaagcattttggcaatgcatgtgtatatatatttatatacataaaaatgaaacctttcggatagttcacagaatcacagaagcatattcatggcttccctgaaagttaggaacctttgtccttctggtactttgctctttttttttgtttttaaattgactttataagtgtaagtatatagcaattatttatttgaaatttgtaagaacataaaagctatttggatgaattaaaaaatctggtactttgctctttaataggatattgattattggtttgagaaatattttttttttagttaaggaaatatcgttttgttccaaatttgctgagagtaatggttaagaacagatcttcacacttatcaaatgcccttttgatatttaacatgattatcatgtgtttgcagttttcttatttattaatttctgctttgttcttattttatctcccatgctcttattaaattttaaggtttggctgggtgcggtagctcacgcctgtaatcccagcacttcgggaggccaaggagggcagatcacttgaggtcaggagatggagaccagcctggccaacatggtgaaacaccgtctctactaaaaatacaaaaattagccgggcatggtggcaggtgcctgtaatcccagctattcgggagactgaggcaggagaatcgcttgaacccaggaggcagagattgcagtgagccaaaatagcaccactgcactccagcctgggtgacagagcaagactcctactcaaaaaaaatttaaaaaaaatttaaaaaattaaggtttgctacccttttcatactgcacatatgcattattcctgccccttccattttaaaacatcccttattttatttaagtggaaagctggagacagtaatgttagataagttcaggaactcttccactttactttctatttcttagactataaatatttactagatacaaaatttctaaaaacccactcactatcatattaaaacataactgtgttatctttgcattgcatttctttttcatagtatcctgaaattccattagtagactcagattcagaagttagtgaagaatcaccatgtgaaagtgttcgtaagtaaatttacttcaaagtaatccaagggttttctgtacgtgggcggtcatcacagcatcacttgtttcagcaaaacactggtaacaaatccatgtttattaaggaggaattattcagataaatgatgatttgggccttgcaagactcagctattaaaaagcaccttcttttcctcactcgccttacctttggttctgggcctggagcctttcagaggttaccctgtacaatggattcctgtctcctgtgacttatctggacagcagcttcctatttcatccttcatcatcttccaaatatttgtgatgataatttcttccttgatgacccatactcttggtttactttgcagttaacaatttcacgccttcactagattatctgcattggggtagtggggtgtatgtgttcatactctggagggagcagaggcaaacagccataaccaaatgagttatcttgcactaaaagctcattataagaatgtcgatacattcacagatgaatctgtcggtgatgtttacttgcatgattcacagttaaaacttcacttactggtagtactgtgctggatggatcctgtgtgtgattcttacgcatgggaattgcattcaaaccaccagggcctacctactcaatttttgtttcctctggattaaaaactcttgtaaatgtttcccctgcatgcaaatataggaactgccatttgattctaagtaggaaccctctggtagttgaaatgccgtagtaagatacacagctatcaatgggcaacaattaactgatcattagaaatttacattgctaattgccagatccttcattatccagacttcgtgccaagaaaatgaaattctgtctttttctaaatttttttccagaggaattatacagtattgctattatcaaaccggatgctgtgattagtaaaaaagttctagaaattaaaagaaaagtaagtaatattttccaactatgattaaattaattgcaaaataacaacctcttaatcgtcagttcaaagacaagcgtaccatttagagtgaaatagaacaaaatgcactactggtgctaggtacctctagaggctttgagtactttatgtctttacaaggctcgatctattcatgcatccttctgtaaatgatcctactctaccagcatcctatgtaaattttaaaaaattatagttcttatactagattgtatattagtctgtcttcatgctgctgataaagatgtatctgagactgggcaatttacaaaagagagaggtttattggacttacagttccacatggctggggaggcatcacaatcatggcagaaggcaaggaggagcaagtcacatcttacgtggatggcagcaggcaaagagaacttgtgcaagaaatcttccatttttaaagccatcagatctcatgagactcattcactatcatgagaacagtgcaggaaagactagcccccataattcaatcacctcccactggattcctcccacaacacatgggaattgtgggagtttaaaattcaaggtgagatttcgatagggacagagccaaaccatatcattctgctcctggcccctaccaaatgtcatgttctcacatttcaaaaacgaatcatggtttctcaatagtcccccaaagtcttaactcatttcagcattaactcaaaagttcacagttcagcatctcatctgagacaaggcaagtcccttctgcctatgagccagttagatcaaaagcaagttagttacttcctagatacaataggggtgcaggtattgggtaaatacagccattccaagtgggagaaattggccaaaatgaaggggctacaggccccaagcaagtctgaaatccagcagagcagtcaaatcttaaagtttgtatatttttgagccacttcaaaccaagtgtcctatagattttgctgaggttcttatagaaaatgtattgaaagctggtggtttgttaagcccaaaaaacaaacttaacttgttttacatgtgatcccacgacacctggatttgaccttactctctaattgaagattaccaaagctggatttattatagaagcagagcataagacagtgctcactgaagaacaagttgtcaacttctatagtcgaatagcagaccaggtatgaaagttaaaaagaaaaaatcctctatgtgtttaaatacagtggcctccataagctttaaatctttattacagaaaagcaaattagtaagtctgaacaactaaaataagctcctggtgtccctgttggtgtccatatcatggagatgccaatgatagtggctctgaaaaaaatcttcggtagaaatagtggctaccgagcaaaactggatggtctgattgtgttttgttgacatgaagacctctttatgtcaggccctccaagagcccctgcatcagtcctctggaagtgaatatccagtcattttctattgatttttattctgggttgaaggctctgtcaccagcttcacaagaatgctttaatcttttctttacctaagggcctttctctcaggctgccccgaccccaactgccccactcctgccacctccctaccccaccaactcttttttgtctggggatataatataataaaggcagtgctgtgtattagaaagtgtactggcttgggagtcaggagacctcacttctagaaatgaactgtccaatatggtagctactagatacatgtgatcatttgaatttaaattcattaagattaaattacattaaaaatgtgaagtctcagttgcactagccacattttaagtgttcaaatccacatgtggctactgtgttggaaagggcagaagagcatgtacgtcatcacataccattctactggacatcactttgtggaactgactgcaccactcatgccatctctgttggtcccggcttccatgtgtgtagaaagaaagggttatgccaactgtattcgcattaactgtaaacttctgagaaaatccaattcctgggccccacctcagacttactaaatcagaaactgtaggattgggctccagaaatatgtgttttaacaagccccgtagatgacttggaaacatcctaaatttgggaatattgttaggttacctttaagataaattcctactagctttgaacttctgccacttaaaaatgtaggagactagtgactgggaagggatagggagagatttgttaaagatgtgaaccaaaagtatctgagacaggttgcaatcaatttagaaagtttattttgccaaggttaaggacacgcccatgacacagcctcaggaggccctgatgacatgtttccaaggtggtcggggcacagcttgattttatacattttagggagacatgagacatcaatcaatatgtgtaatacgtacattggttcttcctggagaggtgggacaacttgaagcagggttgcttccaggtcttaggtagataagagacaatcaatagcattcttctgagtctctgatgaggcttttactgaatacacgatttacatgtgagatgacatagaggaatagtcacttatgccttagtcttgcttagtgaatctgcgtttttacataaacaactgagcagaggaagccatcagatgtgcatttgtgtctggtgagcagcgggatgacttttggctctgtctgtcctctgtcccctaccagtgaagataagctatcaattatcaatttacattgccagggtgaaatccaacagaactgttttagggtaaagatcttgaggcccacaaggaatttccttgtggacaaattatgagggaggtatgtagcttttttttttttaatctttgtagcaatcttatttaggaataaaatgagaggcacgtttgcctgatggagttcccagcttgacttttccctttggcttagtgattttggggtccaagagatttatttttctaaggatacaaatttaccctgctctggttattatacattttctttattgaaacatcactatgtcccccatgaatatatgcaattatttttcaataaaaagcaaaaataaaaacccccaaacaataaaaatgtattgttaacaggagatttataagagtaacattcctttgcccagggaccatggagagggaagatttcatttgacttgggtagtgaccaccattttagtccatccatttcaggagcctgaaggaaacagtttatcattttattttgtagtgtgacttcgaagagtttgtctcttttatgacaagtggcttaagctatattctagttgtatctcaaggaagtaaacacaatcctccctctgaagaaaccgaaccacagactgacaccgaacctaacgaacgatctgaggatcaacctgaggtcgaagcccaggttacacctggaatgatgaagaacaaacaagacaggtatagctcaagaccaggaattgtgttacttgcaatgtgttattgggtaatgaagcgtagtgtaggcacctcagtacctaagggcaaatgtttttatgttaaaggcataagtatttcttccagtcaacctaacatactgtatattcagaagagctgtgtgccaggtgaagtgtcagatacctggcattggaaaaagtagttggcttgtgggttgtagggtagtaagaatttacagatgacagtgtaggtttgaaagaaaagttttgttagatagaaagagcactgcagaagagtgcagcggggctcctcagtgagagaggactgagctcgccatggtggatttttgtttagggatatttatggaccttaaagctggagcttaagggtaatttggaccttattagccacacaggtcatgataaataattgcacttgtagacatgttggtgccttgatgtcagcaagggttgcacaatgagtttgaacatgcatgcattccggagatgtatagaaattctagttacttataactttttttttaagcctggtaccagatgccagctttaaataatagggaagtctagttacttctaaattcctcagataaggagttttgcctctggatagtcagcttggtggccctcaggtgatctttgctcccctcactgtgactgccctgaaagtttatgtcaagaacactagaaagggaggccttttccctgtttgtcttcctagagctgggcataccagtctggccacaagggctggggcttgaagggtgtattggaaccatgtataatccctgccaactcagtctcctctcccatctccccaccttccccttccaccttcccggtgccctaaaaacatgaaacatgcacttttactttagatggtttgtggttacaaattactgagaacaaaacggttgtatattttttgttgatggattttaaaatattagaaaatggatataaataatttgtagaatgttggttttatgcgctgctgtttgcgcctgttattcctctgaagactcagagaatggagagtgtaacaaagcagttgtcaggctgcaccggaaagaaagtcaggtgagcaagaacatacttagagtatctgagccttgaggcttcctgggatgtgtctccccgtgcttggcagcccatctccattgcattttctggctgagactatccagaatgtcccttgttggtccttcttgacttattaatgaatcatagtggcttttcttgggtgcctacctctgttggctcctagtgatgccatatttttaggaagtgggagatcctaatatcattaattccaagttgtacgcaggataaaggaactcataaggtaaatcctgctggcaaggagctttttaaacagtagcagttactttcagggttttaagggaaaataataatgagtgggctgagggaaggtttgttgggtagggtgtgttaagtttaaaaagataccagattttatcctagaaattttgagccattcaaaaaacaaaaagcgttctatgaagcactcattaatgtgacgagtgaagtcatcattccatggggctattgtttaggtagtaaacctccattacaaccaactttgagaagctccaattgtccaatactcgcatgacaccatggacaatttaggcatgttaattggcatgtcagaaggaaatgccagcagctctccctccagaacaagggcaagcactataggggccagatcagagtgaaatgaaatgtgtacaccttgctctggcacagtctacagtatttcctttctaaacttagagtccccatgtgcctttggcccatgtttatcccaagctggccacagcagacagcatgggacagtgtggagcatgcttgtttggtgtgctcgggctcagaaactgatactcaaaatatggcgctttgacatgctgaactgaaaaagcctcacaatctctctgacttgccccagcactcccggccagcagtctctctcaaagcacaggatgaagctgaatttcttttatctgcctaagatcctcagatccgacaggaacaattatttttcttcctctccctataagaccaagaatgtaaccacatctgaacggagatagtgtacaagttaatttctgtgcgttggtccattcattctccctcgtcatcctttactgtccttcaacagaattcttctccctgctcccattacctgttttgccagatggtctataacaggggtgtccaatcttttggcttccctggggcacactggaagaagaagaattgtcttgggccacacataaaatacactaacactaatgatagctgatgaacttaaaaaaaaaaaaagaactcgcaaaaaatatatatcataatgtttttaaaagtttaccaatttgagccgggtgcggtggctcatgcttgtaatcccagcactttggagggccgagacaggcagatcatgaggtcaggagatcgagaccagcctgatcaacatggtgaaacccagtctcgactaaaaacacaaaaattagctgggtgtggtggtgcatgcctgtagttccagctacttgggagactgagacaggagaatcgcttgaacctgggaggtagagattgcagtgagtcaagatcgagccactgcactccagcctgggtgacagagtgagactccatctcaaaaaaaaaaaaaaaaaaaagtttaccaatttgtgttgggccacattcaaagccttcctgggcctcatgcagccagtgggctgcaggttggacaagcttggtctataggcttctgaacctcattgcagggtgggtactcactctgtggttctctctgtgtacatgttaatcaaatttgtctgctttttctccaactaatatactttttgtctgttgatgcccgttggtttttcagtaaaacttgagaggacagaggggaagctttcccctgacttctataatgcttgttcttattttcacagctcttgctctggagggagggcctgataggcactgtcacttccatgtgacatctttcaagtaggtccagaatctaaaggaataaggacaaaaaactctcatgcgtaatttattcagttgttcactttcactctttattgccccctctcccctatctcccagcctgctcactctcctctctgggtggtggggatggagagggtgagacaggagagaagttaaaagcagagcaattgaactgggagtgattggtgacccctctgcgtacagagcagcggagtcccagagctttattggctggttattcctgtggagacaaacactcacagcttatgaattcacatgctgtggggaaactctctccatgccatcgatggtctgcctgctccagtggctgcagaagggtgggggaagagccagggaaacagggcagaggtacccatgtttgtcattcacattccagcttctttcatgatggctttttattacattatttacatgtctgtctctttaatcagcctgttttaagaaatcaaaggatagtgtaatttatctttgctttccagtctttctacagatcaggaaggtgtggttccattagctacattgctcagagtcacacaggtagtaactggcagagtcttctcattcattcacttattctgttatgtgttgattcattcatctagtatttattaaagacctactatatgccaaatcctagagatacaaagatggggaagaattagatgatgacctctgagctcactttcagtttaagtctttatgacagagtgaaggtgacatttccaaccacctctactatattgtattcctctgtccatagaaaatatctattctcttctcagtagcctctctatttgtccctatacatgtcatagctatagggagcttaattttttcctttatgatattctcatttaaattaaacataatagatacaattcctaaaataatccttaaaagtatttccgggatcagggaagtctgaatgctataccctgactctactcccatctgcaaagctttctttcctctccatagtcaaagggaagcttaactgataagcagctggctgtcagtgaggtctggagctctgttcaggtccctagggcaggagaagatgagggtggtgtggtgttttctccaccgagagtttggggagctcctgaactccccagaaaacaaggacctgcagacaaccacagaccctgagaataacagacttgtggacttcactgagacttcctgactcctaaagggccaggatagaactgagtagaattattgaattccttgccctagctaggtctctgggggcttttcctgattgcccctgcagaagaataatgacccactgtcttctaaagcacaagcttgtagaggtcatcttgccttccaactacagggtttccaacacatatcaaaaatcagacctaagccccagtgagccatcaaggaaaaatgagtacctgcctaagggagactggcagccagagaaaggaaggcctgtacaaaaatcacaacacaagtctagtgaaaaagaactgcttagagacagaaaaacccttaaataaaataacaataaaaaaaggacttgagattcaattgctaggtatacatttaaaaagcctttcaaacttgaattatacaaattgtgatttgaattataagttcagtggagaattggtatgatcatcatttgagactcaaattaatgacatggaaagtcagatgcaagaaatatctgaaagtacacacaaaaaattagacaggatgagagcagaagtctgcaatctggataatatgctgaggggatcaattgctaatgagaaactctgcacagagaaagaacagatggacaaactaactcaacaaataatgggggaatttttttcccagaataaatgcatttgtctgccaattgcaagggcttacaatagtccaccctcaactgatgccaccacacccccaccccacacacaaatacaggaacatcctgggaagaaacactgcacactgtgtccagacagacagagtaagcacttgtatacttcatatgtttgaaacccagagcagatcatcttaacagcctcttcctctgtatgatgaaattatttttaagtactagttactgaatgaggcaaacaattatgctagaataaaaatacagacaatgaaaatagtcttttatgggccagatgccgtggcttgtgcctgtaatcccagcatttgaagtcaggagctcaagaccagcctggccaacatggtgaaaccccgtctctactaaacatgcaaaaattggccaggcgtggtggcccatgcctatagtcccagctacttgggaggctgaggcaggagaattgcttgaacccaggaggcggagattgcagtgagccaaaattgcgccactgcactccagcctgggcgactgagtgagactctgtctcaaaaaaaaaaaaaaagaaaagaaaatagtctttatgtacctttgaatatataaacatatgagtataaaataaaaataaatgttacagtgtcccaaaggaaacaagtgatagatgaattgtttaattaatatttttaacaataaaacacatgtatgtctgtatatattaatctgtcacagaaaatgaagtagtttttgctttttgaaagctttaatttttgaagatttgtccatgatgttctcaaaattgatctccactctatgtttaatagaaaaagataggtgaaattcccattttacagtacattgcagaaattgcaataatgccaatagctttgttgtttttggattgattctatgtagagcaccatgtacagcacactacttatgaaaggataagtaatgaatatgtgtgaactccaagagtacataggcgcattatcactaatgttgattaggagtgctggtacatggcgctgataaaaagcaaccagacttttaattggttttattactgatttaaaattgcacttgcactttaggtggatcccttccaccaactgcatacttggcagcaattgagaataagttacttacaagggaaaaatacttgactgccatagggctcattttaggactactggaagaaaaaggctgcaacccctgcattcttacaaagctaagatatttacctggtagagcaaatgaagatcttcaaggacatacttagcaatatatcacctatatactccttctgtggaaaataagtgaggatatactcaaccaaatcaaaaatatgggaggaaaaaaaagaaaaacagttcttaacagtgaaccttggaatctctgaacacacacacagacacatacagtccataattctgggttttataatataacagctgatgaaggactctagaaatagaagaaaattcttctagattctaaattatctcaacaaaacctagaggtttgtgggtgtatgtggcaaaatggttcaaagatcaagaaggcagtattttgacagttgtattttgaggttcttatttgcagaaagggcataaatggagtattaaagttgggagatagtgtgtcagaatgcaagaaatatttgggacatacgcatctgacaacaggggcaggaaaaagacagtaaacattaatgcagtggataagtatagtaaaacttccacattaacaagggaaaaacatggaatgaagagcagtttgctcagaccagcaaaataaggggaaaaaagaagaaacctcaatttaaaataaatagtctagataaagtaagatgaaaaaaataaagtcaagaatatggctattaggctaactatgaaaaggttaattttcccgtcacatatagacattactaggtaaaggttaaaaaaacctaatttaaaaaccatcatattaatgatgtgcacaagaatcatcattgggtttaaaaatattgtgtgaaaaatatatacacagtttcatataatgtccttagagattacttattaattataaggggaaaattgtagcttttcagtagataaaatggggggatatcaactacattaatatcaccaataatgggaaaaactgacatcatacacctcctatgtgatggagcaagtaacggaccaagaaggacgcaggctcatgaagatagttttcctgccaaaggttcataaccagaatgtaataggaaagtactgggccatccaatagtttgaaaccatccaaaatgaagggaagtctacaaacaactgtcctggactattcaacatatcaatatcatgaaagacaaaagaggttgagtcgctgttggagataaaagcaaattaaggagatgggacaactacatgcaatatataatcctggattaatataaaaattactacagataagatggtattagaaaattggtgaaaattgaatacggactgtttatgaggtaataattttgtattaatgtaatatttcctgaagtatttagaggtgattggttaaaatatctgcagcttactctcaaatggatctgccaagacacacacacacacacacccacacagccccccatagcccccacacacattgggggatgaaagcaggagacagagagaacaaatatgggacagtgttaacagttggtgaacctagatgaagggtgtaaatgggagttctttgtcctagtcttgcaacttttctattaatttaatttttttcaaaataaaaaatttaaacaacttttctcatctatattctgtttagaaaaaaaaaagatgaaaataaagggatggccaaaaaatagccaggaaaaataaagtattaacactgatcattaaaattgctaaatttgataaagacacgatgtagaaggcaacatttatgacaatacggcacccaaaaaaagaaaaaattgtggccccaccaacataacggctaagtacctaaggagggaattactggaaaagtaaggagaactggaaaaaatacctgctagcagacaagaataagtaaggatgagaggaattaaaaatacatattccataaataatatataataaattgactgggcgcggtggctcacgcctataatcccagcactttgggaggccgagacgggctgatcacaaggtcaggagatcgagaccatcctgggcaacatggtgaaactccatctctacgaaaatacaaaaaaaatattagctgggctgggggtgtgcgcctgtagtcccagctactcgggaggcgaggcaggggaatagcttgaacttgggaggcagaggtagcagtgagccaagattgcaccactgcactccagtctggtgacagagcgagactccatctcaaaaaaacactatatatatatatatagatagatagatagatagatagatagataataaattatctataatatatgaaacataaacatatatacaaccttacacattacaaataattttttcttttacacaaagaatacctcaacaaatttttaatcaaaattttaccacatatatttttctgattataatccaataaaattggaaataaacaataaaaaggtaattggaaatgttcatttgaaaatatgaaatgcacttttagataacccttagttcaaagacaagattaaaaagaaaattaaaaactatctggaaagttctacatagggaaaagaaaaatttttccttaaaaacacaaaattttattttgatctttgtttattctctcataaagtcaaacatagataatatcatgtaagtaatttttgtagtgggctcaataaaaagttgaattaagtatcatattcttggatataatagggagatgcaatttatctttacatgacatttaatttttgttttattaaacttctagtaatttctgaacatatcagatttaatttgttggcatggttataaacctcagtttataataatcttaaattatattttggattttgacagtttacaagaatatctggaaagacaacatttagctcagctctgtgacattgaagaggatgcagctaatgttgctaagttcatggatgctttcttccccgattttaaaaaaatgaaaagcatgaaattagaaaagacattggcattacttcgaccaaatctctttcatgaaaggaaaggtagggaatcaagcataaattgtttaagtattttatatagatgagatttgaataaaccctagtataattgcatttaaagacattgttttaaaatttaacattgaagaaaacgcaccttaagaaattaatgtattaacttactaatatcttaatagtgaataaaacatatttgtagctgaagagtttacaaggtattttctaatctgtgaatttgttagagtagattttaacattgcaggaattattacataataaagatttaaagcttctatgtctgaaatgccccaattcaaagcttggatctaccataactgatagtgtgacttgaacaagatattttaccaagtttatttcttcacgtgtaaaattcagaacattaaaatgagaaaacacaaataaagtacctggcacataaagagttagttctttttaatctcatcccatattcttatagcagagtgaatatggcagaacaagaacacaagtcataaattaacactattcattctttttttatatctaatatatggaaacataattaccattaatatttatatattggccttttattctctgacttgtccaactacctaggagctttctaggagctttgacgtagtttccttggcatttctatgtagaccaggatttctcaacctcagaccggcttacattttgggccagatcattctttgtccagggtggaggattgactgtgttatgtgcattgtaaaatgtgtagcagcatccttggcctctactcactaaaagtcagtatcataccccccttcccctctgccccacctctcaaattgtgacaacgtcaaaaatgtctctggaggttgccaaatgccctttgtagggcaaaatctctccggctgagaatcattgatatacacagtaatagggtttgcaaagtgagatacttgttcctcttcatttccatctgtatgccttttatttctttttctttcctcattgagctagctagcacatcctgtatgacgctgaattggagtgatgagaggagacatctttgccttgtacctgatcttatagcaaaagcatttggtcttttaccactaagtatgttagctgtgtatgtcctttatcagattaagaaaattaccacctcttcctagtttggagagaatttttatcaggaaaggatgttgtgtttttctcaatttttttgtatctattgatgtgattatgttttttccttcattttgataacatggtggattattttgattattgatgttgaaacagccttgcattctccagaaaaatcccacttggctgtcatgtattatcctttttacacactgcaggttttgatttgctaatattttgttgagaatttttgtgtctatattcaggagggatatgtgttgatttcttttcttgtaatgtttttatctggttttggtgtcagagtaatgcaggttcataaagtgagatgagaagcagtcactcctattttatggacgagatagtgtagaatttgagttatatcttaaatgtttactggaatttgtgagtaaaatgatttagacatggggttctcttttttggaagattttgttttatttttgtctttttgccattttcaatgtcttttaatatttaaaaaagacaatattttcaaatacatgttatttttaaataaatagactttacagaacagttttagatttacagaaaaatcaagccaaaatattaaaccattgtagacttcgagaaaaattaagaaaaatactacagagttcccatatacctgctccctcccaccttctcctatcaacatcatgtattactgtgatacacttttacagttaattaaccaatattgttaaaatatcattaactaaagtccatagtttacattaagtttcactctttattttgttcatcctatggattgtgacaaatgcataatgtcaggtattcccattacagtatcatacagaatagaattgccaccctaacaatcccctgtgttttacctactaatctctttctctctcctaacccctggcaaccactgatccttttgttatttgatatgttatgggatgtcttagagttgatatcatacagtatatagccttttcattatatatatatatatttgtttttatttatttttattttttgagatggagtcttgctctgtcacccaggctggagtgcaatggggtgacctcagatccctgcaacctccgcctcccaggttcaagagattctcctgcctcagtctcccaagtagctgtgattacaggtgtgccaccatgcccggctaatttttgtatttttagtagagagggggtttccccatgttggccagggtagtctaaaactcctgacctcaagtgatccacctgcctcgcctcccaaagtgctggatttacaggtgtgagccaccacacccggccagtagatagccttttcagattgacttctttcatttagcaatgtgcattttgtgttcctccatgtcttctggtgacttgattgttcatttctttttatcactgaataatattccattgtatgtatgcaactaagtttatttgtgtagttacctatagaagggcatcttggttgcttccagttttcagccattatgaagaaaattgctgtaggtgttcatatgcaggtttttgtgtggatgtcagttttcattttaattgggtaaatatctaggagcatgagtacaggatcatgctgtaaaagtatgtatagtttgtaagaaagtgccaaaatgtcttccaaagcacctgtaccactttccatttttgttagaaatgaatcagagttcctgttgctctacaaccttgccaggatttggtattgtcagtttttgggagtttagttacattaataggtaaataatattaccttagtgttgtccttgtttacaattccctaatgacatattatgcagagcttcttttcatatgcttactaatcatctctgtatcttctttgatgatgtgttgtctctttatactttttgcccatttcttaattgagttgttcattttcctcattgttgagtagaaaggttttttttgtttgtttattttgaatacaagtcttttatcatgtatgtggtttgcaaatattttctccaagtttttggttcttggtttcttaaaagtggctttcacagaaaagtctttatttttaatttagtccagcttattagttatttctttttggattgcggttttagtgttgtatctaaaaactcattgctaaccacaaggtcacctagattttcttctgtgttattctctagaaagtttatagttttgtgttttacatataggtctatcatccattttgagttatttttatgaatagtataaggtctgtgtctagacttactgttttgagagggtatttctaattatttcagcaccatttgttgacaagactgtccttcctccattgtattgcctttgcaactttatcacaaaccaattgactatgtttgtgtgggtctttttctgggctctctgctctgttccattaatcaatgtggctaggtctggtagtatcacttctctaactttgttcttctccttcaatactgtgttacatctttggccttttcatataaacttgagatcagtttgtcaatttccatatccacaaaataacttgctgggcttttggttgggattgtgtttaatctacagaccaagttgggaaaaactgacatcttcatattaagtcttgttatctatgaatatggaatatctctccatttatttagatctttgattttttttcgccagagttttgtagttttcttcatttagattctttacatattttgatagatttttgcccatgtattttcttttttagtgctagtataaattgttttgctttaaatttcaaattccaattgctcatttctggtatatagaaaaaaattgacttttgtatattaattataacctgaacctttgctataatagtctcttatcagtgcccgaagttttgtgttgttgttattgacaatgatgatgatgattctttgggattttctacatagacagtcatgccctctgtgaagaacaacaatagtttcatttcctcattctgaatcagtataccttttatttccttttcttgtgttatttctttagctaagatttccagtatgaatttgaagaggagtagtgagagggagtagctttgcttttttttccgatcttagaggcaaagcatctagtttctttccattaaggacagtgttaactgtaggatttttgaagatgttctctagtaagttgagaaagtttccctttattcctcctctggtaataatttttatcatgaattggtattaaatttgtcatatgatttttctgcatctactaacataatcatatgacttttcttctttatcctattagtggcgattatgttaattgactttcaaatgttgatccaccctggcatacttggaataaatccagcttggtcatggtttgtaatttttttatacattgttaaatttgaatggttaatattttgttaagaatttctgctcctatgttcatgagagctattggtctttagttttctttccttgtaatatctttttgaatattatggtaagtctggcctcatggaatgagttagaaagtgttccctctgcttctatttgctgaaaaaaataaattgtttccagagaattggtgtcatttattccttaaacgttttgtagaattcactagcaaaataatctagtcctggtgctgtatttttcagaatgttattaagaattaattcaatttatctaatagatatagggctaatcatattacctagctctcattgtgtgagttttggtatttaatattcagtgtatttcaaggaatgggtcaatttatctgaattatcaaatttgtgagcacaaagttgtattgcagagaaaaagtctgctgtcagcttggtttttgttcctttgtagataattcagtttttgttgttggtggttgtggcttgatttatttagatacttgcaaaatattttccctttatttttgctcaattgtttttcaagattgtatagatatctaagaatgaactgatctttacacatttatttaactattaagcaccttacttagaaatttgcctgtgattgatgagaagtaaggtatcaaggtgtgggccaggtgctgtggttcatgcctgtagtaccagcaccttgggaggccaggcagccgcattgcttgagcccaggagatcaagaccagcttgcacaacgtggtgaaacctcatctctactaaaaatagaaaacgtagccgggcgtggtggcccatgcctgtggtcccagctgctggggaggctgaggcaggagaatcacttgaacctggaaggtggaggttgcagtgagctgagatggtgctactgcaccccagcctgggcgacagagtgagaccctgtcaaaaaaaagaaaaaaagaaaagaaataaaggaaggaaggaaggagggagagagggaggaagggaaagaaagaaagaaagaaagaaagaaagaaagaaagaaagaaagaaagaaagagagagagagagagagaaagaaagaaagaaagaaagaaagaaagagaaagaaagaaagagaaagaaagaaagaaaggtcaacaaggtgttcggggctttgaagtatgatttttttatgcatcaggttattccatgaaacttctatgcaattgctagacacctttatctagaaccaggaattctgtgtgtcttcatacctgtcaccaaatatggcatcagatagtgtcactggaatgcttgaaaggatgtttgaaaattctcatggacatagtgcaagcaaaataaaatatttattattatattcatcatggaatttagagtgaagcaaagaaactcaatgccgtcttgcaaataaggcatactcaccaatattttttcaatttatccgttggacggtgaggaccctctctacacctggtttataattcctttgtgatcacctaatgagagagtgcaaattagggaaggcaatctccaggattctcaaggattgacaatcgacctactctcccattaaatctactttctttagctttatgcagatttaccttccctgaatatttttcctgagcttttatcgtgagtcatttcaagaagctgttaacattatatggcaattgcttggggattggttgtcactttttaaactgtggtcatcaggtaccctcatttgagaaatctttttacaaaattagtaatttaaaaaaaacttcagtgtcttctaagaatttatatgattccactttttcaactttcaagagctatatatcctgtgttttcctttcttttctgtgaggtagttctgaagcaaattatttcttaaactgtattaacatgcatgatactttgttttattctttccttacaattgtttgcttagttctactttattcactctatttcctgttttttggcctcgataaggagcttaaggctgttcaagatcttagtcaatatttgtgcttttgacttatccttctttgtcacaagatgacctgcacagctccaaagatcatgtccctcaaacattcaaaagcaggaagcagaagatggtgtaggacagaggttctccccgagtgcctctctcagaagagtccccagtgtatttcctataaatatcattgaccatagctggatcacactgccacactttctgtaaggaaggatggaggtgtgagtattggattttctaggcttctgtagtgggaagtaggcaagagagaagaaggttgagaaataccttcaggtattcaatcaccttgtttatccccaaatgggacaaatcaaatcatggttattgaacataaaaattatttgcaatgacttccataattgtgttggttgattatttaggttactgtctacacacacacacacacacacacacccacacaatcactcacattcacatgcatacacccaagaaaaagatttaatgagatacctgtgtgtgtgtgttgtatatgtgtatgtgtgtgcatgcatgattcctatacgatgaaaaattggaaatagcatcataatgagatgttaagagatactattcaccttaaattaaaacctaagaaggtatttctgcaaactttcaaaatttcgtatgagaataaagtgcattgtatgccctcatgatagtatattatgtattgtgtacataaccagtaatctaccagtttaaaacttattatgtaactgtttttatttagatgatgttttgcgtattattaaagatgaagacttcaaaatactggagcaaagacaagtagtattatcggaaaaagaagcacaagcactgtgcaaggaatatgaaaatgaagactattttaataaacttatagaaaacatgaccaggtagaatccaggttgagaaaattcagtctgatttatttttgaatcatgtaaactttctcttaagtctggtttctatttaagctgccaaactcctcaagtctgtaaacatgttctgagtttacttctctaccagtcctgctcccatcccaatcctctgctcacctgcctgtcttctctagtcttcctggaatgttactggaatagtaggaaggtctcagaggaagttactggagtcccattgagttgaacaccagaagtccagggtgtacaatactatgaagtttaagcagagaactgactgactctcaagagcttttgtaatcttatagttaactagttctaggaaagaatgagttgctagaaatgtgctgggtttctttctagaagaatgactgaaatagcaattgaggctgaaatcctgcaagggcatataaaccagcaggaccatgggaacaatgaaagaaacatctacaagaatcatggcactccccttcccttcctttccctgcttctattcttttatagatatgctcttgaaaacatatcaacggaaaaaaatcacagacctctgttaaaagattattttacatgttacatgtttttgatctatttaacaatatgcatttgtattgcctatacataattagctactgagctacacttcttattacctcttctttgttttcttttctaatagtggtccatctctagcccttgttttattgagagacaatggcttgcaatactggaaacaattactgggaccaagaactgttgaagaagccattgaatattttccagagaggtaggattcataccatgggtcactatctgttttcgtgggctccattttaaacacctttttagatgtagagtattggaaccacagctctagtccaagggagcttctcaggaaagctacctttcctggggacggagtggactgcttatgactggaggtccaacccagtgacagcctgaggatggccaaagattttcaagaaaccactgtgaggtgctaggcttggggctgggagctaagaggtgtatatttcagtcaacaggtcatctcttgggagaaatatccaccctacccgctatttaggagaaattcctttgagaaggttatggtggcagctgtagcttctttaactgatcatgagttttaagacaatgatgactaattgaatatgtactctacaattcagggggaacatttattgacttagcttactgattaatcttagaagtcagctaaactttgtaatcaacttgacccctggcatattacctggcacatagggggaactctttcaatattttctgagcttacctgctaggcttagtatcatctgcaggatagaaatagtatctcacgcatctccatatttggcatgaagctgatggaaacaaattgaatttcaattcccttgaattcttcttgctgattttagggtaggattcaattcaaaggaagaaaggacacccctcatactcccttcaggtgtgcaagaatatagatgctctttaaggtactgcaaacatgacatacatgttgacacaataaataacaatagttatgaagcctcacttacatgaaagctgaagtgctttcttttgggtgggatacacttaaatctgacttgtgttgcattaacatgtattgccccttagttagccctactcaattatgtctttgcttatgtgccaatgactgtgaaggataataagcatagaacctctgcaagtggtgtgagcagagtgccatggaatcatttaataaaatgtggcatagagtgcaatgcatgctaccagagagagggattgctatcaacacaaggcctgtgccagtaggcacactggtctagacactgtggcaccaagtgtggaggctctcagttactgccccatctccaccccactatcatactgaaaattgccccatgttcacaattaatcttaatctttatttctaattgatccccacttttccactttccttggctccacccaccacttacggttgctttaggaataactcttcaaatggaacttcacccctttcctgtgcctgaatatcagattctatgctggcattgttttacccaaaatatgataatttgcatagaagagaagcacagcaacccctcgttgttacctgttactccctctatcccacaattcctccccggacattttccaataatcatgtttaacagcataacaggggttgggagaatgctctgcattgagtagagtaagtgctcaggatgactcaggctgtttcattcaatcattgtccaaatccctaacccctggcaatcacagagtccaagggactagggctgaaggtatctccaaattagaggtgtgggaacagccaagggcagaatggaaaggtcaaggtgataaggcaaaaaaaaaacaaaaacaaacaaacaaaaccctgaatgagtcattgagactagagagaaaagaagaggatctggaagctggggacagaaaaccaagtttccagtgatgtggagaatccacatcagtgttagcaggaaggaacattattcaccacagctggaatttgttgggttgattgccctggactgtttaaagggaaaaaagtgaaatgagcagtgagcattatttgctactgaaatatgcatagatagatagaaaaacagataaaaaggacaactgaaaaaataccaaagagcaacaactgattcaagagatgcatgcttatttataggaaagaaagcataacaataaactgtctaatgtggatggtctggtattatcagcatcactcctgcctcttcccacaaagctgtcctgtctacttctcttttattgctgttgttgctcacctggaggtttcccttcagtatcttctggatttaatgtttataattttatatctttggtctagagtcaaatgccatgtaatgcttgataatgtgaagcattatcacatggtgaaagccacagaagaaaatttatttagagttcaatacacacaccatatatttcaaaggcatcatctgattgcatctgcaaaatcaccttctgaaacaggttttattgttgtatttatatttgagacaactaaagcacaaagaagttaagcagctccctaatatcacacagctagcaagtagtgcaacaaggattctaccctctgagctttttcactgcacagggcatctatatcagtctgttctcatgctgctatgaagaaatatccgagactgggtaatttataaagaaaagaggtttaattggctcacagttccgcatggctggggaagcctcaggaaacttataatcatggcagaaggtacctcttcacagggtggcaggagagagaatgagtgccagcagggcttgtaataccaggtgcttgtaaaaccatcagatcttctgagaactcactcactagcacaagaacagcatgggagaaactgcccccatgattcagttagctcccactaggtcctgcccatgatttgtggggattttggggattacaattcaacatgagaattgggtgggaacaaagccaaaccatatcagcattcattcctctttcatagttatctgttaatattcatcgccttgatgatttaaatgatcacatcctttcttcctaatgaccgttatccttgaaaagaagtagcatgccctaagccgccatgtacttacttccttttgcacagtgtcaagatctggaattatttgctgttatttgataacttttgaacaacttatagaaattgtgttatattattctgttctgttctaatagcttttaaacctgacttctttttcaaagtttatgtgcacagtttgcgatggacagtttgccggtcaaccagttgtatggcagcgattcattagaaaccgctgaaagggaaatacagcatttctttcctcttcaaagcactttaggcttgattaaacctcatgcaacaagtgaacaaagaggtaaatatttaagaataaaagtgaatgtatacattttctccaaattttgtgaacatttaaaaaatttacaatcagaaaagcaaaacaggaaacagaaaattccaaaaaagaaaagttgcgatgagtactcctatccttcatttagattcaacaattaactttgtcatactttgtcttgctatctctctcacctctccctccctcatccttctctgtctttctcttaatcagaaatgatattgaattttgctgaagtctttttcagaatttatgaaaatgatgagttgttttttccatggatatattagtacggaatatcatgttaatgatatttcaaatattgaattatatccttccattcctatttacatgttgcttagttatgatgcatttttagatacgctattggatactatttgcttatattttacttggttttttttttcgtattgagacttaaaagtgagattgatctctgctttccatttttttggtttgatatctatcaggtttagaaatcaatggaatacttcataaggaatgtgaatatatttttcagtgctccaaaagagtgtaagcagcactgagattggtatttggaggtttggtaaaattttcctgtgaaaatatctgggcctgttgtttttttgtgggataattatttgattgctttctctgtttcttttatggaaattgctctattaaagttttctatcaccctttgagtaaatatagttaaattatattttcctaggaagttatctattccagctatgtaatttgtaaagtaatttcttatcattattatatttcctccatttcagtgattatttctactttaccatttcttatttcattctctttcaaacaataaaaatttaatttattcatgagttctatttttttctcttttctaactactatttttggttttatcttcatgattttctttcttctattttctagtagttttttcttatgttcttctagctttttgagttgaatattaagtttatttattttcaacttttaatttttattgataagaatttttaaggttatacattttcctttgattactgctttaattatagcccacaggttctaatgcatcgtgttttcattatcattattgattattgataattaattattgaaattttgtaattttggtttgtattttcccttgggcctttgagttattcaacaaataaattatttttaaagagattttttaaaattctggtagaagaaaaagcttgcatttttttgaaattatcgtggtgttgccgaactaccatatggcaaacttttgtgaagattctacatgtatgaggagaaaaaatattatcactagtgtcatggtgaaaagtttgaatataagataaaaccagccttacagtttgattcatcttgatttatttttccccaacttgatctgtcttgaatttgggggatctgtcagaaactagaggtatgagtcacctgttttcagtatattgttggctatatttcctgtattttctgatttataatgttggtggccatgttatttggtacatagatatttaaaactattcatggtaaatttagtttttagcattacacaaagttcttatttgtctcatttaatgccttggggcctgaattctgtattgtttgctatcaggaccacacaccctgctttcttattatttgcatttgccttgtacatttttgcccatttatttatttttagcctttttgaatcactttttttaggcttgtctcacacataaaatccataaaggcagatttgtattcatggctttctctcaaaatatatgttaaacagccaaattcactgtaataaaacagtacacaactcacgtatttttaattttttaaattgaaacataattgtccatattcatggggtacattatgatgttttgatacatgtacacattatgtaataatcaaatcagggtatatagcatacccattacttcataactttatcatttctttgtggtgagaacattcaaagtctcctcttctacctattttgaaatatacaatgcgatattattaactatagttaccctactatgcattagaacaccagaggttatacccatagacttatctctccctatttctccctgccccatagcctccccacctctagtgagcaccattctgctctctacttctaggagatcaacttctttaggttccacatatgagtgagatcatgcagtattttgtcttttctgtgcctgacttatttcacttaagataatgtcctctaggttcttctatgttgccacaaatgacaggatttcattactttttatagctgaataatattccattatgtatatgcatcacactttcattatccattcatccatcaatttttgttgataataaataggttgattttatttaggttgattccaaatcttggctgttgtggataatgctgcaataaacatgtgagtacagatatttcttcaatgtactgattttatttcctttggatatatacccatagtgggattgctggatcatatatggtagttctatttttaattttttaagagctgttgagccttttttcatgtatctgttggtcattgtatgttcaatagatatcttctgagaaatgtccattcaggtttttacccatttttaaaccagaatccttttttggggtttttgtttgtttgctattgagtttagttccttatatatgctgtatattaaccttttgtcagatgcatagcttgaaaatattttcttgaattctgtaggttgtctcttcactcttgatttttttcttcactatgcagaatttagtttgatataatcccatttgtctggttttgcttttgttgcctgtgcttttgaggtcttaccaaaaaaaatcactgccgagaccaatgctatgaagcatttcacctatattttcttctagtagttttgttgtttcaggtcttacaggaaaaaaatttagtagatgagataaactcacataatatgtttattttatgttaataatatgtttagtttaaaacatcttattattttaagttatatttactttacatgttatttttcatttactgttgttcttctctgtgtggtcttttacattttcttttgtgtttgagaaatttatttgttctgtaagccatttttattgcaatatctatcagagttgtccaagggaaagaatatagtcatgggttcttagtttctgtttctgattgggccagtaaagccccttcctcatccttcttttctgcttatcactagagacagaaactaaaaaccatggttttgggctgctaaaagcctaaaacaaaacacaacaacaaaaaaagttgggatggataggcttgaaagttcactcttcttgactgagtgcctattatttgttttctctgctttaaatgatatcctattacctttgtgacagttaggtacttaatctactttcttatttcttgagctattctcctattttttgaacttgtgttaaatgttaaatgtactttgtcagaaaatatattatttacatatatgctggatagaaataatcctaggctcacattttttttcttggagtttcttgacagagtatctctattcttgtttcctgcatttctttcaagaaacctggtgccatatttacttttgtttcattgtaagtaatatggtgttttgccagaagaaagtgttaatttttgtttgtttctcaagtctagtagttttactaacatatgtctgagatttgaccactcttgatttctttttctagatacatgttattctttttcactgtctagattcttatcttctcttatttcaagatggttttcctgccttatagttttaaatattagttctgttccattgttcttttttttttcttagggatttcaccagctggaactaacaggggattcttttgaagtttctgagtatttagattgacttactcaatttttagttaaaaatattctcttttggtatgatgaagtcaaatttcttaaatacatatagtaatatatattatttaattatatacacagatatgtacacacacacacctacatacacacacgtgtagacatgcttatctttgcctaacttctgtatctatcactttccctattgacttctctttctttattttgctttcctttacttggctatttttacttctgttctctatgtccttctctgtattttaagttacattagacacctagtttatttctgttattttatctttgtctttcgtgagtgcagcttttatttcacatctacttattgcttggccatttctggttttgagtttgaagttctgatttatgatttatgatttttttaatgttcaaactgcttaattcacattagggtgtcgtgttacagtttgggggggtatttgtcatccttctgctggcttgctttcttcctacctcccttcctctttctctttcttttatttatttctttaacaggggaataaattttttaattagcatagtaattttaattttatttttataatggctcagtaaagattaataagggtttgggttagctcatttcatttctcagctcagattttctcttggttttgtattaatataattaggtagtttcttaataggtagggcctttgcagggggtgaatctgtctcactacctacagtactctctgtttgtcttgaacgttaacctgagccacttgctgtctttatctaagaactgtaagagacttttcttttccaaggtggctcgttttaccaggaagtattgattttccaaaaactgcattagtcttcaaataccttgcttgcagtgccacaatcacccactcctaccctaattcattcttcatggtgcaaaggaaattatcgttttagagcacagatctgaatatgttcttgcttagaatgctttaaatgttccttgttgtttttagaggaaagtccagatttcttcacagggcatagctcttgataatccttcttctacttacttggccaacttcatctccagtatattttcacccagtcacttcttcctgccctctgcacttggcatacattactcactctgcctgcaatgtcctttccctacttgtccacttggtgatcacaccttatttttaccatgcttaacacaaaggtcagtgtctctgtgaagtcatccctgacctctccagagaaagttaattgttttctcacctgtggttctggggaccttatatattactctataataatgatcactttctcatgatatctttataggccttgctctctgttgagacagtctctgaggaaaggtttatgttttcttccctttcatttctgcagtgcctgtcttagggcagatcctggccacctcccttccagcaggagaggtccagccttctccaggctgtctgttggttataatcatattgcctttagctcccagaccactctatgtgcttttgatctggagcaaagaagaggccgttttaccagaaagctcccagtttctcagttggttcacctttgtctctagaatgtagccctcaaaacttaggctgttggtgagattttgacaacatttgctttgtttaattccctcgatggtactctgattcttcagggagaagagttcagattggctttatccttcaatccatatctagcaagaaattccttggcatttgtagtatgaaggtgaaaatagatctttattcttagcatgagagcaggtcccttccccttctactcttgtggcctactaggtgtttcaggtggtttctggaaaggtgagcctcagagactgaaaatctacattaacatactgaagttctgaatgtcaatttggtgctttggaattttaatttcgtttggcagagttttgccatgttaaaccacaatatgcaaattaaactatcattttccttagttatttcagtctacttgagtatggaggaaaagtgaagcaatctgcaatattatcaaatatttgtttttcttagagcagatcctgaagatagttaaggaggctggatttgatctgacacaggtgaagaaaatgttcctaactcctgagcaaatagagaaaatttatccaaaagtaacaggaaaagacttttataaagatttattggaaatgttatctgtgtaagtttctgatacataattgtttgcattataaaagtggtaaatgttcattatagaaactttgaaaaatgcaaaaattaattaaaacatttcatctaatctcattcatgaaaagacattctgctaacattcatggttcatcttttttctatttccttacctccctccctatcttcttttctctctctcattctgtctctcctcgctccctttctttcattctttcttccttcctactttcctttctccctttccttcccttcccttccctttcctttcctttcttttcctttcctttccttccttccttcctgtttctctaggtcttcacattagatatagaggctgcctcagttcaaaccgctgcttcgccaacatacttaattgttgcctgagtttccttatctgttgaatgggaataataatagtatctatctaataggcttgttggcagggctacataattgatgtgttgaaagtacctagaacagtgcatgacagatattaaacacttgataaatgttagctatgattattcacatctttttttacatgtgttgataccttgtcaaactatgtatacataataacataaatattacgataagaaatacactcttttaaaacttctttctacatgatgcatctgttcctgacaacacatacttttataaccaccacatagaaattacaggctaacatttattgtttccttaattccaggccttgtgatgagctgtacacactttatttcatttgactcttataataataactctgtgaagtagttttactagaatttccactttgattttgagagaacataggaccagggctagaagttgtccgcagtcacaaaactagtgtttcgctgggtcctgaacccagggagtctctgcttttaactgctgctttccaaaactctcttttacacagagttcataattatgtgaacatcattatcgatttactatgagttacatgtcttttctattttatatatattacacatcaaaaattttctatacagtcatgctttgcagtacaatatttcagtcaataatgaatcacatgtacagcagtagtcccataagattatcatggagctgaaaaattcctattgccttagtgacatcgtgatcattgtaatgcaatgcattaccatttgtgttcatatatgtttagatacacaaataacactgtattacagttgtctacagtattcagtatagtaacatgctatacaggtttatagcccaggagccataggctgaaccagatagcctaggtgtgtaagaggctattctatctaggtttctgtaagtatattctaggatgtttgcactacaatgaaataacctaatgtcacatttctcagaaagtatctgcattattaagaggtacatgactgtacatacacacacacatgcacacacacacacgtgtgtataaaatacgtataagaaacctctttaattgcatgtcttctcttttttcagttcctgacaatttgtcaatgagtttaggaaggcagaatttataaagttaacaaaatttaatggaatatatgtgctattgagatataaataataagcagaagcctaggactgtaccatgacagcttagaaaactaactttcatacttattgcaggttgcattttctgggaagctggaagtttcttgttcaggctattgagtaatgatgccatgaggaagacagggcaaagaagcaggatggggatgacggcaagtcaagatgtagtgcagaccagacaacagcctctgctaaccacagctagattggtctatcagagttgtccagtattggctgagatgaccaggctgttgtatgctcacatcactcagttacttgaagtaggccatcctggcaatgaggatggcctgagcaaggctatcttaacttgaggcaatccctgaagcggttagaggctgctggacaaccataaagcaacaagtcttgaatccatgacaatgtctctatttacagacctcaaagtagcaaaataataagacttcattgacaaatattctctagaattaaattatagcacccacctagcatataaacctattagaagagggagaaatgaaaaaaagaaagtacatgattgcactgataaggacaaagaataaaaaggagctccctggctcaggctgcagtgttctgtctttagccttgtttgcagtgtcaacagttttcagtaggctgggtcttctgaaagcaccgttctttgcaggggtccatctatggtcatgattctgaccaagtggaatgctgttgcagaatggagacgattgatgggcccaacagacccagaagaagcaaaattactttcccctgactccatccgagcccagtttggaataagtaaattgaaaaacattgtccatggagcatctaacgcctatgaagcaaaagaggttgttaatagactctttgaggatcctgaggaaaactaaagtatatactgtgaagtacgtacctgtttaattattattttattttatttgcttgttgcagtgactgaggctaggacaaacctgtcctaaaaagagaagaacttttcctaaattcctgaatcaagctttatttcctgtgagacacactgttctattgcatagtagccacacagcctcaaagctgaaccttgtagatgctgatgaccgtggggattctggttgcttgtaaccaggctggggatgctgcatccaggctggagggatggagacaacagggcaagcaacgcacccattggttcacacagcttggtcttgagctgtggtgtcttctaccatgatataaaaagcctcatgcagtccctctactcagctcctttccacttctctgctttgaatggccaaagtttctttctttttatctttatttgttctaaacaaaaacaaaacaaaacaaaccaaaccaaaacaaaaaataggatgcatgcgcagaacgtgcaggtttgttgcataggtatatgtgtgccatggtggtttactgcacctattgacctgtcctttaggatccttcccctcaccccccaccccccaacaggccctgatgtatgttgttcccttctctgtgtccatgtgttctcaatgttcgactcccacttatgagtgagaacatgtaatgtttggttttctgttctggtgttagtttgctgaagatggtgacttccagtttcatctatgtccctgcaaaggacatgatccttttgatggctgcgtagtattccatgtaccacattttctttatccagtctatcgctgatgggcatttgggttggtgccatgtctttgctattgtaaatattgctgcaataaacatatgtgtgcatgtgtctttatagtagaatgatttatattcctttgggtataaacctagtaatgaaattactggatcaaatggtatctctggttctagatccttgaggaatcaccatactgtcttccacaatgattgaactaatttacattcctaccaacagtgtaaaagtgttactatttctccacagcctcaccagcatctattattcctgacattttagtaattgcctgaatggccaaagtttcagtgtacagtgtacaatgattgtacagtgtacagtgattgaaaaacccacagtcaccttgggctggtgggaatataaaatggtgcatcttctggataatcatttggcagtttcttaaaaggttaaacatagaatcattatttaacccatcagttctattcctaggtgtattcccaaaagaactgaaaacagggactcaaacatatacttgtacagtaatgtttatagaaaaatgattcacaatagccaaaaggaagaaactacccaagtgtccattaacaaaacaatgaataaagtgtggtataaagatacaacggaatattatttagccattcaaaggaataaagtattgatgcatactgcaacatggatgaatctcaaaaaaattttgctaaatgaaatgttagacacagaagaacacatattgtatgttaccacttatatgagttacctagaacaagcaattatagagagaaaaagtaaattatagcttggggctgaaggaagggtgaaattgtaagttattccttaatgggtgcagagttttcctttaagttgacaaaatattttggaaattgtttgtggtgataattgcaaaccatgcaaatgtcattaataacattgatttgtatactcaaatggttgcaatggcaaatttaatacacacaacccctgacatattgccaggataaaaaaaatagtaacaaaaatagtgaaataaggaagaatgatttctcagacaagcacaaaaagctcttgcaagagaactcttcaaaacccattccaaaatgatacaaaattaagttagtgttacatttttaaaagaaaattcatgtaatcctaacacagaaacccttaattaaaagtaagcctttatgttgggagtgtaaattagttcaaccattgtggaggacagtgtgctgattcctcgaagacctggaaccagaaataccatttgacccagaaatcccattactggatatatacccaaaggaatataaatccttctataaagatacatgcacggatatattcatggcagaactatttacaatagcaaagatatggaatcagtctaaatgcccatcaatgatagactggataaagaaaatgtggtacatatatggcatggaatactatgcagccataaaagggaatgagatcgtgtcctttgcagggacatagagttggaagccactatcctcagcaaactaatgaaggaacagaaaaccaaacaccgcatgttctcacttataagtgggagctgaatgatgagaacacatggacacatggggggaacaacacacactagagcctgtcggtgggggctgggggagggagagcatcaggaagaatagctaatggatgctggtcttaatacctaggtgatgggatgatctgtgcagcaaactaccatggcacacatttacctatgaaacaaacctgcacatcctgtacacatactcctgaacttaaaataaagttgaagaaaaaagtaggcctttaataaagttcttaaacagttagtaaataaaggaaattttgtttcaaacaaaatgtaacaataccaacaaactccctaaactctttcttgggcatctctgacctgagagtcctgctgaacccccagctgctcccccaggccaccccacaaccctcgcctttacactccagcctgtccatcgtgttcagaaggagctgcacaatctgtcctggtatttttctcaccctcttcctattgtcttcctaacctttggtttaaccagcaattctgaatccttgaacgggttgggtagaaatcttactcacaagttaatatttttaaccctgtcacaaatgtttgttcattaactcattgctctgtaaatgtttgatgactgcttacttgctcagtcaggctgtctataggtaaaggttaaggcccatctcccagctctgtgatttgtgtgcaaaacttcaatatggaaactgataaatgctgaaagattagtgtatagcactgtcatttattttattaagtgcattctttcttttcctagaactttgagaagataatacatatgttcacgtcaatatacaaccatttggcacagcttcctgggaggaataataagaaaaacatgctttggaggaaaactcaagatacaaaaatgaatggctatgcataataacaataagaatgtattccccaaacaaatcttaatgtttatttttaactgatcttccggaaaagatttaaggtatataaatgcacacaatctacaacaagataattgagggaggaacacggaatgtggggaagaagagagtaggagagatcaaataaagccaggagtggagttaaatacaaatgcatactgcctaatgtatattgaaaattggtcaaagttttgactctaaattttcttgcagaaaatgaggaaaaggatgacatgtagatttatatagtttgcaaactatagtactgtccaacagtccacgcagtgtacctaactccctcatggtaagataatgcaagaaggtaataagccgattttgtttttgtttcttttcctctctcatgatgtaccctgaatgacattttctgcagtggtatgcccttaagcccatagccagagtaatgtgtggttcccagcatgttagccgtgacaccctctttttcactcaggagaaatattagattgcacatgattgagaataaggttgctgaatgattaacttttcaatttaatttcttaactctaatattaataaaagtaagacgctcacaagctttgatccttccacattagtaacagattactcactgcaatactttcatattccaacataatgtttgagaagcatgcctgtgaacagtgttaaattatacaaaatctaattatgtacataggagttatcagtaaggatatttctcaatctttctccagaatgcagtaaaaaataaggtaaatcgattatcggcttcctttagattgtgcagagaaataagtacagtcaataccttcactttcctcgcttctttcaccttccctgctcccgcaggttgaatagtattatctgatgctttccatggcctgatagtatctggatattcataatatgattgtgctgagtggcacactgctattgcctcaagaatgatccagaccttcgaatgcattggggaggggggaacaagaaaaaaaaaaaaaaactctcttaaaagtgatatcgtatttcaccagcagatggcaagctacactcagttgtgtgtatatgtgactaaagttgtgcaaagatttcatacacaagacatagagaaaggccatttctttctaattgaagtagctagaaatctaataatcaatgtctaaagagatctatccaattaagctttaagttgagttcgtcttggtctcgaggggattgtatttagtgggtggaacacagcagcaagaggtaggcatgtaaggactggggttagcagtacttggaaatatcttcttgcctctgggggagaaagattttaaaaggctagaaagtcaccagggcttctgctaaatgggctggtcttgaatttcggctggactttaggtagtaaaagcatggcctggaccactgtggctgagacaagtaaggcctgaaaaatcagcaggaaaagttggagcttgaggctgagaactgtcagctgatgagatacccaggagggtggggatgtgggtctgaattcagggacaggctcagtaagtaggcaatgggacacctgtgcagaaactgcctctatcccatcagccaaatacatgaggatgacttcgctgggatgaggtcagtgtctacatgaattcccccagacagaacagtccccattctctagtactggctcagtcatgcaccttgaccctaaagccagagtctctctgatggctacacccagtccatccagcccagttccatgacaggacacccaaagcattcttgatttgagcctaatgctctccagtaccttctttggatgccctgtggaagatggacagatttcgtaaaatatgctgtcctctatttgtggccctctagctggactgtcttagtgccccttctggacactgaaagggattcctgacactgatgcctatctgaactgtgtctgaacctgctcaaccattggaagctactttggatgacctccaaagccaaacattttatgcattccaaaaagggagaaagttgactcagcaattgtctgcctaattttcagctgctgaactatttcaatgacataatgaatattttaaatgattataattattcttaaaatgttagtgaattttaaaagtccatcagtttgaatcaacaacattattttagatttattttggtaccatggcgaaattttattcataataccattttttttgcttaacttcagttctttgcaccttgttatattattcaagttcttataatgttatgagatttaggaatagtcctctgattatatgccctccctgttagctgaatataattgttaataaacaatttaattgttttcccttttcataatatgtcatttaagtgagccatactggccattagaaagttgttctcattgagatactgcagctgcatgttttagttataaaatttttctcatacaaatatcacaactaaatatattagacttaggctgtaaaggcaaaattacacaccatggctttgttcttgacattaattacctctttacaaatattttcttacattccagtagacagaaatttctctcaggtagcaaagcaaataaatactgtaagttctgtagtggtgatcaacatattctttctttaataaattcgaaaagaaaaagacatgaaaaagcatgaagacaaaagtcgaaggcttagggattaaatagtgtatggctgccagttacagaaattgacagagacattctgttgcttgacactactttatagtttgtgctggaaaagtatggtggtcaaactttaatatttttatgattgtcatagtgtgatgagtatgagaatgtgaatcacaacctccaattgcaggggccatattgacaagggttctagctctgcaccctgaaattcactgtcacctttgcagcaagaccacactacctatgggttgctcccagtcagtgactgagcacaacaggatacttagagctatccctgggagaagagggactcctttgacagatgactggctcaagactcccaagtaaccttgccaaactttccttagactttacagcagtctggaatgcttctacccaacctttcttctctcttccctctctccttcactcagggtggacatccattgtgctctgacagctctcccagccctacccagatccctccccattctctctcacaggcgttttgcacatttaattctgttttggcatttgcttctctgaggacccagatgaaaacacatatgatcaagggaatagttttcaaattagcatgtctaaatgtctttaaatcaaactacattctatatatatacctgtctgataatatttttgtagtatctgatagttataaaagtaacacatgttcattagacaaaatatagaaaacctttatggcttacactcttttttttttttttttgagactgagtctcgctctgtcacctaggctggagtacaatagcgtgatcttggctcactgcaatctccacctccctggctcaagagattctcctgcctcagcctcccaagtaggtgggactacaggcgcccgccaccacgcctaatcttttgtatttttggtagagacggggtttcaccatgttagccaggatggtctcgatctgaccttgtgatccacccgcctcagcctcccaaagtgctgggattacaggtgtgagccactgcgcccagcctatgctttgcactctcttatggcaacattttttatggtctttagtattcaataatgaaggaaagttatttgtgtcacaaacacctatcctacactgacatgacttgggaaccacattcaaaagtccattttcacaaattattggtaaaataaactctgatacatccaagctatgcaactgtccaatataaacctactgttgcattctttagtggagcaattttcatgctgccttattaagttcatacaccaaaacaggaggaaaacccagaaggattcacaccaaaatgctagttttgacattttgagtagctactttgatattttgggtctttttgttttatttcatgtttttgcttatttctgttctttgaataataaggggggatattccattgctatccaagggttcagcgtcttctttggggtactttaaattaaagtagatgctctatcttgggtacttcattcatctggagaacatggcatgcttccttatcagttaaatcacagagttgacaattaattgatattatggctaataatatcagttaattactgatatactgttgggtggtatgcctctcactatgatgtaatacatctttcagtgtaaactgcttttcaaaagtattttccaataggaaatatggtcagcattagcataaatcagactataacaagaagcagaaatttgttatcctgttgctctttctatggtgataaataaatagtccctctagcagcccagatttatgttaccaagaagtcagtggactttggactggtaaatcaaaattcaggaaatttgagggcccagatctgcctctagctatgtgcaagaaatcagacaaacttatacaacctttctccaacaagcgaggttatgacttctgaggtcttattcaaccttttcattccatgattccaaacaatcattcttgctctttgaatggtaataatagcaggtacatccttgcagtaaaaatgtgctcttctttttcactcagggactggttaccccaaccagaaacaccctcaagctagtaaggggttttgctgtaagaatgcgatagaccatcttataggtatccaaggagagaaaccaaaagtgtgatcagactgcattggtttagagctgaaaagtaagaactaaggctatttatgtaagttctcatgtatcttaaaagaagtctagacagagagcatctattggcaactctgctatactctaattcttcagttcctgtagttaaccagttatattattaagtttgatttgttaaaaaaatagagaaggttgcataggcttttccagcagttaagaaatctgtctatctatctatctatctatctatctatctatctatctatctatctatctatcatctatctatctatctgtctgtctgtctgtctatctatccatccatctatctttctatccatctatctatcaatcatctatcaagccatctatttatctctatactttgaggggctcaaatcactatttcccagctgccaggagtgtaggaagtgctgagaatgttgtcagctgatggttcacagacgaagggaggagctttgcccaaggtggccaccagttccaactttacatttttaatcaatatggggaaggagaaataatcttagtgagggtttccatacaccatacacttagtgagcatttccatacatggatggtccaagcattctggggcgtaactgacaagatcaagaactttccttgctgagcatactccttggcccgaaaatgctatttaaacaaatgtatcccaaggtactaatgaaggatgtgcacagatgtttgactattgagatgtttattcagtattgtcagtgaagaaaccacctaagtatccaatagcacaacagtttgttgagtaatgcatactatggaatataacacagctgttagaaatgagatggtttctgctttcttgacaggaaaacttatctcaataaagggccaagcaaaggaggcaggttatgaaacacatgtatagcaggttcctagttttatttgttcaaatcattttataagtgcataagaaacacctggagaataatatgccaaaatactaatagtgattacctctgtgtagtggagagtaggattagataggattttatttcctttgggcgttgtgcatttattgaatgccttatagagaatacatgcttactgtgttagcaaaaggccaataaaattgttttttaaaataaatgcctccaattgtccacaattatgaaatttgttgataaaatgctgcaagataagttctttttttctgattaaagtatcccaactgtcaagtaattctcatttcagaggtggaacctcaactttcctctctgtacatttatatttaactcctctcacatgtatttaggcaaagaaaatatttaaatgaagaaaacaaaatttggcactcacatgaaggccatttttaagcttgtcaaattattctcagggtggatgtcctgggaagtaagatgagtgacatacctctcttgtgggtataaaatacttgagcattagccaactaattagtacctaactcctaatggtacagacaaactcactgtttctggtgctgcttaagagggtgttgacaagaagcatcatgatcatgaaatcaggtaaccaaaaaacaggaatccagacattgtctgcctctcctttttatttatttttctttattattatttttgtttttagagtttctagctaaaaacagagctgaagtcattgtaaaaaagacacattatagttttccatatgctacttctctagatttttcaaaaaatcccctttcatcacaaaaatccttctgcagaccataaacacataaagatcttttagacattcattccactactgttccttcttagaagcattatattttcgatcacattttaaaacatcactaacattgcaacaacagatatcaaaaggtaataaaacatactgtaaaaaaattacgtgttttgtttgaaatatggcatttattttacaatgcacatattaggtcgaattgtaacaagcattattttccctactcttctagagtatgcacacaggttactctgaatgcaatgcaataagccttttccaccagctttaactcaccttctgtaccaaagggcaaacctaccactatggcttgtgatggcttacaaagaaaaactgaagcatagccttaagaaaaatgctgcaagatgtgtctatgaagagcactgcagtgagttgttagggcaaggggcacatggccttacataggctgtcccaggcaatgcccagcctcatcctgtaaggaagtcggaagtctccgctttggaaactagttagctcacactcttttcgggtttgttctcttctgggcactcctagttttaatgttcttcttgggactggctggtttgggagcaggaggctttccctttggtttggggggattactacgactggtgcgcccggctgttttcttcttgtcctgaactgttctccgctgttcctgcagcctctcttcccactgctgaaaagcaatttgtaaacatgactgtcaaattatctcacccctttatggtgctcagctaatgtgaaaattaaggcaagtttttcactgtaatatattaatgacggtaacaattgtaatagctaccctatgtgaagcacttatcatgtaccaggtgacttggaaagtgctcagtgtgtgatgaagtttccacatgcattcatttcattgaaacaacagtccttccaaataggcaccactgacaggggcaggaaacaagcccaaagaggttatttgcagtgcacagagctggtaaatgtcagagtcaggattcaaattcacccactctgactccagagcctgaggccctcacccatgcacttttgaccactagccccataatgcaacattcctacagtgcaaagccttctaaaaaggctcttatttcatggctactagcattagtttaccccatgtcactgggaagtcaggagtttgttcacttcattctcccacatccaaaggaagacagaggccccttctacacctagtcatccgctaacgtgctagctatccagaaccattgggaattgagtcattctgaaaaatcaagtttctctgatagaaaaaaatttattctttaaatagctcaagtaaggaacaataaaaaagtgagtccacttgaattgacattgctttatattaacgcagatgtgcctgcttggctagagtctatttcattcagccaaaagtttgaccacagtcatcagctgggtattattctaggcactaggaatgcaaagaaaagaaaaacattgtccccactgtgctatgacacacttctagtctattctaaaataataaactcactatggtatgttgctatcatgtggtgatatttgcaaatttctactgaagtatattggaaaatatgctgccaaactgaatggtccccagagctatgattattgaatgctttcctcttggcaagctcaggttctcatggtctgcttgccttcatgtattgatgcttctaatctactgtagtcctggaaaccagataaccaatcttgctagaatttcctgtctaatagaactaagcatgctcctgagcagctcatgagtttttagctctgatttaacacaatagtgtttggttctcttattcagaaacgcactgactagcggaggctgtgttctaactacattctccataactcaattgttaatatgtacttttctcttgcttggatctctttattggtgcaaactaagagagcataggcaatagcaatatgttttgtgaacctataaacacaaattcttctgaatatatatgacatattttgcaaagaaggatgctttaaaaatttaaaaccaattacctggtgtctttagattggtataatttcacatctctgggaaaaaattattctaactcctctaattgaattaccaatatttctacgatgttaccacaaaaatcatagatttgactgcaaaacgattactttttgcatataatttttgacaaaagtcttaaattattataaatacaggaaaagattctgctgtgtatagtgatagggtaagttttagtactagatatttcacccctccaaatatatgtcagttttaatctcaatagatattaagtctgctcaagtatctcatggttcactaaaacaactacatgtaataaagaaacaaaaggctcatttaacttggaaataaccagtaccttagtattgaacacaactaaatcacctttgaagtcgaatgatagattcctggtaaaaattctgagtgagaatagctacactcttaacggcctattcaaaagacaaatactgttgctattgctggctcttatgagagcttggagattagagaatgggaagaattccccaactctaaagaaatctgttatgtgcacttacatccatcttcacagcattgttcatgatacttactatggatcttttactaagctgatctctccatttttcaactaagcaattttcaagaagcatcatcctgaaaaaaaattatcttagtaaacagatttttattacaaaagtaaacagctaaaaatacagaaattgtaaaaaaattattcaataatcctttaccccataatccacacatccaccatttatattttattggtgtttcctttcattcctccttgtaacaatattaattatatttattagatcacattgtgtattgagatgatctgctgatctgcaaatttccttttgtcattatatgatctaaattttctgatgtaattagagtaatttaaaaatataatgttaataatataatactatgaatatggatatccataatatatctatccatttctttattgctgaattccccttttgcttagctatgattaccagtattgcattgaataaccctgtatacagtagtgtgcactggcttattattttcttaggacagatttttaaaatagaataactgagttaaagggtatgtattttttaaaaagattttcaatgcatagtgccaagttgttttcaaaatggttgcactttcatccaattcactaacattaagaattaggtgaaaatggaatcttatttttatttggatttagaattaaggagataattttttaaatgtttacttactatctgtattctatttgtattactatttgaacttctctatataaatttctgtatatatatttctatatcatgatctcaatgtttaaatattaattttatgaactctttagtaagattactattttttcatatcttttcaagtatgtttctcaatttttatttgcctttctatcattatttgtgatttttatatgtataatattatgcagtcagatatgtgtattgatatttttccttgtaatttcttacattacttttatgtttacaaattacttttcttttcagatataacatatttagtcactaattttgtcctttttttaaagttcttagaatatttatctatttaatccatttgaaagttattgtaaagcacagtataaagtgaaaagaatgtatttttttacaaataggaatattttcaacatttaccaaataatacattcattttctattgatgtgccatatttccttcataatgaaaagctgtattttatgcattaaaacctgtttcaagagtttttcctctgtttcatttatctttacgtctactattgcatcacatggttttaacaagtgtaactttacaccaggtttgcgggtctcataaggcagatttcctctcttattttcagaattgtctttacatacccttaccaatttattagaatcatttgtgaggacataaatcccaattatccaaaactatttttactgggatggattataatccattcatctctccagatagaatgtaatgaccaacaacctggtatccccaactggatctctagcactgcagcagatgcaaacaccttggtagagatgagtccagaatcactgattgcttctttagggagacaagatatacgcagaatctggctttaaaaccaagaactcaaggtgatatccatgttgtaaggagggcacccaagtactgatagaatacagaaaagtggagttagttcccaaagatgtttttggtttcttttcagaggaatagtcttaggttatatctagaagaaacagatgagcattaacagcagagaatgggagggatgccttgttatgtaaaactgagtgattttgctggagaagtatactgcatcaacttatggggcccaacatggaggctgggctcaagagtttgactttatattacaagtaatgtaccaatatccaaaaaaaataagaaagaaagagaggccagggagacaaatacacacagctagaatttgtgtgtatgtgtatgagtgtgtgtgaagcatatatttatttgtttatacattgccttgtgatgatttgaattgagaatcacatatccgattcagaaatcaccttaaagtgtgtgtgtgtgcatgcgtgtttgtttgcaatactctatcaaatattatgaagtgtttatatggaaaatatgtggaactatagtctcaactccctacttacttgatctgtaagctattaaagtggccttaaaagttcagtatgtgccactctaaaattgtttgaatgatttgaaaagaattgttcttccttaaaataattgacttgctgtaaattttgaagtcacttaatgaattttgaaactgatttttaaagactctattcaaatactcatattttgatttttccttcattctatgaagaattaattgatagaatatatgctattcaaacagaggcatctgttaaactaatttttttaaaaagactttggcatatttttgttatatttttaaaccatgactgctaactgagattgaggtcttcctaacagtgtgcatacagttccttctgcctctttgtgcctaccttgagcgccactcgtaacacatgatgagaacatcttgatggggcaggatgtgtggacactggcaagaagaatttgtaatgagcgggacttgagttcgagggatgggtgatgaggacttgaagatctcttttacatccaccaccgttgtgacctcattgcagccactcctctgcacagcttttattttggcatgaataactgcaatttaaaaatagataaaagtgttgttgaaggttttggggaaaaactagggatggtgtattcatgccaacttctgagcctctcttaaagaatcactcctgtaattatggttatgtccaagtggcctgagtgcaggcaaacagcccacacagtcatatgctaaatggatggtgtcctatattgtcaacattgtcttaaatgttccggggcatactgcaagataggaaagcaagctgaaaagcaggttttagtctttctctgcctttaggtcagtaaaaaattcacagaaacatatatttgtattcttccttgtggtgatttgaagtggggatcatatatattcagatcagaagtcatcttaaggtttgcatttcttcaatcactcatctgatgcttgagcttcttctgttttacagagatagtcattagtcataacatttttgaactggagggagtctctgaggactactgttctcaatcttttaacttcacagactgacaaagtagacccatggtgagcagagatagaactgttattacagatggctgttaatgtcactgtctctgaccaagttttaaatgctggtttctgtggtctcttgctattactgcctcccgtagagttgtaatcagcctaatatggctctgtcttggattccatttcaggaagccagtttatgaagacaccaaaggacttgaatacaaaatggtttcttcatcaaggtcgttcaaaggccataacaccccagagaatgacatgacagtgaaactcagattaatatctcaggctggatcttggcagaggagggactaagtaaatcagatgaggatggtagctacatagagcaggctttaagaaaaaaagctacaggaaaagataaactactttttgttgttgctgaattacccccattggctaaatatgattcttaaatctgatagttttgtaacagcttattttttttcagatttctacatttctgtgatcctcctactttcatgtctgatatgtatcctaaagtttcttactgatataaaatttcaatctgcaagatgaaaactaagtcagcaaacaaaataagcattttccctaaaaccactttatgttatttcagcagaaatgatttaagacatgcaatgaaatataaagtaggcagcccaaacagacatttttaaaatgtctgccttttacatttctttttgaattgaaaaagaacatatgttaattaaatttactttcagatgacaattgtgaaattaaaattacttaaaacatttcaaatttcatgactgacttattcatggaagaaaatgctgaatggttctttcaagtaagagagaggagggcatttaaactagttcgatagtgtaaccataggattttgtgattaacatttttttcacaatttatttaagatgttaaatatttgtagctagtcacaagtaaaaggatatgcaggcagatcttaattgtctgggcctatgggccttaattctctgactctcagataatcagatccatggatcattctctcattcttcctgcagcagtaaaacctcaggaagagaacaggtggggtgtgccatcagggctgataagcacttctcaccaagacaaggaggatcaagatgtcaaattttcaatctgatgcatgtaatttttatcacctgggtcatttcctttgtttgcacttgattcatccagaaaagcaagatattttgcagttgttattgtgccatatattaatagaattcacatgatcaactggaaaaatagtcaaccttttgttttctttactttgtgactagctttagtgagagcgaccttattgagattccagctttgtaatgaaccaagtctcaaaagtaaatggctttaacagacgacttaccatagctgtagtttttgctgagatacgttgccaaagttggcttcacctttttacacttgcaccgatctaaaaaaggcagaagaggcagaaagttggaaaaagaacagaaatcactctggagaggagaagtagagggaacgtccatgaagaaagaactcaccggggcttaggcgtttacagtcaacatcaagaggcctttcctgtaccatcatgtctggtgtgatgtctatccacttaacatctgaaacacaaacagggccacatgggcgtggttggtgatttggtctgttcacccagctggtataaagagccctctgaagatataaactaaaacagtatctcaaaataatagtatttaatggtaaaaatgggccaggcgaagtggctcacacctgtaatcccagcagtttgggaagccaaggagggcagatcacctgaggtcaggagtttgagaccagtctggccaatatggtgaaaccccatctctactaaaaatacaaaaattagccaggcatggtggtggatgcctgtaatcccagctactctagaggctgaggcaggagaatcgcttgaacccgggaggcgaaggttgccgtgagctgagattgtgccattgcactccagcctgggcaacagagtgaggctccatctcaaaaaaagaaaacaagacaaaaaatatttatataagtaaaaacggcatgtgattgttgacttctcctttcataatgatatccagggcttaggaaagaaatcctctgggggaatatttgcctatccaagcacaaatcgatgtgaatgtatatccatttaacctcactggtatatacaaccaaactggataaatcacatcactctctcccaaagtcatatttaaatgttgattttccaagttaacagtttatgttaatcaaaataaccaaaatatttccaaatccctacctcatatcttgcagtgcagaaacagttcacaggtatataaccaaaaccaagcataaccctctattatttatataatttaaacaataaatatgttttctttcctaaaactctaaattagagaggagtttccatttaccctgttcacttaaccactcctccttcatgtttagagcaatgctctggggtataacttcagagattccagcacagcaatatcatagtctgtttaaatgtggggtaacctgggccagataaagcctggataaaagaatgcaaaaatattcctaggtttcatttcaagaagtgaatttaaacctctccttctttttagaaaagcagtcaaatgaccaaagaaaaaagaaggaagtggaagcagagatggggttaactaaaatgccactgtagttggctccgggccaatgactatgaaacagacctcacaattttccagggaaactgcaattacaaatctcactcctggtgggaagcaatgaccgttactgctttttcagaaaaaaaaaaactttttaagaagtagcgctaaatggaacgagtattggcacctgcttggtgagattattttgggcattaaatgagtcaataacgtgtaatgtgtttaacacttgctcagacacctagcaacacctgtttactgctattatcatttctgttattactataaatgcaaacatcatcgaaggctccctttgtaagcaaaatctttttttttttctttatggggtgcagtgctctccgctagctcctaaaattcctatgggagaaaccagactttttctgaagaaaatgtttcccccattctttcccacctcctacaagcctcagacgcccctggcagccttaggtgtggccgcccagttctcgattggcagccacagccccgggcgcctcctcgcctccctccatccttcctacggcctcaccctccgggaggtccgtgacgatggcttcaggcgagatgcacacgccacggtcatagacaggcagctcgtcgcaggccaggctttcgggccagctgtggttgtacatcttcatgaggggctcgcagtcgtcgcgcgcgcgttggcacaccgacttgcacggcttgatagggtcgtgcaggaactccagggtgcaaatgggcgcgtacatggcacagaggaagaagcgcagcacggcgctgcagttcacgtccaccagctcctcgtactgctcgatggccaggatggcgttctcctgcgtgctgtggtgcaggtggttgggcatccgcgtgatgttccagggcatgtgccggcacatagggatgcgcaccgcctcgcagggcgcgccgcgcacgcccagcgccaggtgcagccacaggcacagcgccactaggatggagaggaacatggcactgccctctcgcgctgcgaccccggcagacagaaagcgcccttctcttcctgccaccctcatctttcgctgtcccttcgccgaggaagaaatcctctggggcgcaggagagtttcttcccccaaactccagtcggcagcaaagcggggccgcggggtccggccgcggagctccgccgtctggcacacagggcacgagcagcgccagctctcagccttcggggcgcgaacccgcccgggcagctccagtcccggactccgcagctcggagcgcagccagccacggccattgcgggaccctatttatcccgacacctcccctgacgtgggctcggaacgctcccttggcagctgcagccgcggcgcgggctccccctcggccgccccacccccaggcccgtcggtgcagaagcggtgacatcaccccctctgggccgcagcccagggctggaagcctgctttccccctaaagtccctcctttttagtctggccagtcttttttcttcggaccaagaaaaagaacctctggcagttgttttcgacaccggatacaagagggtgcgggagagaatttcaagagagagaaagacactctttggctgaaaactgaactttgctccctctgccttagagtttttccaagtatagagttgggggaaaataggagcttctgctgccctctaattctgaaatatatttgctttctccggtagggggcatgaggagcgctgaggacagttgggacaatgtcctgcaaggcaggcgagagtgcagtgaatgtcagaacaggagggtcacgttgtataaatcactcccactccgcccttagttgtgtggagtgtggtttgttgttgttgttgctagtagacagtttgggccgaaatttttccagtataacacttggtttgtttctgctccaggaagttaacagaactgggggaaggtgtgctagcatcttccagcttcagaaatgtcttctaacatttcctcttccttctaactccctgttcccctctgcagcattagtggaacccaggagaaaacattgggcaccacaatctgaaaggtctcccctgctctgatccttcatgccaaaggatttccacctcagcagcctaaaatcttgatttttgatgtgctcagagactgttgcttgagttgagtaagaagctgtgtactatgggatgcaagtatgtatgttttgctttctcttttatcttacttgcattaggaaaaggtagtccaattgctggctcagctatctacagaaaagggaggatttatttatatgagattgatgtatatcaatcttcaggtggtaagacttctggtatatgctatttattagggcatcagcaatatggaaacatgttctctgaatgttaatctttaaaaacatagtttaacttgaatttaaggcacatggtttttctctccaaagcttaaacctacacaattagtttagttttgactgaggattaaaactaaagactaaggattaaaacagctgaggaaacaacaagcacaagtgacatctattgggaatttacaatggtcaaggtatgaagctaagaactttaaatgcattatcttattttttagggaacatgaattaaacatagtaagtgaaaaggataaatgagacaaatacatttcaggattcatccaaagagtctggttcttatttaggggaagcccagggtgttcttacactgccaagccactctagaaaggtaatctagttcctatagaaccagtctccacctccaaagatgccaagccaggctagtaaaatatcacatgaggaggaaagcccagatgacatctcaagccatttctagcagtaaactccaatgagtctaaacccttcactgggtgaaaaagattttcagctggagttcctacctggggagcaagagaaagagctgaactaccctacacttttcctatgaatctgagcagggcaaactcggagagggctcaaatttctgcagccagtttgaacctgctgcatctgtttaactatgtaagtaccaagtcacaaagtcttatgggcttccctgatgttctctgaggcatgccctttaagaaaaggtaagaggaaatgaagagcccttcttcctaaagctttgtgcctgccccattcggcccattggtagtgtctctggtggttcgacagacagggggcagcagagaaggatgcatcaggaaaacctgtcaactgtccctcctcttcgggacttccagggaggctgtgattctagaacaccctacttcagcattcagtccattctttccatgccttacatttatttaacaaggctcgggaagttgcctcattcagtggcttctctctggtgactccttttggtctcctcaagtgcctgttctttgcccatcctttaaatgtctggagctctctggggctccatcctaatccttcttctcacactcaacactcccctgaactccaggttttctcacccccaacacttaggacatttggggccagataattttctcttcatttgggagaggggaggtggctgtactgcacattgtaggaagtttagtagcatccttggcctctacccacaaaatgtcagcggtagcctcctccccatctacattgtgatcatcaaaaatgtctccagatattgccaaatgtttctttgctggggagggggatgtgaaatttccccaggaaccactgttctactcttcggcttcatttaccacctatgtacctatggcttcctaatccaaaagctctgctggtttccagaagtatttatccagctgtcccttggatatttccaccttaatactccacagtcagctcaagatcaaccaatcctaaaatgaattgatcatctctcctcactcaggactggattcccagtggcccaaaccagaaacctctctctctgagttgaaatgcttctctacagctcccacctgtcttccaccctttccatgaccactcccgctgccttagctgagtcaggatcatctctttccaggatgataacagtagcttcctcctctccctgccttccctctggccctaccctttctgttgtctaagtgggctttctaaagcatatgcctgatgatgctcctccctagctttacattgattgatagttcccacagtcctcaatatcaatgacaaattccttaaaatgagtgctatggcttcagagtactcctctaccttgtccttgaaccccagcattattcttttcttgtccttatgcccttcattcaggaatgttatctcccactttcacctggctcaatcttaatcatccttgaaatgcagttcaaatggaaagacgctatacatttttttagttcctttcttttttcttgatttcatactttatcactatatttttagagacagggtctcgccatgtcacccaggctggatggagtgcagtggcatgatcatagctcactgcaacctctaactcctgggctcaagcgatcctcccacttcagcctcaggagtagctgggactacaggtgtgtgagcctcgctcattccatattatagatcctaacattacataactataaacccaattaaccttattcttgaagaagcgaaaccccccagacacccaaaccactcggctggtggtattgccaggcgatgggaggagcagtctcactgcaatgtgaccttgaggctatgtccatgagtcctaggcccaatgcaaggggctgtctactagtctcctagactcttcactgggaatgggagctgaggagcggccatgatgaatagctagtatcatttcttcaggaaaagactcgtctttccacttttaatttggaggaagaagtttgcaattttgtcgaggggcaatgtaggcggggcaaacgtttgcacagcaaacgcagcagctctgcttttcctatcttgaccttgaacttgcccctccctgtgtgattacctgttgaacactgaagttagtggagaaacacacttctcagcacagtctccccccatcccccctcttaaaacacgatgcctcccaggatgctagtggcaccactgccactgcatttcctgttggcagcagtgagcagtgaaaaccgaagcggcagaaggcagtggcagcaggcagtggcagcaggcagtggcccaggcagaaatagctcccgcgcgattcactggagccttccccgggccctggtcccggctaccgggactcgcgcgtccggatctcaaaagcggcagaggccaccgaagggacaggaagcactttggtccagaccacactcccggcacagtgcggaaagagccggcgggagccactctgatcccggacgcctcagcgcccccttgggcttgggcttgccctcgggccggggaaggctgaccgcgatgccaggacgcgctcccctccgcaccgtcccgggcgccctgggtgcctggctgctgggcggcctctgggcctggaccctgtgcggcctgtgcagcctgggggcggtgggagccccgcgcccgtgccaggcgccgcagcagtgggaggggcgccaggttatgtaccagcaaagtagcgggcgcaacagccgcgccctgctctcctacgacgggctcaaccagcgcgtgcgggtgctggacgagaggaaggcgctgatcccctgcaagaggtacaggtcatcggcccgcggggcgggagtagggagccgcgcgggcatggggagggcgaggtcgcagaggcctgcgccctgtaactctttccggccccttgcagctcctcccttctcccagagagatctttcgcgaggagggtctcttggggatagcatggtccgggactgggaggggcgctgcgcccaccgagggcggcctgctggcgggggactcagtaacacccagcgaggcggtggcaggtaaagaagggacccatccagggcgggatcaagctgcagagtgccccatgcccaggttcgcccctgttctcacgctgctgagtcaggctctgggctcatggagccccctgcagtctagggcgtgtcttctgcgctatctcatttctttctagagacatctgctagagaggcacgcagaatatgtattttctaagaaatactttttgtattttaaaagaatatggcaagattacaaacggtatgggaaagtgataaaaagaaaatttcacccacaaacttagcaaattgttacagcattaaaattttggtctactccttttaagttttttgtttattttaaagcaaattttacatactatgatcaaaagccatacgttatctgaatctttttttaacttaacattgtcccttatatgttcttatttgccattttattagcttgcctcctatttttaatggctgcacagtatcgcttacaggggcaaagctgtaagtttcttttaagtattggtctgaccattcaccttttcacatctgttgtgacaaaggaaaccctctttttgagatgtcatctcgcttgtggcccctttaagacctgatttctaatttgggatcaccacctgtctcccttccagagccctgccgttccccctaagtgtgttcctctcactggcctctctttatggcatttgcatcattaggagttgcaaagtgaatttccatggtttgaaacgccaatggactgtaagatctatagcaaaagggcaccattagtttatagaacaaaaccaaacttgataatatcatttattctaaaagcatttgttcaagtattaggcgacttgaagaaagtacggaaagggcagaccctttcaaacaatatcaagggtgcaaaataatgcattatgaaatgcagcacagagcagcacagtcatcatggtggactgggaattgattcgaagtctttcaagaacatgaatgttttcagtagggtcttgaagggcacagtaataataataacaactaacagttgcatacttattatatatgaggcatgacactgaggactttacatctattatataatttagtttaaatctcacaataacttgacagtataggttttatgatctccattttacagacaataactctgaggtctagggagattaagcaactttcttaagatcacacagctaatgcttgaggaagctaggggggggttctgacgcctatggtataccaggttcacattcattcatttatttaacaagcatttgttcatgttaggcactgtgtataaacagaatggctcctggctttcagggaggtcagagtctggaggtgaagtcacataaataaaaaaaatttccatacagtgggatgaggggtgagagctggggttgtgatgagaagaactcagttgggcacctaacccaggcttcctggaggagctgaaatgagagtgagttccaaaacacctgtacaggttttccagggagatgtggagagactgctggtccagggggatgcaggtgtatccatgcctggtatgtgtgtgccatcccggagtttttagagctgagtaaattccaaaaaccacagaccactcactattagggctgaagcccaggacatggcgaagggtcatactgaggagttttaaacagtggaatttgtgattagattatataaagatccctggatgtgtccttaagaatgcattcccaagatgtggacacaaaatggagccatgtggagcaaaagtggaagtgagaacacaatcttggagattgtcgtagtggtccaggtgagagatgggtagtagcgatggaaatggtgaacagggggcaagtgaatgcattagggaagtattgaagaggttcaactgaggaaaatgtacatgattggacgggttgtggcaggcgtggtgagggagaggaaaacgttaaagaggcccccatttttggcttgtgaagctaatggtactgatggcatagggtagatggtgatgctgttccttgcaacagggcttgactttgtgcacttctaattaagggtgcattggtatcctatgtaattttatgtgaagacttgtacagtagtggcgcattgatgaatagtcatattgaagatggactgggatggccgagagcacactgctgaagcagaggagtgtgtcaaagagaaggataagggttcatctctccaaaggtagtatttttttttttacaattaaaaaaattagactttagagtcagacaaatctggatctgaatccagactctgaatatgggtctttgggtaagttaataaagctttctgagtctcagtatcctcatttacaaaatgtgaatacttataatgcctaatttattggattattatgggaattaaatgagctcaagtgtataaaacatacagtacaatgtctgatagtacgcacaagatgctctgttcatggccaaggttggtcccatcgctaccactatcatcattatcctggtaaagttaccatagcccagagacttgctgccagccctttgggctcagaaacttgatacagcagcacacacagacccttcctttgggaacaaccttcgagtaaggaaactcaaatgctaaacctgtctacttcaatgagtcttattgctggcatgaggaccagcattctcaaatccaccagactaggtcattctctccctgtagtcagaactatgtggggagccaaattatcatcaggcagttgtgagcaaagagttggagcaaattcattgagcaaacatctaatgattgcctgccctaggttaggctgtatgctcaatgtggagttttccatcatgaataagacaggccagcctggggtaaggtttaatggtaatcaggcaaaggcaaagtgatgcattgattttcacaatagagatgacttggtggtggttctgtgctaccccaactgtgctgttcctgaccccttccactcagaatggacccttggtgagtactgctcaagtctgtctgagcaacccttcttccatgactccatgactgactaatatagcctttagatgtgtgttttatacctttagtggagtcacagccaactcttgctggcttagaagcatttttgtccctttgcggtgatttctcattcctctgccctaatccaataggtgctggtttcacagttaaacttctaaaagacattgttttccctttctttccgagttcttggcaaggttctttctgacagtcacatcgctggccctaagtcagatgtggaaaagaatgtttaatgcataaacacatttttaagctctttaagtgtagatttgttggaacaaactcagaaactttttcaggtattaacagtctggccaagcaaccagatgttatttgaagaaaatatggatgagttgtctcttcatatttatgagtaagttgagaagtaagttttagaattggatcaacttcttaagattttcattttgcatccagatagttatggaaaatcccattgatagttactgtggaatgactaggattttccaggctctgttttccctgagatgatggaaaagattaaacaactttacaagcttcagataagacaagcctgagcagcaaatgggaaatattagtaattgataccattttattttctaattccaactgtcttttctgactccttgattaaattcacaagtatttatttgaaagactgaaggaaatcaagaagatgattttcatatttcaggcagcatgttgaactttataggggaagcagcgttgatacacaatgaaccctctcaggccaccagtaactataggctcccccttacaaaatggtggcttgggtgttggaatcaatgaagctcttaatgcagagtgagcagagaggcagtaaaacaatatgcacagtctggtatcttggaatattatttcatcaccagtcgtacatgttctattaaggatttgtatttgtaaaacatgaaaaatatgtcacaaatggggcagcaggtggattcttattcaaattctgattaattcatgtctgcttctcttgattctcccagagcatattatttcttggagaagagaatagcattaacctcttttttaaacagagaatcagcctcctgtagtggagagagcaggggcattcatgttagaccatgatggagtgacaaccatggcttctaatcctgccttcaccccaataaggtcctcaacattgcagaacctctgtgtttttcatcttttaatttaatttgaatgatgcctacaatgttgatactaaatcacttttaggctttcatttgttaaatgctaggtacagatagtattaaatgatatcctgaaggcaccaattgtacttttattatatcaggctgattcactgtttctaatgcaatgaacttgacacagattttaaattttttctcaatctgtcccattgtgtagacaaattaattcaaagttctttttcttccttctctttttcatctaagcctgtgcttatgagtagaaaaagagaagaggctaccttgaaatgcctcgggcccaaactcagaaggctctgcactcaactgagcctcccttcctactaagaatggaatagtgttgcttataggggtgttggtccaagtatcagctgtggatgattaattcccagggctgctatcacctaaggtaacttcagtaatcttatgtgtttggaaaggaggatgaggattatttttcaaatacataattttgttttattttgaaacaatctcacacctacagaaaagttgcaattataatacaaagagcttccccctcgcctgaactgtttgatagtaagttgccaaactgatatacccacgatccccaaatgcttcagtgtatttcctcccagcaaggacattctcctgcataaccacaatacaaccataaaagtcaggagattaacaccagttcattttgaccatctgaaattcaggtgtcattcatgttttgccagttgttctttgtatgttcttcatagcaaaaaaaaaaaaaaaaaaaagatttaaatgcaagcattacacttaagtgtggtgtctctgtggtctctttctgtctggaatagttcctaagtcttccttgcactttagtgcttttaaagattgcaggccagttattttgtagaatgttccttgatttgggtttgtctgatgtttcctcataattagattcaagttacttacctttggcaggaatatcagggataatactctgttccaattgcatcctgatgttcactttgatcacctgattgactgttgtctgccagccttcttcactgtgaaatgatacattttttctttttaattagtaagatttggtagggaaatattttaaaaccatgtacatatcccattcttcattaatcttctgaattatactttatttgtatcagtgtggactcaagccttctaattttgttctatttgctctcgttgtttactttgctgttcataatgtcctagatttggccagtggaagcctcttcaaattggtttctatgttcttttgatgtgtttgggcacttccttgctttccggcacagcaagatatttcaagatcatctatacttttcctgccccagtcctaggataaaccatttttcaagaagccctggttacttttcctggagaataatatgtggaagttagaacctgtgctctggtcatgctcagtgctatcaggtggcactgctaccaggtcctctcaatggacaaagcaaggggtgttaagtttgaatacacacatccctccccacacacactcatacatatatacacatttacatctatatttatttctgaacctccagttctaatccatacaggtgtttaaactgatgccttcattctaatccaacactacatggttcattctagttttttttttcctttcatttttgctactcccttctcagccagtgagaaaactggcttactattcaattgcagtaggtaaccagtcatgtatcattacgctgtctccttcacacatgggctctgcgctccaggccagcccatgtagaagcctatcttccttggtcctacctagtggctttagtctaaattgttcaagagaaaggagtagatgaaattatgttcttaacatatgtttgtattgcttttggattctcagtatgtcatcattacaaatcctcagagggtgtttctgtgtgactgggggaggcagactaatataaagtgctcaataaatctatttgatcatgaatcttgtcttgcatggattggattttcattttaagaaatcacgactttgtgaatattaagagcatgacttctcctttgacctttactccatcattttggtctcagatggctggagatagcatattcttttgtgagctgaggaagtcttgactgcttgtggcctcctgatcctcaaagaataaaccatactgatttgcaatacttgagtttcgcaatatttgagtttttcttcaagaaacagattttcttggaagcacacaaagtttgatttaagggacttaattcagtgtgtctatagaccctggatttcagacaattaatgctgagatggggagggagaagcaggcactggggaaaaaagatccaaagaagataagcccaggagagtaaggaggctgatggaatgtaagacaaatttacgaatggaagccagaggtggtcactatactgctttgaaaacatctttactttctccaataaccttgagctgtttcttcctgattctgaccttgaggatggtggtcaggggcaaagtgcccaaagatctgaaaatattccaccaattagtggtttgtttttcctggaataaatatgatagtcttagatttcaccaattccagtaaaaaatttctattttcccccttaacattttcttttattttacccatctttaaataaaaaaaaaaaacttctcttgatcttaccagctgaaatctcattctcctcttctatttaaagcaaatctcatgctaactacaatttttgtactcccatgctctcttgaacaccctccaatcacttttgtcaccattctattgaaaatactctggtcaaaagcaagaagctctacattactaatcaaccaatctttgatcagtcctcatcttattgtagattaattccccaatcttgatgcactgtcttcacttggctttcaacatgctagtcttctggttttccttctcccaccttatttcctctcctcaagcctttttgctctttctgctcttctctggactgctaatagtggactctcccagggctcaggctctcatctctttatgttcctacctataccctaattttgatatatactgaatctgaccatacctctactgttattctggcccaaacttttattatgtctcggctggatgtttatgatagcctcctaacagttgtccccacttcggaccttgctccctttagtctgttctccacatagaaaccccaggggttctcttgaaaatacgtcatgccacttcttggctcaggatctgctccccagccttttccctaccttatctctgtcaccagctcactcattgtggacctggcctcagcacgctgaccccattggcacttgaatctgtcattccctctgcctagaaagactttttcctaagaagctgcatgacttactcccaaattgaactgtttctctgctcaacattctcagtgccccctcactgctttatattaatatatccaaggcacttatgactatctggcagagtgtttaacgttaaagtttgttccttcatctcccccaccttccctcatgcacaataaggctccgtaaggccaggggttttgtatggttgttgctgtgtctctaactcctcagaacactttacattcttttcaacatactatgtgggacctaaacgaatacttgtcccatatgaaaagagctgtgttctgatgtcggagaaggcgattcccaagctccattttctaactgctaagagcagggcctgactaatttttatttttttttgaatcagtgaatgagggaaatgaataactgataatatacattcattgtagaaggatacctaaataatagatatgtattttctttccttttttccttataattaaatttcttagacaataaaatgatagatttatgtaatggtttcatggtttttcatttatatgttacgttatacctcttttctgttaagaatgatttttgacatcgaattacactgcagtgttttgaaaagttttccagtagggttgaagtggagggcacaccaccacctccagagagtggatgccccaaactcctttcgcccatgagccactcccccactgccctctcatcaaacactgtcttcagtgtctctcttgtgcctcaatttcaattttggggaatttcacccaatgtgggcatttgagatttatttctaaagcacccacagtttctcagaagcagtgcctttttgagtcgggaggccatctgaagaggaatcagatccttagcagggtgcctaagttaccctcagtccccccaaagaaaggagaaactcttgggatgatggctcccctaaagaaggcaacttctcctggaggaaaaggatatacatgccttggatgactcctgcccgctcacagaaggctgcttttgttgtggcttaaagttagatcttctggtagagttctagaatgtgggccctgccgatgagtgacagccaaaagctcaccttggaagaggcaccagagtcacagccccagctctctcagggaagacgctgctccagagcatctcagaagccaccagggaagacagtggcagatgggaagccggtggtgcagggccaagggcacagctctgcctgacgcagcattgtcagcaataggtaacatataacttatgaggagtatctgagtaccagcaggcactcttgggagtgaaggatgggggaagagaatctgccccagacttcatatccattggaaatgccacatcaggtgctgtatcttggcatggattgtgtttcctgtaggtgtgggagttcttcttctcacagtcaagccctccacctgtcccttgtcacacaccctgtccttttgaatagaaattctcatcctagcccagcttcaggcacggcctggcttacccttggaccccagagatctcacccttctgaggtctcaactctccttaaggagttaggaaatgaagcttgggaatccacttctcggacatcagaacacagttccttttgcacaggacaagtatttatttaggttccacttagtatattgaaaagaatttgaagtgttttggtggtttgtagtcctctttcatcatgctgaatcaagcctcaaaaaggtcaatttctgcagttgttaaaacacagaggaatttttatagtgtgtgtgtttgcataagtttataaggagctttgtcacaaggtcttctgttttagagaaacaagccattttactcctttcatagttcactgcaatttattttatactaattttcgtatttacctttatttcaattcatgttttagtcagctagagaaattattcaattttttttttcagagaagacactaaggttgcatactttcagagattttcaatgtctaagcacatctacttattgccatttaaataatgattttttttggtgtatacaatttgggtaaaaatagtctttttgcttaaatatgtttatggcatttacagctctcaaagagaagtctgaggccaggtgcggtggctcacgcttgtaatcccagcactttgggaggccgaggcgggtggatcacctgaggtcaggagtttgagaccagcctggccaccatggtgaaaccccatctctactaaaaatacaaaaattagccaggcatggtggcatgcgcctgtaatcccagctacccaggaggctgaggcaggagaattgctggaacctgggaggcagaggctgcagtgacctgagattgcgccactgcacttcagcctgggtgatagagcaagactccataaaaaaataaataaataaaaaaaataaaaaaaagagaagtctgacaccaaactaaatttggtttcgtttcaataattttttttctgcccatgtttttgtaggttgtttctattatccttgaattttattaacatctccaggtaaggtgtagttttaggggaactttgtttttgtttcactttgttttgtttttgtttttgttttttgagacagagtctcacattgtcacccaggctggagtgaagtggcacaatctcggctcactgcaacctccacctcctgggttcaagtgattctcctgccttagcctcccgagtagctgggactacaggtgcacaccactgcacccgcctaatttatttatttatttattttttgtagtagagaaagggtttcactgtgttagccaggatggtctcgatctcctgacctcgtgatctgcccaccttggcctcccaaagtgctgggattacacgcgtgagccaccgcgcccggtcgggaactttcctctagtatttctggaggtttgatactctgcttttttgttggttccttacagaatctctttctgcttatctgttctggttctcttacattacatctgtcttccaaatgtcttctttgctttagccttttcatcacttaatatgtttttttcccctctgaattctacaataataccctctaagtcactgcctgtgaggtggtttttgttgttgttgttgtttttgccatagtcaatctgctttacaaagccatgactgcatttttaatttctaaatttttaaaatttatttactcatttatttagagatgacatctcactatgttgcccaagctggcctcaaactcctgggctcaagtggcctgcttacctcggcctcccaagtatctgggaccacaggcccttgctactattttttattttgataatgatatttttcatcagaaagctatccttgtggtcacacattattccttttcaattgtaaacacagtctatcccaaatcccagtgaaaataaaaaataagatttatatttcagagtttcattaaatgttagctggaagggtttgcgtgagtttatatttcaacatggtgggaattgatctatttctgctaaatggcatcatgctgaccctgcactgtccttcccatccttcttagaggacatcccctgctatgtcgttttagaagccactgagcaccatggcaacctggatatctcagtactaatgatgctatttctttttgtggtggtgaaacaaaactcagcctgcactactgtctcatgagaaattttttattatctttcatcagatgaaagagtatttgcctacacattgccaatattcatccagatatattttgggaaaaaaagctcttcaatttctcaagcacttttttcatcttttgaactggaatccaagtcatggaggcccatcaccttacagcttcttaaatggcaaacataattattctttgattttgcttttcctcaggctgcattcttaagtaatttaattttccttttgttatatgtgattggcaacaatgcgcacaatgagtttgtatctaacacaattttgaaatagtgttttttcttttttatgtctcataatcattgcagggtgtaactcaaacttagtatacgccagcatggcaagtggccgcggctcaattcttcctcttgagagtcagatggccggcatgcattactaatctattatagtgcgtattaaacaaatccaaagtttgttcaattttttccataaaagccaaagtccttttgtaatcacaatataatatttgtctactcccttttctgtaatttaatatatcttggatggctgagcagttctacatggatgggaagaatcactccttccccctgttgagagcgagaaggcacatggtgtttaagagttagaatgagtctggttgatcccgtacttaactacgaagttatgctgtgagcctcatattttctcatctgttaaaaaaataaaaatgctaataacatgttcaaccagctgaatttgccagtctgtaacctctgctttggatgtgttctttttttcctgactactccaaattgtgacagaaaaacacttgtctcttgactgttaaggcagtagctgctcaggttcacctatacccaggccaagctccggtatttggggttctaggattagtcaaatatttgggccctgctcattctgagagggaaggctctcatagagattttgtaatgaattgagtagatgttatccataaaggagtggtttttattcatttcattaaggatatttacagctataagtgtcagaaaatctgactagcaaatgctaaaatataagaatattcgttgtttactccagaattcttgggatacatgttcctaggtctgattcaacagtttcatcaagaccccaggcttatctgcatccacttattctgccattcttttttttttttttttttgagacggagtctcgctctgtcacctaggctggagtgcagtggcgtgatctcagctcactacaagctccacttcccgggttcacgccattctcctgcctcagcctccccagcagctgggactataggtgcccaccaccacgcctggctaattttttgtatttttagtagagacggagtttcactgtgttagccaggatggtctcgatctcctgacctcctgatccacctgccttggcctcccaaagtgctgggattacaggcgtgagccaccacgcccgacctactctgccattcttagcatgatggctcgtagttccaagattgcatgttgacttgttgcctcatggcttcaagatggctgcctctgctcctagcattatatcctctcccaactacagtcaaagacagaaagtgaagggagtagcttccctagaacaaggactctcctctttttttttttctttttcctttgagaaaaaggaggaatctccagaggattatctctcattacaaactttcctttagatcttcaaagccagaaccagatacctttagctctaagggagactaagaatatgagtacagtcagccctctgcatccatggattccatatccatggattccaccaactacagatggaaaatattcttttaaaaaattaaaaatggccaggtatggtggttcatgcctgtaataccagcattctgaggggctgatgtgagaggatcacttgaggccaggagtttgagaccaccctgggtaatatgacaaaaccccatctctacaaaaaaatacataaaatgtccaggtatggtggcatgtgcctgtggtcccagctgcttgggaggctggggcaggaagattgcttgagcctgagaggcaatggttgcagtaagcaaaaataatgccattgcactccagcctgggtgacagagtgacactttgtctttaaaaaaaaagttaactatgacaataaaaataatacaaatcaaaaatatagagtgtaaccactatttatatagcatttacattgtataaagattataaataatctagaaataatttatagtatacaggagaatatgcataggttatatgcaaatactaaaccattttatctaagggacttgagcatctgtgaattttggtatctacagggctccaatcttccatggaggtagagggactaatcagtgtgattttctcaacctctatattgagagacagacaagggagaaggggtacaaatgcctgctgggtcttttagtaagggatccaccatagcactcagatgttctgtccttcatctctctatcccacctggatgaattagcccttctttgttacgtagtagagcaattcatatgtgtacatgtaaaatgatttgtttccctgttaaacgttaactgatgatgataaacacaaatatgagattttcctgccatggttatgataccttacatttatataacaattttatatctattatctcaaattctgttcataagaatgtcataagtttcaaatttttggtctctccatatgagaagtagagagatgacatttattatcatacagctcatcaatagcaaatgaggaagcttgattctttgacctaagctttttaaccttttacgttgtctgtaaaccttatgccaaattaagaaaactagaaagttttttttccctgcttctagtagggtaaacttttagtatcttttctaatgcagagaaattaatgaagctctacatctagttcaaaattccagtgtttttgttgggtaggggtggggaggtgggacagttagtagtatctcataaaatatgagatgggaatttcatttgatccaatgatcccattctataaatttttttgctgggatataaacacagaaaggtaaaaggttttatctccaattcatattcagcatcattaatattaacaaaactgtagaaataatctaaacggacatgatttgggaactagcaaatcatggcatatatatatatatatatatatatatatatatatatatatatatatacacaagggaaatgtgaatctgttaaaattattgtaattcattctcacttatgaatattgatataataagtgattaaaagttccttaatagcagactaagtccaacagcacattaaaaaaatacattgtaatcaagtgagatttattccaggaatgcaaagatggttcaattttagaaaatccataaatatctataaaataatcatgtgattatagccttagtctggcagaaaggcagttgataacattcaacaaacattcataatacaatggattcagtaggaactgatggatgcttctttaacatagcacaacctgtgtagttcttaatttacttgaaaccacagccctttttctgctaaactcaggaagaaggcaaggatgcccattacctacattctatttaatattgtgctgaatttactgaccagtatagacagagaagacaaagtaattagtggtaagggattagaaaagaagaaattgaaaaccatctctatcaatgatatggatatagtattcctggaagacacaaaagacctgaacataaaactaattcagacaataaaagtaaggtggctatatgtaaaattaacatgaaaaatcaatagtcttcatatatacaaacaataaccttgctagaatgatagtgtaagagaaagtgtcatttaaaacagcaacagtgacaacaaaagatcaactacttagaaacaaatttaaaggaaatgtgcaaaccttgtataggaaaaaatttaaacaccccttttttggagtgataggatgattcaacatcataaagatatcagttctcctagatttaactgaattccaataaatgcaaaaaagcaggatttattttagctaagttgatgctaaatttcatatggaaaaattaaaaagcccaaacataggaaaacgttggaaaagaaggacacaagaggaggactagtaaatttgaccaaatgttgaaacacactagtaagtctctgtaattaaaaagtgtgacattgatgtgtaaataggcaattcagtggaataaaatagagtcttgaaatagatccacatacatctggaaattaggtatgtgataagggtggcatctcaaatcactggggaaaagatggacttattaatcagtgttgttggaacaactgagaaaagatgaaactgaatccacatctcacaccgtacataaaaataaactgcaaaccaaactaaagatctaacaaacaaaataaaaccacacagttatgatagaaaacatgatgcattcctttataatctgagagtaggaagctttttttaaatatgacaaaacccagaaacaataaaaggaatttgcttttaaaaatgaaaaagcctttgcattgtagaaaacatttaaataaaaccaacaaatggcaggggaaatttatatcaagtacaaaacgctaattaattaatgatctatagaaaatagagaagagaaaaaaattctgatgtgcagagaaatgaacagtcagttcatggaaaaataaaatcagatgatgcttaatatatgaacactccaccaactattatgaaaggaggtgaattaaaattacactgctctttgaaaggttagtgactgagggggcacaatggaggcttctgaggtgccttatctttgatctgtgctggagatactcagattgttcacctaaaaagtttctcaagttccacaccttaaatctatgcaatctattgtacaaggggacttttgcaagttcataggaaaatagaattaaaagatatgaataaaaaatataaacatttcttgacagaagccccatcaacttcaatacagctttgtaaatgataataacagtcatttagtccatccttaacaaagtgaggtcctgggaatttaaccatgtcaatgcagtcttttttacatattaactgaagaaaaatgggtgccctttaaatttttttttttttttttttttttgagatggagcctttctctgccgcccaggctagaatgcagtggtgcagtctcagctcactgcaaactctgcttcccgggttcatgccattctcttgcctcagcctcccaagtagctgggactacaggtgtcagccaccatgcctggctaattttttgtatttttagtggagatggggtttcaccatgttagccaggatggtctccatctccttaccttgtgatccgcctgccatgacctcccaaagtgctgggattacaggcttgagccaccacacccagtgcctttaaatatttttaaagattaggaaacaaaaagaagtcagagggagccaaatcaggactgtcaagtggatgattaatgatttcccatcaaaaatctcatggaattgtccttgtttgatgagaggaatgagcagaaacattgatatggtggagaagctctggtgaagcttctgtggacatttttctgctaaagctttggctaactttctcaaacactctcataataagaagatgttatcattctttggcttttcagaaggcgaacatgcaaaatgccttgagcatccagagaaacttaccatgacttctgttcttatccagcctgcttttgctttaactggaccacttctaccacttggtagccattgctttgattgtgctttgtcttcaggattgtagcggtaaagccatgtttcagctcatgttacaattcgtaaaagaaatgcttcaggatcttgaccacttgtgtaaaatttccattgaagggtctgctcttctctgcagctgattgggccgccacaattgtttcagtacccttgggagtgaaaagtctgctcaactgaaatttttcattcagaattgtataagctgaactaattgagctatctgtggtgctggctattgtttctcctgttaattgtctgtacaattgtcctatacaattgtctcctgtacaattagggcatgaccaattttttttttttttgagatggagtctcactctgttgcccaggctggagtgcagtgacgggatcttagctcactgcaagctctgcctcctgagttcacaccattctcctgcctcagactcaagagtagctggaaatacaggcgcccaccaccacacccggctaatttttttgtatttttagtagagacggggtttcaccatgttagccaggatggtctcgatctcctgacctcatgatctgcctgcctcggcctcccaaagtgctggtattacagacatgagccaccatgcctggcccaagatttttttttctcacaaattgatgtggatgaactgccactgtgggcttaaatcttaaatcttaatcttaatattgactcctacctttttaaaatgagttatttatttgtaactgctgacttctttcaagcaatgtcacatagactttttgtaaaacatcagtgatttcaccattctgccacttgagccttataataaatttaatatttgttcttgctttaattttagcagaatgcatgttgctctgataggagctctacccaaactgatgtcttattcttcttggtgcctcaaactagatcctgtttaggcatgttataacaagttttgtgagtttgttttggtgaaaaaagttggaatccatgcatagttttttcataatacacattttccgtgaactttttaaagacccctcttatggatgttatacttactaaaaatattcttaacaaaaacctagtagtcagataccatttcttattcctcagattagcacaaatttaagtttgacaacatgctctgttggcaggactataaagaaaaaaggcactataatatattgctgataggcatgcaaaatagtacaaccctgtggagagaaatctggtaatatttaacaaaaccacaaatgcttttaccttttgacctggtaattccacatctaataatttaccctaaacatacaactccaaaacagcacaacacaaggtcattatttttgttaatatcaaaggaatagaaacaactcaatgtttattggtagaagactggctaaagaaataatgatatttgcacacagtaaatttacatggccatgaaaaaatagggatagtctgtaggcattagtggagaatggagaaagcaagatgcagaaaggtctatatggcatgctactctttctgtaaagaagaagagaaaataataattcacatatgtagttgcttattttttgacaggcatgcaggaaaaataaaatggaagcagttgaaaagtgttatctataaggagcatgaggaatagggaagaggagatagggatggaaggggaacttgcctcaacgtaccattttctgtcattttgagttttgaaatatgaaaatttttacatatttaaataataaaatcagagaggaaaagtgtaaagtccctgaattgggaacaaactaaaacaaaggaacctaatgatctatcaatctggaaacataaccacacagagaataggcttattctaagtaaatttttgacacaatactgactctcgatactagggaattatattctaaggataagaggaactacaatgaaatcttaaacttcacttggcaattttgttatttataatagttttgaagttattatttcaaaatcatagaataaagcaaataaatgtttttgttaatgtttttaggaagcatgatttttattttaagaggaaagatatataaaagatatacaaaaaataggggggaaaacctgtaatgttaatttaaatggaaaatatctatatgaattcgagttttttttttctaattggaagctctgaccacttgaaaagcattcaaagcaatgtcatctcaatggcaatgagcccatctagtgccctgatgtcagtttctaagttgtttccccactaagggtaactagagttttttagagaaatgcctgatttcagatctgggacagggaaagtccaaggttagcctgtgccaccttgtgtcgtagaacatcgggaagcactcagagactaataggattatgtcagaagatacatgtaccaacttgaaggagctccctctggccaaacttgggtaaattttagcatcaaaaggaataatgactttaattgtttgtcatacattgaataaataataaatccatgagtccagagtggtactcaatagactaagatagatggatgtcatttactataccattggtactatgatcctaactcccagtgaaataattgattcaggaaacggatttgcctaaaaccattaggtgacagttattgggtaacaggacatttccaacatcacaaagtatcactcatcaattacttgccaattgcaaaaggaaacacttttataacagatatctggagtcaccatataacttggtgatcaaagttagcagcattaatagtgggaaggtacatcacctgtcttcagatatgataaagtccaaagtatacaacctcaccaatgacatgttatttacaaacatcttggaactcaaatcgaaaagagcctttagacttcatatccatttcataagaatgacaaacgctcaaatagcaatttaaatgccaccatgaggaaactgccaaagaaatccacattgtggaatatctgcaaacctgaactcttcaaagagtcaatgtcatgttggaaaataaaaaggtaggagtactgctccagatttttgatagagacataaccaaatataatgcttgaactttaattgaactctgatttgaaaaaccagctttaagatgtatttggggggccacttgaatatggagcagatatcagggaatgaatttttatttctaagatacagtcctattgtgaccatgtggcagaagctcttgttttaaggaagtatttagaaaactagaaaaaatacagtaaaatgtagagaattgttgagcctaggaggcagacataaaagtggtcattatactagttctccaactgttctgcatatttaaaatattttataataaaaattagaaaaattagatttatctttttacttaaaagattatcaagggcaaattgttgaatttaaaatgcatagttagaaaacaaataaatgataggcactcatttgcgtaaaatgagtatagtacatattgaaaaatcaatccaatgtttgtacacctatgtttatagcagcatttttcacaatagccaaaagttaggaaacacctaggaatccatcagtggatgaatggataaataaaatatggtgtatacatacagtgggatgttattcagccttaaaaaggaaggaaatgccaacacatgctacagcgcagataaactttgaagatattatattgactgaaaagaataaatattgtgtgattccacttacatgagctatgtagagtagccaaactcatagaatggtggttgccaggagttggggagagggaggaatgggttattattgtttaatggatatagagtttcaattttgcaagagttctggagactgatgtaccacaatgtgaatatatttaacattactgaactgtacacttaaaaatggctaagatggtacatttttgtcacatgtatcttgccacaattaaaacataaaaatttagatataaaaattaatacgtacataaagacatatttagaagaatatatgtccagacacatgtacagagttgttatttctgtaaattagagtttcttggcaatttttgcttccctttccatccctagattgcttaatttttttatattgatcatgaatctgttttactaaaaaaaaactattttcaaaagcaagaaaacttccccagattttcggtgtttcagaaaacatggtgattcgagagcctactttttagggaaatggatttgcaggaaacaatggaaattgtcaatgtaacctgagaattttagtaaaagcaacaaaaatcctttgtcccatatggtgagaagcaaaacaggccgctggcccgtcctgtgtgttgtggttgccgtggagagcttggccttctgagcctttggcagggcctagccaacctgaccttgctcacagctgaggctcagcagcagcagggcctttgtgggaactcgcctgcccctcccagtgaactatgctttgcttggtgcctggccagcaaggaggcgaagtttgtctgctgttgttgacctgggctggtctgcctccctgtcctgaacaccaattccagcatctcaccttgcttgactgtgccccagcgggggcgttggtgcctctcatctcacaattgcctctgtgacagagccagtctttgatctcgcctccaggaatccaattcctctcaaagtctgttaatcccttgggtccacgggttattcccgtacagcatccccactctgattactcatctcaaccgtggctgatctttgcattttgacctttggtccctgtcaggccacaggccctgtattctatttgtgatgcagagacttatgtcctaactgttaatatgttcacataaacacacacgccactacagtatcattaaaatgttttctaaaatttgtcatagagcagtactagcatttatatccacatgggattttgaaaacaaattatatagttctattttgttttccattaatttattattttcagtttaacttgaggtacagtcaacataacctcaatatcagatgatgtctacttttaaaaaagcaaatattttgaaaacatagaaaagtacagagaacaccaaaacgaacacttgtgttcagaccacccagatttagcaaatgttaacatttcatagtgattgttccgggtctaaaattctcattttaaaattaaattttacttctgtatgtgggcagagcgggcctcagggaaacagtgaagctgtgagtgttccctccctgctgtcccctgcccttctgttgcaggtgactgaccaggcatctgtggcccttgatgccacacagggccatgctgggcctttcccagcacagctgtgctggcagctgctccccgggtctctccatggagcactggagtcctcaattctaacagaaatgatagaactgagtagcataaaaagctgcaagccaaaaatgaaggaaagtttattagaacaaaggaagcttattgtaactctgtaagcgggggtgctccaagcatctcagaaaaaaagagcccaggaaatgaacagctgttggaatcccagtttgctagtgcttctctctgcttcattctttaatcctattccatttgcgttttggaaaatagcctccctcagcttcgaaatttacatgtggtatgtccagccacataagaggctgactattagacctcggttgccatgacacaggtcgagatgaaagaatctcattgtctcctctctggtctagtaaactctggtgaggaaggtaaatatgaggctagaatgacatgtatgacaaatatgaggctaggaggactgtattagtctgttctcatgctgctaataaagacatacctgagactgggtaatttataaaggaaagaggcttaatggactcacagtggcagaagaaggaagagcaaagggacttcttacgtggtggcaggcaagagagagcttatgcaggggaattcccatttataaaaccatcagaccttgtgagacttattcactaccagaagaaaagcatgggaaagaaccgtgcccattattcaattacctccccccaggtccctcccatgacacatgagaattatgggagctacaattcaagatgagatttaggtggggacacagccaaaccatattaatgacacttctgtgatcctgtggatttggggagtgatggcgatgatttcaagaaggaaaccccctctcctgcacatggctacatattctccagggaacaactattgcagtctgagaagcacacaacagggatatcagcaaaagctaggaatgcctttctagcccagatatctagcactggggaaagcacaagatattgctggtggtgaggagaacaatgaagacaacttgttttttgggtggcccacgggtcattaaaagtatcacaggacaggatttgtgtatggacaacaattcccatatttacaaatgaacaatgctctaagagttgggttaatgttgctgtgtttcttcaatcagtgcttaggctctattgtgtcagagatttagctggttatgagaaaacagtgacaatccaaacccaaactttttcaaagggctaacagttttacgttgaccctgcatgcatattataaaaaattagctccatttttgagcaatatctcataaaatgcacacttatatttctttctatattcattctcatttctaaaggtatgtgtctgggttatttttacccttgtaagccgtttcaaatcttttctgaaataaacaagatacacataaaggtgtaaaatgatgtcatgtttatatttccatactacctcatagaaacctgaagcatacggctactaataatacaatgatgtgcttcataatgacgtttcagtcaatgaagtggtggtcccatgagattacaatggagctgaaaaacttccattgcctagtgacctcatagccatagtatgtggtagcgcagtgcattactcacatgtctggggtggtggtggtgtaaacaaacttactgtgctgtcagttgtacacaattctagcatataagtaattactgtattatacttttttttcttcaacttttattctaagtcaggggtacatgtgcaggatgtgcagatttgttacacaagtgaacgtgtgccatggtatcttgctgcacggatcatcccatcacctaggtattaagcccagcatccattagctattcttactgatgctccccctcccccaagctccaccaacaggccccagtgtgtgttgcttccccgacgcgtccatttgttctcatcattcagctcccgcttataagtgagaacatgcagtatttgcttttccgtttctgtgttaatttgctgaggataatggcttccaactccatccatgtccctgcaaaggacatgatcttgttcctttttatggctgcatagtattccattgtgtatatgtaccccattttctttatccacattttcagtctatcattgatggcatttaggttgattccacgtctttgctattgtgaatagtgctgcaatgaacacaggtatgcatgtatctttagaatagaatgatttatattccttggggtatatacacagtaatgggattggtgggttgatggtatttctggttctaggtctttgaggaattgccacgctgtcttccacaatggttgaactaatttatactcccatcaacagtgtaaaagtgttcctttttctccacaacctcgccagcatctgttgttttctgactttttattaatagccattctgactggcatgagatggtgtctttttgtgtttttgatgtgcatttttctaatgatcagtgatgttgggctttttttcctatgtttgttggccacatgtatgtaattactatattatacttttatcgttattttagagtgtgctcccacttacataaaaggtaactgtgaaactgcctcaggcaggtccttcaggaggtatccagaagaaaacattgttattataggaggtgacagctccatgcatgttactggccctgacagccttccagtgggacaagatgtgggagtgaaagagggtgatacttatgatcctaaccttgtgtaggcctggctaatatctgtgtttgtgttgtaatttttaacacaaagttttttttttaataaaataaattttaaaatagaaaaaagcatatcaaataaggacataaagaaaatatttttgtatagctgtgcaatttgtgttttaagctgtcttactacaaaagagtcaaaaagtttaaaaaatcaaaatgtatataaagttaaaaagttacaggaagctaaaattaatgtattattgaagaaaggaacatagtttttataaatttagtgtagcctaagtgtacaatgtttataaagcctacagaagtgtatagaaatgtcctaggccttcacattctgtcaccactcactcactcactcacctacccagagcaacttcgagtcctgcaggctccattcatggcaagtaccctatacatgcgtaccattttttatattttatcccatatttttactgcaccttttctatgtttagatacataaatgcttaccattgtgttacagttgcctccagtatttagtgcagtcacatgcagtacaggtttgtaccctgggagcagtaggccatactgtgtagccctgttgtgtagtaggctgtaccatccagatttgtgtaactgcactctatgatgttcgtgcagtgatgaaatagcctaatgacacatttctcagaacataagcctatcatgaagtgacgcacgactgtgttttgactataaagacagtaaccatttctaacatttttttccgaagaaaatagtttttaagctcgggcttgggctggagagcaaatgtcttccctgaagtctcctctagtgcattgggtctcataagccacagataatttgttggctatttttatttgctgatgacaagtcacttctctaggctcttcagccctcaagtgttgcagatttcactttctgaggtcatggctgcaagacacattttcttgaccagcagctgtggcctgagttttagattgacagtgaaatgcatagaaacacagcaggcttcccccaacaccaagatgtctcagctttaaggaagatacaggactgatgccaatactgcatggctggtgactcctgggctcagcctctgaatatctccctgtcactccccaggaagggtgagcaggtggtcacgggaggaggctgagagcatggagagaaactcagctaagggagtcatttgctctggggtcgcctcagcttttgtctttgctctcatctcagccactgcagggtatgtgggctgcgcccgtgccggatcagctatgcgcatcaaagccccttactcatgactgctcggcagtggaggcagtgaagcacaggcactcggtccatccagtcctcagtgtgttcttgtcctatgttcagtatacccccataattccttgactgagtgctgtgagagaaaatgcaccacacaagagtcaagtcctcctgtgtctctgtgggtaaacaaaagttcacaaaccagctcttcagccggagccatatcttccccatgtttgtatgctaagcacagggtctggcatatactaggtccttggtcaaaatttgcccagtgaatatacacttttgacctcaattttttttttttttttttgatggtggacgggatctcacccaggctgtatgtagtgcggtggcatgatcatggctcactgaagctttgaactcccaggctcaagtgatcctcttacttcaacctcccaagtagctgggactacagctgtgcactgccatgtctggctaatttttaaaattttttttctagagacaggggtctcactatgttgcccaggccggtctcaaactcctgggctcaaaacgtactccatcctcggcctcccaaagtgctgggattacagggatgagccatcatgctcggtctgacctgtgaattctaattatttcatatgcaggttgtttcatgtgcctagtgtttataaacgttaagtgattgcctagctagtaatttctttctattttaaaagtaatatctatcaaaggtgtttgtgctgttaaaaggcacgaggatggtaacatgaagtcccaaactacttctttccatctgtgtttcagattatttgaatatattttgctgtataaggatggagtgatgtttcagattgaccaagccaccaagcagtgctcaaagatgaccctgacacagccctgggatcctcttgacattcctcaaaactccacctttgaagaccagtactccatcggggggcctcaggagcagatcaccgtccaggagtggtcggacagaaagtcagctagatcctgtaagggttcaaagaatctaagcattgtattcagcatgcatgatggggaaaaaggtttaagtcctttaaggaaggtagtttttagggaaacatccgcttaatcaaaaattttttaaagcctccacttaggtctgcaggttactttgctcactatgtggcaacgggatctaagcttcatatttgaaacacctcagccttctagtgccacctgcacctctctgccactttggctcctgtgaacttagccttgattttgacattttatggtcgtcccgaggtctgtgacatggaaggcatctgtctaaggcacacatttgaattgggtgcctccttttctttcccccacttcctaaagttgcaggggtcaaatctactcccatcatgctgagtgtgcaaaccagcctacttttatgtgaagccattctctgccctgctgctgatatacgcctatcccaagacagtttttaccacacaggcattcatgctgtggaacacagtatggtgatttctcaaaaaattaaagataagactgccatatgacccagcaactccacttctgtatatatatatatgccccaaagaattgaacgcagagactcaaacagatatttgtacacccatgtccacagcagcattattcacaattgccaaaaggtggaaacccaaatgttcatcaacagataaatggataaacaaaatctggtatagtcatacaacagaatattattcagccttaaaaaggaaggaaacaccagcacatgctacagcctgagtaaaccttgaggacataatgttaagagaaacaatgcaggcagaaaatgacaaatacagtacaatcccacttacatgaggtatgtagagtcgtcaaattcatagagacagaaaatcgaatgatgagttccaggagctgggagaggaggaatgggaagttcgtgtttaatggagacagagtttcagtttgggaagatgaaaaaagttctggagatggatggtgctgatggtcaacaaatgtgaatgtactcaaggccaccaaacacttaaaaatggtaaaatggtaaattttatgttatgtacattttaccaccataagaaaaaatatgaacttcttgcctgtcttctttatttaaaagtcaacttttttcctcttatagatgaaacctggattggcatctatacagtcaaggattgctatcctgtccaggaaacctttaccataaactacagtgtgatattgtctacgcggttttttgacatccagctgggtattaaagacccctcggtgtttacccctccaagcacgtgccagatggcccaactggagaagatgagcgaagactgctcctggtgagcctgtgcatagggaagcggcagcatcggatgtcagccccctgcggccccagctggagatggatatgagactagtcaagatgtgaatgctaattggagagaaatataattttaggaagatgcacattgatgtggggttttgatgtgtctgattttgactactcaagctctgtttacagaagaaaattgaatggcgagggtgtggccatatgaactgactagatggctaatatggacactttgggtatttctaatgcctgttcagggctggttttctgcatgcacgggtatacacataatgcagtgccatgcacatagggaagggtcagtaagagaagtttgccttggcagcaagtatttattgttgacattattcagaattagtgataataaaaagcagagtgattttggtcaattttattattaattcttaaattccctgcagagaatgccccctttattgctgcaccagggttggcattgctcccactgagccctactccaccctgtccctgcactcccttggttgccaaaaaaatgataacttaaatcccttccagacttaagaattttatggcatggcccaattgatataaacatttagaaggaaatgaaaagctaaaataggaagtaattattcctctaaagaaacattttgagcaaggcagtttagagaatcctaatgtctacactggcatagcacgagccatgtaagcttcttttttttctatgcaagagtattgatgtatgtgctgaatcttcacagacttgtcaatacacaggcagtattctaaaatagcactgaacagggagtcaggagactattgtctcctaaacccaggactagagttccctcgtactgtcactcctttggtcattaaatgcactgggcttgcccgcactttggccttcctagaacactgcttcataacctctctgtctgacttctgcatctccttccaggtcagctcattcacaagagttgctcccaagcctggatgagttgcaccttgcatcttgagcatgcatttctcacaataattattaagctgtgtgataatttctgctttcaggacactcatccattatcttggctgtgagctccttgggtacgggtaccttgtatgtttacttttatatccctagcacaaagcaagtgcctggcacatagtcagtgccctaagtattcgtagagtgaagaatgccagcctctcttgtccctggtttccttatgtgttgaatgtggttgagtttgtccattgctagggagagacttccagtaataaaatttactattctagatgcttctactgttatgttttatctgcccatttatctttcttagttaccaggagaaatgtgtgacacctatattataatgaaaacaatctcattacttatagtttatctatattaaacaaatttaattgcattttaaagcattctttgatactgttgcttttgcaataaatatggataatcttggttataagggagttaaaacaatgctgtaataaataaagtgcttcatgtgatcaaaatcaaa

SEQ ID NO: 256 - DNA, 29529 bp, Homo sapiens
actgaagcagcagctcagtttctcactccgaagtggcagcagccagagagggagtcggtgtggacgcgaggagccgggcgcttagaacagaggcttgcacaggtggaggtgggtactctgagccatgggacagttgggaaacacagagtaagagttgaggaggaacctacctggctcttagtccttggtgatgggcaaggtcaccactagtaggcttttatccttttatggccagaaggcctggttgtgagtggttgtagcaaatcagcatctggagatagaaacaaaagggaggggcttaaacccaaggcaagtgtttcaggagccatctagcaccaacatcaagcaaagtgttgcctggtttctgctgacaatctacaacccactctaaggcctgtctcccctaggtactgagctgggaggaggaccacaggagacgaaaacagtgtctgcccttgaagagcatatggtctcagggaaacaaacccacacaggaaatgtaacagatcaggaagtagtcactgatgtacactagcactgagtaccaagtgctgatggagcccaagagaaggcatgattgttctgctggggctagtttctgtgttcgtagatcacagaatctcagaatgtcagaaatcaaggagaccacagatgagctacgttaaccccttcattattttccactgggaaaatcagagataattgctgatttgccaaattattaaagttagtatttcttaatcgcctggtctgatacctggcaaatgagtacctactctgttgatgcccttgtgatggtccctcagaggcttagtcacagagctggggtgacagccagggcttctgactcccagtctgtgtactttgatgcaggaggtcagcatcgcaacaaggcctcaccagattactctctggttctcacctctagatagcacttcttacctttctggtttctggtcaataggtcaaggatattagataaattgtctctatttcagaaactctttatttcaaaaatgggtgaatgggagagtcaggctgaggcctcagaggagccacaggaaggaggatgggaccatcagtcctcattgcttccttattgctcatgactatttcagaaacttctccattccagttttctgtgtgacagtccttttgttgttgcacagcagcccaggagccaggggatgagaagcagaggggtagtaaggatgcaggtagtaaggatgttttgctgtctccaaccgcatcagggaaagccaagctgctttcagccatgactcccggctgactcagtcaatatctctccggtgtccccttagcatctctttaactgatttacccagacttcccctgggctggtttttaagaggttgctcaatggagaagatggagctttcaagtggaaatagaaaactggagaatctgaaggcctaggtggagacaggagaacccgaggagtggttgtaaagggactctttggagacgatggagagcatggggaaggtctccaatgggatgaggtgtctgaggagggaaggattgccagctagcaagtgctgccagggtcaagaagtctcagtggtgaccacagcagatgagcattgtctgttgttacttcttcacaccaaatccacagatgcagagcaactgtgccgctcttccttctgcacagtccggaaggccgtctagaacactgggaatgccccagcagaataagtttggcacccttccaagctagggttctctaaatatttctgcaacatttatttagttgataaaaactgagtacctcttaatgttcaaaatcagatttattacatattattcttttttcttttctacggtaaattgtcaacttgaaaacatgctattttttgactttagcaattaattgaaccatttttaaaaaattgagtaataactgacttattcccagcaaataatgctctcccaatgcattgttccatgtggaaatttcagccgactgtcgctgctgaccttacacagctgtgaggtgaccagactcagggtggaggtgggacagcacttggaccagaggctggaaaaattctcagtgtagttcagcaggttgtaaagagggatgtagatgttcactttgtgagaagcagaaccaatttgtatttcaacagcaacaaaggaatcatatatagaaacctgagtgaaataaggccataattctagggatattatagcaccgctcattgccaaccacctccagccactgcctggctggcctcgggacacaagtgaacaattccagcaattttgactcgtgggttacctagtgttacccacacccatgatgacttctctctagccccaggtgggcccagcccacatcaattcgtcttgattaaagtcccatctctcatcttgtaactgagcagaaaagccttcctacaactcccatttgctttgcttcattttctattttcttctaagaaaaaaaaaatggcaggaaatattgggctgctatattttgacttcagcattcctattttccctcctcttgatccttttttgtccctaattattcccatctccggtcactctcagatgtggaagtctgtagtgggccatgatgtgtctgtttccgtggagacccagggtgatgattgggacacagatcctgactttgtggtgagtttggaagtagctttgcttggacagtgcagagggtggggtgaggagggcatctgggccactctgtgatctttgaggatgcttggaaaagggccttctaggactgagacagccctcatactgggactaattggtaggacaattggctgtcacctgtggggcatgcacgatacctggtatcagggatgaaaagagacaggtgtgggtgagtttgacagtgtgattgacaggccatggcaggctacactgaaggtgagaagcaggtgaacctgggtctcccctggcccatgatccaggattcaagctgggcatgtgtaattgggggattaaaaagctgtaggagaccagatggggtaggcatgaagtaggcagaggaggaacggaggtttcagagctcactagtttaattctttgtgttttcttgtttgttttttgagacagagtctcactctgtcacccaggctggagtacggtggtgcaatctcagctcactgcaacctctgcctcccaggttcaagcgattctcctacctcagcctcccaagtagtccctgcagttgggactacaggtgcatgccaccacacctggctaatttttgtatttttttggtagagatggggtttcaccatgttggccaagctagtcttgagctcctgacctaaagagatccacccgcctcggcctcctaaaatgctaggattacaggcataagccaccacgcctggcctcaccagtttaattcttacatggggtcaggatgggataaatatagaggggatgtgaataaagacccagactgaagaaggcagtggacacaggggacatggagggcatgtgtcagttgggtggcccttctcaatgtggcacatttcttgccgtcatgtattactgcgtgctgtcgtttgcagaatgacatctctgaaaaggagcaacgatggggagccaagaccatcgaggggtctggacgcacagaacacatcaagtaggtgccgaaaggactggagaaaaggaagggggttatgggaagagcccaaagaaaactcggagacttgggggaaggtgagggaggaaaaggatagggtagttcatgtctatgtattattgtgtttgttttttttctagagtctgttcctgtgtgtacctgtgtgtcattgcatatttccattttatgtctctcctcttaccctcctcaaccctattatctatcttttatacctaacaactctgctatttccccaagtgggtctattggattaactgcctcccttcctttagtaaggcatgagagattcatagaggaagtggaccaaatactaaggtcctctctatctatctacctggcaatcatctatctcctatctatctcttcagataaatgtaaatatgtatttagaattcagggtgacttccttcagatgaactaagaacaattcagtaaaatgtcaaggtgaagaactcagaataaatgctataaaaagaggccacttcagctcccataactggcccaaataacttttaaaatacagatttgtacttagctatttgacagaagttggaagccatgaatggtaatatgaagaaatgtaacacttggaaaacctgttgataaaaactattttggcaacgatgttcagggatctttaagattatagccccatatgcattttaccagaaacaaacaaacaaacaaaaccctccgataccagaagataaaaggaacttacagacatatccaggggtttctgtgggatatgtcatacattcaggctgagagatccccttctctcttccacggatgattcaggatcatctaaccaggaccatctgctttggatagtatcagaatgtcaaacattagtagcaaggtagacacaataaatagtgtaacaagcaaaaattcaacaactacacacaaaatggcaagattaatacagttttaagctccatttttaactccccctaccgcaccctaaaagcagtgtttttacctctagattttaaaaagtgtcagtggatgaccacattgcacaagcaacatactgtgaaagcctggcacaagtttctacaactggatgacaataccacattgtttaatcagaaataaatggtttcggccgggcgtggtggctcacgcttgtaatcccaaaactttggaaggccgagcgaggaagatcacttgaggtcaggagttcaagaccagcatgggcaacatgatgaaaccctgtgtctactaaaaatacaaaaattagatgggcgtggtggcgggcacctgtaatcccagctactcaggaggccgaagcacgagagtctcttgaacccaggaggcacaggttgcagtgagctgagatcgcaccactgcactccagccagggtgatagagcgagactcagtctcaataaataaataaataaataaataaataaataaataaataaatggtttcaattaagtagctataatgaatattattcttaaaccatgccattctggaaaaagattgaaacaatggaacagggtcattcaggaagcttctgtgatacccctctatagactcatagatcaaaaaaaaaaaaaaaaaaaccacaagacccttttccttttctgaataaaggccactcaacgctggtattctgggaattgtccagatgaggatgcacacttcatgcctttggtggtattgtagccaatgaggtttatccgaggtgtgattattgctaattgaaaacttcccaacactccgccatgacgacttgcaatatagtaggcattggcaaaaaaaaaaaaaaaaaaaaaaaaaagagcaagcaaccctcataaaaaaatgaaataacttaaaaaaaaatagccaccctgaagatgtatagttacaggtcaatgggatagccaatgtctaatgcagtacttagcacttctgagcagctcagtgatgttagttttgtttcctgttaatataggttagtttaatcagatttcctttctaaaatctaacaaacatgtaaacagacaacagcccttttttctcctaagtggtgtctacctggactgttggattgcacaactcctatacacagatcactctgacgggtgctgcctggagtggtacaacatggtgaccctgcacatttccttgttaacctaactgaatctatcagatagaataaacgatggagatattgacaaaaaaatctcgctcatctcccatttacccaggttatcaaggagtgaaagcctggtatctgctggtaacaggccaggtggctttagacaagtcccttttcctctctgattctcattttgcccatctggatcaaaaagacctctagaggactttccagtagtaagtctccactatttggggattccctctcgttagtgtgggctaagtcagtctttaacatctgatgggaatcaccatggtccttggaaaggagagggaaattggagaggagaacagtagctgtagatgctaacactgacagatcccaaaatgaaaaaacaaaaaacaaacaaacaaaacaaaacagtagctgtagagctgagacgactaaaagcaggaaaaggaagtggttgcagttcttactaatcttactaccttccccacaccgtgatgtctctttttaggtctgtcttgaataaatttagtttggatagtaatttggtaattcagtgaataattcaaatggtcctatgcatcccttatccattctgtaaaggaactgcctggttttcaagaactatcacccttctctccaccttcttttctccactcttgcccattcattctcaagactcaagggtgtcttttcccttgacctgtttgtttattttcaaatctgtcacagactgatacttttgtaaaataaaatacaattaagtttctggaaaaataaatggttaaaaataacatagacaatacaaacacagtttttatttttaaattcaacagatataaaatcacgatgttgtcaggcatgctagtctgtgcctatagacccaactactcaggaggctgaggcaggaggatcacttgagtccagtagttctgggctatagtgctctatgctgattgggtctccacgctgaattctgaatcaatatagtgacctcccacctcccaggagcaggggaccataggttgcctaagaaggggtgaacttgcccaggtcagaaatggagcaggtcaaaactccagtgctgatcagtagtgggattgtgtctgtgagtagccactgtactccagcctgggcaacagtgagaccccatttctaaaaaagaaaaagaaaaagaataaaatcactatgtcaaattgctataaaagtttctaaacacatattctcaatttttattcttatttccctgtgaaacagaaacagttcagcttgtggaccacacactgagtggcactgctctggaataatctttcagcacttcctggaaccagtctggcctttagattaaatctttactgagctataaccataggatgtctgcctcagtggccctgtcctcttctcgtgccctgacattttatagcaagtggaaataaagaatggtgtaatgccaagagtatagaaatagaattctggagctctagggactgattccagctctgctgtaaaaaggcttatgatgctgaggagagtaataatattttaccatcctatcttgatttccagcgctgactggagattatagtaccatccctgtttacctcacaggggtactgggaagagccatggctataacttaagaataatgactaacatttattaagctattatatgtcttgcaaaacacagagtactttttaaaaacaatcctatatcatagatgacgttggcatcctgatttcacagaaaagtgaatggatatattaatgtttagcaatttgtccgaggatacagagatacaggttgagcatccctaatccaaaaattcaaaatctaaaatgttccaaaatctgaaatttttgaaagcccacatgataccacaagtagaaaattccacacctgactacatgtgatgggtctcagtcaaaatacaggtgcacaacagttttttcagcgtccccaagggaaaaataaagttaccttcatttatttagttcttctttaataccttccttaatatagtgtatatgacacataaatgaatttcctgtttacacatgggtctcgtccccaagatatctcattatgtatatgcaaatattccaaaacctgaaaaaatcctgaatccaaaacacttctggtcccaagcgtttgggatgagggatagtcaacctgtagtaatttgaattcggctcagtctgactccatgggctgaaatcttaaccaatatattgtttttgtctaataaacataatatcgtcatgtccgtaattcttttgttgaaatgaaatgcaaattcccatgaactaagctattgccaattccctaaggctgcttgctattctgtttacagtgacaaagtacttgataagttggccttaataatactacaatcacttcataaacaaacctctttatgagtgcccaaagtctctttcatttaaggttttcttcactttattatttttcaaaaattaactttgttttttttgagacggagtttcgctctgtcatccaggctggagtgcagtggtacgatctcggctcactgaaacctccgcctctgcctcccagcttcaagtgattctcctacctcagcttcccgagtagctgggattacaggcatgtgccaccttgcccagctaatttgtgtatttttagtagagacggggtttaaccatgttggccagactggtcttgaactcctgacctcaagtgatccgcctgcctcggcctcctacagtgctgggattacaggtgtaagccaccattgcccaggcaaaaattaaatttattgatacctaatcattataagcaaatagttcaatgagttttgactatatatatataatataaccaccaatgcaatcaagatatagaatatatctattaccatgaaaatttccctgcacctctttgcagtcaatacaccccatactgatctttttgtcactatagattagttttgtctggcatagaatttcatgcaaacagaataatatagaatgtattgttttgtgttgtcttctttcagcataatgttttccagatttatccatggtgttgtgtatataagtcttttgttcttttatattgtcatgtagtgtcccattgtatggatatgtcacagttttattattcattatcctgtcaatagccatttggattattgacaatttggatctattacaaatgaaactgtcatgggcatttgggtacaaatctttttgttgacatatccttatttctcttggaaaattgccaggagtagaattgctgagtcatataataagtgtatgttaaacattttgagagactctcaaactcttttccaaagggaatttaccctctttcattcctaccagtaatgtgtgggtttcagatgctccacatttttgtcaacatttgttattgttagtatttttaaatttagctgggtgcagtggctcatgcctgtaatcccagcactttaggaggccaaggcaggaggatgacttgagcccaggagttcaagaccatctggacaatgtggagagattcagagtctacaaaaaaattaaaaattggctggctgtggtctgagctattcaggaggctgaggcaggagaagcacttgagcccagggggttgaggctgcagtgagccatgtttgccccactgcactccagcctgggtgacagactgagatcctctctaaaagacaaacaaaacaaaacaacaacaacaacaacaaaaccaacttaaccactcttttaagttaatttgaatttctctgatgaccagttttattgagtatattttcatttgccattcatatatcttcatatatcttctttatgaagtatctgttcacatctttttctcacttttaaagtgagttgtttgtctttttattaagttgctgaaagttctttatatattctggatgtaagtcttttgtgaaatatgtgttttacaagtgtattctcccagaacataacttgctttttcactttattgattgattgattgattatttattgattgattgctctgttgcccaggctggagtgcagtgacatgatctcagctcactgcaacctctgcctcctgggttcaagcgattctgctgcttcagcctcctgagtagctgggactcaggcgcccaccaccaagcccagctaatttttgtatttttggtagagacggggtttcaccatagtggctaggctggtcttgagctcctgaccttgtgatccacccgccttgacctcccaaagtgctgagattacaggcgtgagccaccacacctggccactttttcattttattaatggcatctttttaagagcaaaagatcttaatcctgatgatgtctaatttattgaaaaaaaatttatggggctaatgctttatgtgtctaagaaatatttacctaccccaaagttgtgaagactttctttgatgttttgtcctaaaggactgacagttttagcttttacatttaagtctatgacccatttcaagtagacttttctgtgcagtgtgaggtcaagattgaggttcatttttctccatgtgattatttagttgttcaacaatattaaaagagtattctgttcccattgacttacctggcatctttgaccacatacatgtgggtctatttctggactctattctgttctgttgatctattttctaccctgacagcataccatactgcactgattattgtagctttataagtcaagaaattatgtagtcctcaactttgctctccttaaaaaaaaaaaaagaaacaaaagattttactattccaggactttacattttcacataaattttataattcactagtcaattcctacaagaatgcctgttcagattttgattgggattgcattgaatctatagatcattttagggagaactgacatcttaatgatattgagttttccaatccatgaacatgggatatctctccatttatttagatcttctttaatattttcagaaatattttttagtgtttaggtcttgcacatactttgttaagtttatcctaaaatgtttcatgttatttcatgtatttatatttaacttccagtttccaaatgtttatggccagtatgtaaaaatacaattgattttgatataatgaccttgtatcctgtgacctagccaaatgcacaatgctttagtagctttttttgtgtgaattctttaggattttctacatacatgatcaggtcatctgtgaataaaaaccttatattctgagtcactcacatttgtgcttttagttttgtaataaaaaacaaacacagattgaggaatgagtcatctttgaggtgctacattttgcttggttcacataaactgcattgctttatcaatacaaagtcttttaaaacttaaattggatatctgagagttaatatgtcaaaagtttcttaggcacaacacagcatattgaattggaattttttgttttcctctctatctcttctagctgtcctctatctccatacataaaacatttttgtgtcctcagagcctaacagtacctcacacttaaaagttgtttagttaatagttataaaatgaaggaatgatgtgattaagacctgtttaggccaggcgtggtggctcacgcctgtaatcccagcactttgggaggccaaggcaagaggatcacttgaggtcaggagtttgagaccagcctggccaacatggtgaaaccctgtctctactaaaaatacaaaatctagcggggcatgacatgcatgcctgtaatcccagctactctggaggctgaggcaagagaatcacttgaacccgggaggcggagattacagtgagctgagatcataccactgcactccagcctgggcgacagagcaagattctgtctcaataataataataataataaagacctgtttagaatgacttccactataacctaaagaagtctgttttctttgggcctcaacaatttcattcaaattatatcattggtatgatcccctgactagtttttctgttatcctttagatgaatatttctgagtatcattttctaatcccttttaaaaacttgttttaactataatatagttataacccatttaacaattattatattcattaaaaaattgcagattttttccatttgaaagtaaattttggccccattttcttgatctttcatctgaatacttcagttggaagatattgggcaggcatttacatgtccttggtactagtagcttatgacacagtgttggtgttgaactgacaacacaagatctctgctttcaacgctgccagagagtttagaggaggcatgggaacagggggttcttccagcacttggcttaatttcatctggttcatagccagctttctaaaattaactgcggctaaagctgagaaggctttttaaaaagacctttggtagaattatccactaaaggccaccagatggatctattcttccttaaaagaagacaatttctgctgtgagacagccattctacgtataaccaatgtgtctggttgtcctgcgctggtaaagtcccagctcaccatctaacatcactatcttaataccctaaaccctcattgcttgctgcagaaagtcaaatttcttatttagggttctcttgcccaaatgtttccaagaatccccggatccttatatgtgtccaaataacagatctgattgtcacgtggggctgagctatcacttcatatcctcaagccaaagaggttggccaagatggctttctgccctcttaattgttgcagtcaccttcatggtaaagatggaagtgggtgtgaagtaagaaagataatgccttttttggtggtactttctcttagggatagaggtgtcccttcaaatcaagataatttgaggcttaaagtgttatagcaataactgtgagtggattttcttagttagttttcattagtccttagttttctcaggtattatcagcctggggggaaggggcagaagatcttaattcatgaccaaaaagcataaaaaataccactaatgtttacataaatttccccagttctgtgtttttataagcattatatttaatgacttcctagtacactagtgaaaggtagtatttcaatttatttaactattatccaaccattggtcatatagattgtttcttagttattgctattatatacgatgcttcaatgagtatcatttagacattaaggacattaagctttgccatatttaaaatcatttccctggtgtagactgctaaaactagaatgtgtaggtccaatggtatgtgaatatttttctgctttttgagacacatcctctaattgatagaaagcagatccattcagaaaagaaaataactttccagttatcagaatataggtaccattgtcctctaatatttaagaacatgaaaaatgggactaaagatcagaaggttattttagtgagcaaataacagactagaggaaatattattggcctatggagagtttaaatcaggctatggtatgcaggccagactgatcttttacttccagacccatcactagtatattttgggggcccaggttattactgaaagtaaacaggacagacttcaaggcttccatttttctgggaagatgggtttcttgatctccctaggatagatgagccttggtcatgtggtttcttccagcatccaccagctgaggaacaaagtatcagaggagcatgatgttctcaggaagaaagagatggagtcagggcccaaagcatcccatggctatggaggtcggtttggagtagaaagagaccgaatggacaaggtaagttgaaagggaaagatttgctttaaaaaaatacaagccgggtgcggtggctcacgcctgtaatcccagcactttggaaggccaaggtgggtggatcatgaggttaggagatcgagaccatcctggctaacacggtgaaaccccatctctactaaaaatacaaaaaattagccgtgcgtcgtggtgggtgcctgtagtcccagctactcaggaggctgaggcaggagaatggcgtgaacctgggaggcagagcttgcagtgagccgagatcatgccactgcactccagcctgggagacagagcgagactctgtctcaaaaaaaaaaaaaataaataaaataaataaataatacattaaaaaattgatatatatacttatatattttgtaaatatgtataattatatacttatatataattatatacctctataataagagccaactatatataagtatatataattgactctataataaataattggctctataataattggctataaaataattggctctataagagccaattatatgtaagtatataattatataagtatatatttattatatatacttatatattttatatatgttataaatataatataatgtatattatattttatatattatatataagtgtatatatattataagtatatataatataatatatacttataatatataatatataataagtatatatattaatatatattatatatattaatatatgtaataaatatatattaatatatataatatatacttatatacttatatataacagatactatatataagtatatataatatataatatatctatattatatattatatatcatatataatatataatctacattattaatacattatattacatattattactatgtaatatattacatagtaatatattacatagtaataatatgtaatataatgtaatatattatatactataattaatatataatatatattatattatataagtatataaaatataatacataaaatataatatatattatatatttttatttataaatatatataaaatatatataaatatataaaatatataaaaatataaataatatatttaatattatattattatatattaattataagatatattatatatatacttatatatagtatctgttatatataagtatatattatatataagtatataattaatatattatatattaatacaagtatataattaatatattatatattaatacattatatattatatacttatataattatttataaatatatttataaatatatattattaatatatgttacataattataagtaaatgtaaatatataaatttatattatgtatattttaatatattataattatatgatataacatatttatattataaatatatagtttattcataaatatatagtatataatatttaagtatatttaaaaattttgctaaaacacccagatacttttgttctagatcaaaatatatattttttgactcattcattggttcatgagttaaaactcattcaaaagtacagtagtcatttggtctaaaatataatgtccacatattatttgtatcaaatttttctgatctcaacacataagatatacatggcagaaaataagaaccaagatattagaactgctggcctgttgtagccccaaccacattgtaactcctagaccaagaagacagggagcacaagtggagaaggaaaaaatatgttttaaaattatttgctgcatttaaatgtttatgtattatgtctatgttgcaacttctctttattattttatttactgtgtatttagtgattttttttgtatacatgtcctacattacatggtgtataaagctcagagttcacttctgaactttgatggccatacaggagcaaagatctagaacaaaatcattggctctcctagtgaaatattccatcccggctatggcgtccggtcagtccccttggtctctcctccacactaccccacactacactctgttctgctgcacaatgctcttgtttcagctctttttgtttctggtttaaacactgctctgtctaccttgtctctatcccctggttcccagcccatcctatgggagtgttcagaatgaaggattcctaatggtattagagaagaacagggatgagcaggtctccagaaaaagtcatcttgctctcccatcgcgtattccttggcaccactgtcagaggctatagatctgacccagaatggaatttcttacatgcctacatcccactccatatctgtatttatttttttaaggtcatttttatcttttcactcactccatccttgatttttctcagagtgcagtgggccatgagtatgttgccgaggtggagaagcactcttctcagacggatgctgccaaaggctttgggggcaagtacggagttgagagggacagggcagacaaggtaagtgaccactctctctcccaaccacccacctccagtcctgtgaaaattgcccacgatcacccctggatggaggcacatgcttctttgttgaaagacaggacagtggatgctgtgaggacctgacaccgtcacagggatacctccctcagcaagttccttggtgccaatgttggaagccacatgctgagctgaaagacagtgattcaaataggagaagactctcaaactgtgtgtttgaatgaataattcctcaagccactggtttttattatactcatatgcatgaagatagaacagagaatcatctaagctcttcttttggcttaacatcaaaaccttataaatactcatgccgtttaggaaaacagattcatcagtttaaatattattgccatagcagcagataatcaagttaaacaactaattagggttactatttacagaatttagcatcaatctatgaagtccagatatctttaaagactcctttgtacaaaacaaaacaaaatgttgttttaaagagaaaaaaaagtaccgtatgattacagcatcatatcgttgacaggagagtaagattgataactcatcgatgtttttagttccacgccttattaggtcggattctttgaactcattttttatggtgcagaatggtgtctcctgccctgcagctgcacacagagagaggacagctccttcacagttagctgagattttttctttgtttttaccaacagttgttaattaggtggacatgcatccttaaagctaaggattggaagctaaggcagctaagttctagaaaattaattgtttgcatcatggggggtaaaaccatgaaaaacaaaatcaggaaagtttaaaacatactgcaaagctaagggaagatgtagaaggcaatagtgaaatatggagcatgcagtgttctagaatcaggatggaattccctgttccatcttggcaccactcttgcctgcctttgcttaatcaccgattcttacatcttttgctcacaagccacaaatggaatcacccagtcagtgtgtcatgtaaatcaagaaacaatacatgttaattagttcttaatatgcaaaaacccagacttgcttagatacccatagttcctgagccagatggagaacaaagctccaaaactctgcggtaatgttgggtatctgggcaacatatccagtcccagagccagctaggatccagactctcctggttgcagttatcccaccaaaatccacatatttgtgtttccattattgagtaatgaaagagaagaggcacagcattatcaactgggaatagggtaatgtctcttcatgagcagagtgctttatactttacaaggcacttttctaggtatcacatttcacttttgtgaggattcgttaggaagaaaagcgctaagttagtgaatgaaactaagtagacactttaccttgtcccatttagttctcatgacatcccagatgaagagggatcatttctctcattttacagtcgaggtagataaggcaggcatgcctctcctgattttatattgaaagagactggggcttagtaatataaaggaacgtgcttaaacttcaacaactataaataggggatgtagggtttgaacctaaaactgtctgtgtccagggcctatgttcattgctctgtagtatcctgtgtccataccagcctgtttctacattaaacacctatactcagcctgaagcccctacaaactacctctggggctggctgggagtaaggggaggttaggaagaggaaaacctgtcagctctgactctaaccaattctgtctcctcttctctgtagtcagcagtcggctttgattataaaggagaagtggagaagcacacatctcagaaaggcaaggacactgtacttcactcagcctcagcaatctgaccggcaggctcttctgctaagactttatcttccagcagttgtcatcagctttttaacttccatgacccagcgcaccactattttatttactttttgttcatttgtttgtttttgagacagggtcttgcactgtcacccaggcgggagtgcagtgacacaatcatgggtcactgcagcttcgacttcctgggctcaagcgatcctcccacctcagcgttctgagtagctgtgactacaagtgtgcaccaccatgcctggctaattttttattctttgtagagatggagtctcactatgttgcccaggcagtgtcaaaccttttggctcaagtgattctcccctctcaccctctcaaagtgctgggattacaggcatgagccaccacacccaccgctattttacatacttttttatttttttgagagggagtctcgctctgtcacccaggctagagtgcagtggcactatattggctcaccgcaagctctgtgtcctgggttcacgccattctcctgcctcagcctcccaagtagctgggactacaggcgactgccagcacgcctggctaattttttttttttttttgtatttttagtagagacggggtttcactgtgttagccaggatggtgtcgatctcctgacctcgtgatccacccgactcggcctcccaaagtgctgggattataggtgtgagccaccgtgcccggccctattttatatgctttttaaacccagtgtgcacttgcttctctttttctccgtgatcgctttctataatattgatcaagtttttttttttttttttttgcgacggagtctggctctgtcgcccaggctggagtgcagtggctggatctcggctcactgcaagttccgccttccgggttcacgccattctcctgcctcagcctcccgagtagctgggactacaggcacccgccactacgccgggctaatttttgtatttttagtggagacggggtttcaccatgttagccaggatggtctcgatcttctgacctcgtgatctgcctgcctcggcttcccaaagtgctgggattacaggcttgagtcaccgcgcctggccatattgatcaagtttttgaatccctcttttttctctaatgggttgaaaataaggtattctattcctttattttagaaggttattcctaaattttaacatgcatctttgacttaaatttaaaattaatcacaatctcttcctgagtgtattggaaacatagaatattttaactacattctttttaaccaaccatattgttgttgttcagtatattggttccatcttattccatcttattattgattccatcttataaaccccacaaaaatgaatcattattattacttagtaaatgcttatttaaattgaccaaggtatttacctatttcctagctcaacattgcttattgtatttcattgtttcacctttgtgtcttctatttccttcttgctaaaatattccattgataattctttcaatgagtctatgaaagaactttcagtctttgaaaaatgtctttatgttgcatcattcttcatttttattttcccttcatcactttgaagatcttatttcatcgtctctgacatctctcttgtgtcagactatcattcctgagtaggtaacatgtcttatatctccgggttttttttaattaaagattttcttttggtctctgatattcttcactattattagggtgtgtctgaatgttagatctacttttattatcctatatgggacttactgccctttttcaacctcagatgtgactttcattataggaagttctcaggcattttctcttggaataatacctcttctctcttctctttatgtccttgtgccgcattctgggttattcctttagctctaggttaagttcactaattcttcctttagctgtatttcattattgtttaagctgtccattgcattttaaactttctttcaaatatcttcccttcccttcctttcccttctcttccctgccctgccctgccctgccctgccctgccctcccgtcccctcccctcccctgccctcccctcccctcccctcccctcccctccccttcccttgccttccctctctttttttagataaagtcttattatgttgcccaggctggcctcaaactcctgggctgaagtgatccttctgccttggcctcccaaagtgctgggattacaggcatgagccaccacatcagatattttcatttctggagtttcttttggttctattgcatatctgctgattcattttccataagacattatggtttcattatggttccctgtgccacttctttaagctgtttaattattttaaacatgtactttgcagtttctttcatattttatattatttgcagttcttggctgtgccatttcttctgactaatctgcgttcctcatggttatttatttccttgatggtttgtaatcttgtttataaacttattttagtgaaggagagggatatttgttttatgagaatttcatgtgccctgggtttagtaagtacctcatccagggaaatattgcctctacttctggctcaactctagaggtcttaatagtaacggacattttttttcctttattattattttttcccatggagttcaagtctttctggtttttaagttggttatggtatgttgtgcttttcaaggaatttgttcattttgtctgtgttgtcaggtttattggcataaattcatttataatattctcttctttttaacttctgtaagatttctagtgatatgaaatgcctattttcatttctgatcttacttacttgtgttttttctctttttaattattcttactagaagtttatcaattttattactctttccaaagaacaagcttttggctttgctaattttctctattatttacttgttttaaaaaatgtattggtttctgctcttatctttattatgtttttcttctacttagtattaatttagtttgttcttttcctagcctcttaaagtagaaacttagataattgattttaagccttcctttactatatgggcacttgaaaagctatacatttccctctgaacactaccttcatttgctacaaacatttgctacattcaacaaatatttgaatgtgtgtgttttaattttcattcatcacaaacccgtggtcccagctattcaggggactaatgtgggaggatcacttgagcccaggaggttgaggctgcagcaagccatgattgtgccactacattttggcctgggcaacagagtgagaccctgtctcaaaaaacaacaacaacaacaacaacaacaacaacaaaaaataaaatcattcagttaaaaatattttcttatttcccttgtaatttcttctttgacacatgtattatttaaaagctgttattgattttctgagcatcagggaaattttctagataattttattggtattgacttctactttaattctattgtgatcagaatatgatctctgatatttcagtcttttgaaatgtactgagacttactgtcttagagacttatggactggcacatggtctatttggtcaatgttctatatgcatgaaaaaagtatattctgtagtttggggtatagtgttgtataagagtcaattaggtttattagttgataatgtttggatcttctataattttactgattcgtttttgcctaaaatacctattaattaatgaaagaatggtgttaaatgttcaactactattacagatttgtctatttctctttctacttctgtcagcttttgcattatttgtgtgtgtgtgtgtgtgtgtgtgtgtgtgtgcgtgtgtgtgtgtgttggagtcttgcgatgtttctcaggctggtctcgaactcccgggctcaagtcaccctcctgcctcagccttctgagtagctgggactacaggcattcaccacacctggttttttacatttttcttttatttgagagcttcatgaattttggttctgtgaataggtttatgccagcatacatactcctgatgtaaggtattgttcttttatcattggagcatgtctttcttgtctcttagaatgcactttgtcttgagatcactttatctcatattcatgccatctttcttatgcttactctttccaaaatgtatattttcctggatcagtatttagttaatttctcagcttagaattcctgcatcacataagtggaaaaaaaatgtgtatttgcattctacactcagatgtaggcttggagtttccaagtctcataagcaaattttccccctatcaaatattgaacaggttacaagcccccttcatgattttcctgagtaaatgagtagaatttttctagcactctcttataggagtggacagagcttcgtttctggctttcttccctcctcccccattcttaaatggaaattagaatcacagagcctcgatcctaatccctattcattacatttggaatttaaaatctgaccaggtgtggtagttcacacctgtaattgcagcattttgggaggctgaggtgggtgggtcctttgagcccaggagtttaaggctagcctgggcaacacagtgagatcctatcactacagatttttttttaaattagcaagtcatggtggcacctgcctgtggtcccagttactcaggaggattgcttgaccccaggagttcaaggttacagtgagccatgattgtactctgcactatagcttgagcaaaagagcaagactctacctctaaaaacaaaaaatcccccaaaaatgcccttgggttttctgtggtgtcagttcataattatcttcacacatacagctttgattcatctctttgtctctggtttctggagccaggattttttcccttcctttctgctgagcttcactttttttttttttgagatggagtctcgctctgtcacccaggctggagtgcaatggtgcaatcttggctcactgcaacctccaccccccatgttcaagtgactctcctgtctcagcctccccagtagctggggctacagacgcacatcaccatgcctggataatttttgtattttttagtagagacagggtttccccattttggccaggctggtctcaaattcctgacctcaggtgatccacctgcctcggcccctgaagtgctgggattacaggcatgagcaccgtgctcggcctgagcttcactctttaaaacacaattgttatgttttatctgacatttctatgtgcttatatgggagtaggggaaaggcatacatttcatgtatctgcctttttttttctgcaatctcctcactctctatactttccccttcttgaagaagaagggagaaaatgggaatgttcttctcatcttggcatggaaatgagagaagagagggaaaaagtaagcaatattcaattaaaagactacttaagacatggcttctctttaattcccctgtattcaagccctgctcttttcccaggcccctaacactctgtacccattcctgctgacctctcttctccagcgcttccctgtgtgctggagcctaagggtgggctctcatgactgctccttcgaccacagattactctcgtggctttggtggccggtacggggtggagaaggataaatgggacaaagcagctctgggatatgactacaagggagagacggagaaacacgagtcccagagaggtgagttggggttggaagggggaaggtcacagatagcacagggatctccttccttcctttctggaagctcacccgggtgccccagaatacagaggggcagatgtgcagagcagggggtgccagggcagtaagcacatgtgtggggacaggtggtggtagtgaggggagagaggagagatggagaggaaaacagaaggattaagagcagggcctaggagggaggtgagagagaagggggcgttgaggaaggaatgaggacagacaagctgagtgatggtcagaagatggtttgccatgagtcttagagggatctctgctgtcctcacagaggataaagaggtttactgcttccctggaacccatacggatggctgaagtgctctctgtattttttcctatttcttttacatttttccttatctgttgctttctgctttccatgtttccctacttccatctttgtcttctccattcgctcccagattttttccccatctgtttccctctcttcccatccatgcctccctctatcctctgattctcacatttcctcctacatttgttttccacattcctgtttttcttcccactgattcttctcaccacccattcccagcattttgatctcctataactcagaactttctgtcctgcagattatgccaagggctttggtggccagtatggaatccagaaggaccgagtggataaggtaaagcaccggaacaccaatgtcttaagaagagttccctaagtttaggaaagtgtgcagagaagagcgtgaagaaggctgggagagggaggggacggtggtgctgggcacacagagcctgtcctgctggcgtcctgcagtccccactgactgccctcagcatctaaggggcatgtctgccaaagcctgagctttgaggacagtgggagaggcatacagagagacaggtaaaccgccgggaaaggtcgtattggactggaaattgtattgatttcttggcattgcttaacccaatcttaagtctcttcccaccccatgccactgtcctccctacactagttcctcctcatgcatgagccagggggccctgctacattctaggcaactgggcttggagatgtgagattctaaggtcactgagctgctgaaagggggagctgaactcagcacttaagaacttctttaccccctctctaccacaaaacaacattggaacatgctgtccagctgttgagcatccaatggttagggatacctcttatagtggcccccaacccccaatactacctccaggtcaccactacccttgcccctctcccgcaacacacatgctgttctcctgcctgcagagcgctgtcggcttcaatgaaatggaggccccgaccacagcttataagaagacgacgcccatagaagccggtgaggcttagtgattcactctccatgcacctcacttccttctccctcattctttttcttccccagactatatcctccatgcctttaactacctagattagctgagttagacctgatccctatcctcatattcccagattctgtctttcctagaaaaaccaggtaaggcggagctcacatctgtaatcccagcactttggtggctaaagtgggaggactgcttgagctcaggaatttaagaacagcttggacaacatggggaaacctcatctctataaaaaatacaaaaattagccaggcatggaggtgcacacctataatcccagctacttgggaggctgaggcaggagaatcacttgaacccaggaggcggaagtcggagtgagctgagatcatgccactcaactccagcctgggtgacagagtgagacgaaagaaagagagagagaggagagagaggagagagagagagagagagagagagagagagagagagaaaagggagagaagagagagagagagagaaagaaagaaaagaaagaaagagagaaagtcaagtggatagacagagtgacgtcggggaaggaatcggaggcagagaacacagtgtggcttgggacaggggtggggtggcatgggaacattggtgaggaaccacttgggaagaacacacagggacaggagtttcggatgaggttgaggatgagtggtggcttgaagaaggcatacagatttatggaatatggacaggggaggatgctttttggaagcccaaagtttacaatttagaaaggacacaagtcagctgggcatggtggctcacacctgtaatcccagcactttgggatgctgaagtaggataatcacttgaacccaggagttcaagatgaggctgggcaacacagcaagatcccctctctacaaaaaatacaaaaattagctgggtgtggtggtgcacatctgtggtcccaactactccagaggctgaggtaggaggattgcttgagcctgggaggttgaggctgcagtgtcccatgactgcaccactgcactctagcctgggctgagaccctgtctcaagaaaaaaaaaagacacgagtcttaggtcgtatagcctggctttataaaaatccaggcttcagggctatgccatcctcctattatcccttgttcctctatcgatacctctttaccatcctgtcccacaaatccctcctcccggatatttaactgattccccttcttccttcaagtgccatgcccttccccactctccaatccaagacaaccctaatttttcttgcctgtgtctgcagcttctagtggtacccgtgggctgaaggcgaaatttgagtccatggctgaggagaagaggaagcgagaggaagaggagaaggcacagcaggtggccaggaggcaacaggagcgaaaggctgtgacaaagaggagccctgaggctccacagccagtgatagctatggaagagccagcagtaccggccccactgcccaagaaaatctcctcagaggtgagcgcctggccctctgggatccacatccaggatctcttgcccagacaggagcctaaggggtccaaaccattggcagaaaataaggcaaagtcctcccctgggttaggcaaggtctgttgtctctgtctttagaagacttcagtctgactgtaattggacctcctatcagaatgttagaaaaaaccctcaagatttacatagtacaacagaaagcaagtcaccagccagcacagccaattattgctgtaggaactatgaggaaggggccgtcacttcaggctggagcccatcttgagggatgagttccatttgaattggcagagagtgggagagggtgttcctggtaaatgtaacagtgaagacatgcatggtgtggtggctcatgcctgtaatcctagcacttgaggtggccaaggtgagaggatcacttgaagccaggagttctagaccaacctgggcaacatagtaagaacctatcgctataaaaacaattaaaaaattagctgggcatggtggtgtgtgcctatagtcccagctacttgggaggcttagagaggaggattgtttgagcccaagagtttgaggctacagtgagctatgatctcactgtgctccagccagggcagcagagtgagaccctgtctcaaaaaatgcataaaataaaataaaaagaatgaagatgggccgagcgtggtggctcatgcctgtaatcccagcactttgggaggtcaaggcagacagatcacgaggtcaggaagtcaggagttcaagaccagcctgaccaacatagtgaaaccctgtctctattaaaaatacaaaaattagccaggcatagtggcgtgtgcctgtaatcccagctactcagggggctgaggcaggagaatcgcttgaacctgggaggcggaggttgcaatgagctgagatcgcaccactgcactccagcctgggctacagagcgagagtctatctcaaaaaaaaaaaaggagtgaagatggaggcttgcttacttgagagatgcttcattttccacaggcctggcctccagttgggactcctccatcatcagagtctgagcctgtgagaaccagcagggaacacccagtgcccttgctgcccattaggcagactctcccggaggtaagcaaacccccaaagattctctgcccccaccccatcttctcgagtcttaggaatgtgggctgtgcagggtggccaaccatcctggtttgccttgcactgttctggtgttagcactgaagaccttgccttctgggaaactcctctgtcctgggcaaactagtatagatgattatcctagctgtggtagctcaacaatgtgctcttgcttcaatgttttcttggtctcccaaagaatctgacttgttttctacttccctcccctcacaccttttacattctcttcccattgtctctggaatgtgttttgggtgggtgggtgtgggaggagattgaagaatgaagatggatgaaaggctgtgttccccaggagaggctgttagatggaggcaagggtagaggggagaagaggcagggtggtgaagggcgggggatcttatcagtcctccattgattcctcctggaaagtggaagtcacagtgctccacactgtctcttctcaggacaatgaggagcccccagctctgccccctaggactctggaaggcctccaggtggaggaagagccagtgtacgaagcagagcctgagcctgagcccgagcctgagcccgagcctgagaatgactatgaggacgttgaggagatggacaggcatgagcaggaggatgaaccagagggggactatgaggaggtgctcgagcctgaagattcttctttttcttctgctctggctggtgagtgatgggaggagaagcaggagaatttgctcatgtccaggggagggtaagaggaagaagaatttctctattgccccagtaggatctttctctgtttgccttcttcatgttgatgatcccatgtttgtgtttctcattatgcaggatcatcaggctgcccggctggggctggggctggggctgtggctctggggatctcagctgtggctgtatatgattaccaaggaggtaggttgggagtggcccgaggagcctggtacatggaggcccctgatataagacagggggacatgtgaaaagagattcatgtctgaccattctaatatcccctcaactttctccccagagggaagtgatgagctttcctttgatccggacgacgtaatcactgacattgagatggtggacgagggctggtggcggggacgttgccatggccactttggactcttccctgcaaattatgtcaagcttctggagtgactagagctcactgtctactgcaactgtgatttcccatgtccaaagtggctctgcctccaccccctccctattcctgctgcaaatgtctaaccagatgaggttctggacagacttccctctcctgcttcattaagggcttggggcagagacagcatggggaaggaggtccccttccccaagagtcctctctatcctggatgagctcatgaacatttctcttgtgttcctgactccttcccaatgaacacctctctgccaccccaagctctgctctcctcctctgtgagctctgggcttcccagtttgtttacccgggaaagtacgtctagattgtgtggtttgcctcattgtgctatttgcccactttccttccctgaagaaatatctgaaccttctttctgttcagtcctaaaattcgaaataaagtgagactatggttcacctgta

SEQ ID NO: 257 - DNA, 65536 bp, Homo sapiens
cgggggtgcgcggggcggtcagcgatctgcagcttcgcggggacagagatgtaacccaactcgttcacggatgttccgcgcgccgtgtcaccggctgcgggccaggggtactcggaaggcgcgggcaggagcctggcgaggatgcaccttcccctgccttggaaaggtagaactggggagtgcgggagggtggaggtggcccggaaaagaacacctcttcgcaaccaaaaaaaaaaaaaaaaaaaaaaaagaggaaatagaggaaaaatgtgttatttcaaccgccactcagaacccatcataattcagccagtcggtgtcatttttattgaattaaattttaaaaaagttttctttgatttccagagcgtttttgcgggaggaatatgttaaaacaaactcaagatacgaaatgagacttttgaagtgcctttgatttctgggtacggaaattcttttgataaagcgtgtgtacgttaagatttaggatgactttttttttcttttttgtaatacaggtctaatggaaatgacattctttatgaattagaacccaattatgttttaaagtttataataagtcaaatgattctctcagtccctatgtccgtattagtgaaattctatctccatattagcgaaatttgcatagatacacacctttttctttttgtcttttagtcttgctgcagtgtatcggacgagtttaaccagatatccagcactagccttctaacagtttctaactcagtggtgacattttttagttcttaactcccccaatccttcttagcctaacaaacctcttaattaaggtccatgaaagaccataaaccaacctgattatgcctttagcaaggctgtgttcacttaatctctaatcccatatcataaaagtccgctagtcactcctgacctccaggaacccacctaaccagggtggacactataagaaaacatgtgttttaatggaatgagaacttttttgagttgaagacacgctagcctcaggaagcagtgagctcaccatccctggagtgtgagtcaagcactagtcttggatgaccccttgataggaacgttgtagacaagattcaaatatcaaatagtatttggactagtgatttcaaagtctattccagacccctgtgaaactgtatttccaaccttggcatttctggatttccactaaattaagccactttccttgctcattagcatcttgtagagctgtgtggctatttgagcgcttgaatgtggctagtccaaattgagatgtgctatatgagataaacaccacgtttccaagaattagtatgaagagaaaatgttaaatatttcattaataattttaatattgattacctattgaaataatattttgtcatattgggctaaataaaatatattattaaaatgaatttcatctattccattttacttttttagtggagttactagacaatttacagatgtgtctcaaattatatttctattggacattactgttcaagactatcacctgtggtaacttgaggccccatctttaaaagtggtgactattaatactgaggagtaggtggtaacttctagctgccatcctaacttctcaaattaaagtgagacccaaactcagcctctgaaagctttattatttatttatttatttattcttcttcttattttttttaaaagatagagtctccctgtcatccaggctggagtgcagtggtgtggtcatgtctcactgcaacctccaactcctgggctcatgcaatcctcccaactcagcctccagaatcactgcaattacatgtgtgctctgaaaccttttttttttttttttttaactttgtagagagtcttgctgcgttgcccaggctggtcttgaacttctggcctcaaatgattctcctgccttggcctcccaaagtgctgagatgacaggcatgagccaccatacctagcatctctgaaacctttaaatagaattctgccaacatctaacacctactgtttaatctttaattaattaattaattaatttttcttttaaagacaggtctcactctgtcacacaggctggagtgcagtgggcatgagcatggctcactgcagcctcaagctcctgggctcaggagatcctctacttcagcctcccatgtagctggactacagatgtgtgccaccacatccagcagttttttttttacttttgtagagatggggtcttgctatgttgaccaggctggtattgaatgcctgacttcaaggaatcctcacaccttggcctcccaaagtggtgggattacaggtgtgagccactgagcccagcctgtttaatacttaatgtagggttcaagcccagactatgggaatatagtatagatatgtctgatgaactcagacttggtcaccacagcttttcacattatggcaataggaagactggaggccggacacattggcttacacctgtaatccgcacactttgggaggctgaggcgggcagatcgcttgaactcaggagttctggaccagcctgggcaacatggtgaaaccccgtttctacaaaaaacaaaaaaaaatttaaccaggtgtggtggtgctgcctgtagtcccagctactcaggaagctgaggtgggaggattgcttgagcctggaaggctgaggttgcagtgagccgagatcatgccactgcatgctggcctgggcaacagtgagaccctgtctcaaaaaaaaaaaaaaaaaaaaaaaaaagagagagaaagaaaagaaagaaagagaaagattggaaactccaatatgttagttgtgactctgccaaaaaaaactatttagaccccacacaaaacctgcacaggcagagcctcactgcgactcttcaggagataggaagaaagtggggagacagagcagtatgctcattctaagattgggtctctagcagaagcctgcacaatgaaaaagtataccatattcttggatgggaacacccaacatgacaaagatggcagtcctccctaattcatctgcacctctttacactaaattctgataataggttctgatcatcctgtttcgttcctttgttgtagcagtctgtccactcaggaccataatataattactgtaaatttggaatatgtttgaattgctggtgggccgagtcctccacatctcgatgggtccctttactcctttttttcccccagaatgttcctgttttcttttgcttgccattttccccatgtggatttaaaatgaatttgtctagttttaaatataattctgtcggcattaaaaaaaaaaataaagtgggattcttatctcacacatcaggataaattcctgaagaattaaagaggatgaagtagaaagaaatgaaaccatagacatgcaaggagaaacctcaaaggatttttaaaaaaatctcagagttggggaaagactttctgagtacgacaataaacatagaattcataagatgtaatttttttttctttttggtagagacaggatctctctacgttgcctaggctggtcttgaacgcctggcctcaagtgatactcctgccttggtctccaaaagtgttgagattacagttgtgagccactgtgctcagctgggaggagctcttgcggccaggattttaagaccagcttggacaacgtagcaagacctgtttctaaaaaataaaaataaatagttaagctattctggaggctgaggcaaggggattgctctatcccaggagttcagggccgcagctcaggctacagtgagctatgattttactactgcactccagcctggcagctctaaaaaaataaaataataataataataatataaaaataatttaaaaagcaatggtttaaatggtaatttgtatcttacttgtatttaaccacaataaaaaagaatatacaactactgggacatttttttttgagaccaggtctcactctgttacctaggctggagtgcaatgactcattgcagcctcgacctcctgggctcaagtgatccccctgccttagcctcccaagtagctagggctgtaggtgcacaccaccatgcccagctaactttgtgtgtgtgtgtgtgtgtgtgtgtgtgtgtgtgtgtgtgtgtgtgtgtgtgagagagagagagagagagacagacaggttcttgctatgttgtccaggctggtattgaactcctagtctcaagtgatcttcctgccttagcctcccaaagtgctgaaattacaggcatgagccatcatgcctggctcactggaaaaatttaaagttcatccatggtatgtctaaaagaatctcacacagtgtactgggccatattatttgtgagatgctgtagtggttcaatttcaggctctggaatcctactgcctgggtttgagtccagttactgaactgccatttgcaagttacttcaccttttaaagattttatttcggccaggcatggtggctcacacctgtaatgccagcactttgggaggccagggcgggcagatcacttgaggtcaggaattggagaccagtctggacaacatggtgaaaccccatctctactaaaaatacaaaaattagccgggcgtggtggcaggcacctgtaatcccagctactggagaggctgaggcaggagaatcgcttgaacctgggaggcagaggttgcagtgagctgagatcatgccattgtgctccagcctgggggacgagattgagacttcctctaaaaaaaaaaaaaaaaaagaaagaaagaaaaaagttttttttttttttgtctatataatgaggatgcttataactctcatagggtattaaaagtattcgatggaataatgtatgtgttgtatttagcccaatacatggtatataataatgaccattacatatttgtaaacaatcaaattggccaggcacagtggctcacgcctgtaatcccagcactttgggaggccgaggcaggcggatcacaaggtcaggagatcgagaccatcttggctaacacggtgaaaccccgtctctactaaaaataaaaaaaattagccgggcgtggtggcgggcgcctgtagtcccagctactcgggaggctgaggcaggagaatggcgtgaacccgggaggcggagcttgcagtgggccgagatcgcaccactgcactccagcctgggcgacagagcaagacgccatctcaaaaaaacaaacaaacaaacaaacaaaaaatcaaattaatggggatatccagtttttattttgtcttctcccagtaaccacagccagtactatgttaaccttgtcaatatgtcttattatttttaattactgctgatactaccattaagaaaaacaaatattttaaattggcatttaataaagagaattagatatgcaaaaacagttaaaatggtaaattttatgtatttttaccacaataaaatctttttaaggcacttgttgaatttagtgtcacttccaatgatttctgaaaggacttggtatagatttatttgtggtaataaatcagtagcacatacacccacatacatatgcaatgacaaattgggaaaaatgtttgcaacccacatatcacagggttaatttccccaataaataaagagtttctacaaatccatgaagaaaacacaaaccagtagaaaaataagcaaaggatatgaacacagttatcggaaaagaaaatatgaaaggcttttaataaatgaaaacatgctcaattgtagactattgggatataaaccatatacagaatatataaatatagggaaattgaggcactcagatacaaagacggccattattctttcttgacagtttaatccttgcttccctcctttctacctaagggttagtgatatttttccagcttcattggtgaccaaagaagcaaagagtttgcatgcgtggaagccacgaccgtctttcaggttcagtgtaaaatccctcccatccaaataatgttatctttagcttagtggcatctccttactttgtacatagaaatcccccgaatcagcctcttaaggccagcacaactataagtatgtaagaggctgatgctctcaacacatccccatccattcctgcttttaagtttaatgcctgtacgttgctggtgataccagtctctccaaaaccatcaccttattctggcttttcgttcaagctctctattctcttttaaaagcctcatgaagagttgattacatgataaacataaattgtctaattagtagagagaaactatgctatgcaataaatggtgttaggttacagctaaccgtttggagaaaaatattaaatctcccttacatacacacacattttatatactgcgcatttaaaatgtatgtacttttcagctgggcgccgtgattgttaattactgctgttattaccgttaagaaaaataaatattttaaattggcatttaataaagagattcaaatatgcaaaaacagttaaaatggtttggtcttaatgtgttatggaaactttacacctgtaatcccaggactttgggaggctgaggcgagaggatcacttgaggtcaggagtttgagaccagcctggccaacatggcgaaaccccgtctctactaaaagtacaaaaattagccaggtgtggtggtgcatgcctgtgatcccatctacttgggaggctgaggcaggagaatcgcttaaacctgggaggcggaggttgaagtgagcagagattacactactgcactccactccagcctaggcaacagagtgagactctgtctcaaaaaaaaaaaaaaaagaaaagaaaaaagaaaaagaaaaagcatgtacttttctacgaatttaattttgagaaataatcagacgtatgactaaagatatatttatcaaagtaatcactataatgttaaatattagattttaaaaagaacaaaagagtaaacaaccaaataaaaaccctttagatgtagggttacagaattgattatttgattgaactaaccatagtatatgcaagaagggtacaaattatagccattaaaacaccctgggtagctttatatgtattaacagttatatatcttggctgggcagggtggctcatgcctgtaatcccagcactttgggagaccgagagaggcagatggataaagcccaggagtttgagaccagcctgggcaacgtggtgaaactccatctctacaaaaaacaccaaaaaaaaaaaaaaaattagctggatatggtggcacaggcctgtagtcacagctactcagaaggttgaggtaggaggatcacctaagaaaggaggtctagactgcagtgagctgtgatcacgccactgcactccagcctgggtggcagaacaagactgtctcaaaaaaaaaaaagttatatggcttaatgttaaagtttccatagcacattaagaccaaaagcaggcacagaacagtatctatggtatgaatgtatttttgtgaaaaatttaaaaattcacatgtatataggcatacaattgaaggttacccaccacattaacatctgtagttcctatttctgagggcaggattatgaagagactttcccttaaacatttatgtactgtttgcatttttaacagtagattttaacaaggaaaaaaccatgaaggtatttcaattttttttctttttttttgagacagagtttcgctctgttgccgaggctagagtgcagtggcacgatctcggctcactgcaaccttcgcctcctgggttcaagcaattctcctgcctcagcctcctgagtagctgggattacagatgagtgccaccacacccagctaattttttgtatttttagtagagacagggtttctccatgttggccaggttgatctcaaactcctgacctcaggtgatctgccctcctctgtcccccaaagtgttgggattacaggcgtgagccaccgcgcccagccggtatttcaaatttgaaataattatttttacaatttcttgaacatggaatcagagtttttatgtctcacatacggtctcattcttttcggacattagcagagcacaaggcatttctttaataatttttcctccatttttctatctaacttcagatgccattaaatctgtacatgagttatgaggagtgtatgcatgtttgtgtacatggtttggcttctggggcacataaatgaggtataaatattatccccattaactcaaggatatcttaacaaaccatggaaaattgaggttattccatctttttgccatatgggattttactggtaacatgatcccaaaactcacattccttgatctttggcacttggcacactcagggaatccgcctgggaattcaccagatcaactccctgccttagattagttacttaggacatagtgctgggaaaatagttttacatttcaagttagccgactaatctttggctgtccctctccatgtgactgacctggggcaaatcttagaatctcagaatattggctatgggagaccactgtatcgattctttccattttgcagatgagaatattctaattcttgatttcctgtaaagtggggaagttaaacgaagatgatttatagattccttctggcttacagctctgtgattcttgtttcctagtcaagatcacacattccatccctgtggatcaggttatttttcagggaagctagagtcctgatttttggccacaaaccacatattcagaatcaaaagaagatgatcttataatagcgtaggctgaacaataaacgtttataatctcactagaaaaaaagcacgtgaatgtgtaacctaatggttgcttagtagtgccagatattgctgcattgtcgcgtgcagtctctgggagcctttactaaggccaggctctgtgggcttcaaggtcacaaacaggagcgctggcctcctggagctccacaaggcgtcacagctgtaattattccatggaatttaggtgagtgttgtgaaggatgagtgccatgaagggacctcagagcttctgcttcatgctgtagcagtttggatcccagacaaggtgactaactgaggaagcaagcaggggctaaaatcgaaactctttccccaagccagcctgtgtttactgaaaagaaaagggcctttaaaaatccaccaacactccctttagctgagcagccacttatagtcccagctactcgggagtttgaggtggaaggatcccttgagcccaggagttccagtccacctgagcaacagaacaagaccccatctctaaaacaaacaaacaaacaaaataaaaaatgccattccatccccctcacctgcagtgccttcccctatgttccagtggctgcctgtaggatgctgtaagagtttgaaacaggggccctgacctagagcgagggttagagaatccctcctaaagaaatgactttcaagttgagacctggaagctgagcatgagttaaccagttgaaaggaggaaaggaaggagagtgagccaagcagaacacagtccaaggctgcaagtcagagaagagctttgaaagaatgtgcttgtggctggggggcagtgagccaatggcagaaggaatgagtgctgtggctggagtgatgggctttttaagccacattaggaattttggactttaagtgcaatgggaagccactggataatttaaaggtgacttggcaggcacagtggctgatgcctgcaatctcagtgctttgggaggccaaagtggattgcttgggaggccgaagaggatcattcgaggttaggcatcgaagacctgcctggacaatgtgaggcctcatttctacaataaataaataaataaataaataagccaggcatggtggtgagcacctgtagtcatacctacttgggaagctgaagcaggaggatcgcttgggcccaggaattcacagttttagtgagctataatccaccactgccactcaggcctgggtgacagagtgagatcttgtctctaaactaaaataaaataagctcacacctgtaatgtcagcactttgagaagctgaggcaggtggatcacttgaacccagcctgggtaccatggcaaaaccccatctctactaaaaatacaaacaactaggctgggagcagtggttcatgcctgtaatcccagcattttgggaggctgaggcgggtggatcactcaggagttcaagactggcctggccagcctggtgaaaccccgtctctactaaaaatacaaaaaattaggtgagcgtggtggtgtgtgcctgtaatcccagctactcgagaggctgaggcaggagaactgcttgaacccaggaggaggaggttgcggtgagccaagatcacgccactgcactccagcctgggcaataagagtgagagtctgtctcaaaaaaaacaaaacaaaacaaaaaaactagctgggcatggtggtgtgcacctgtagtcccagctacttgggaggctgaggtgggagaatcacctgagcctgggaggtcaaggctatagtgagccatgatcacgccactgcactccagcctgggtgacagactgagaccctgtctcaaaagaataaataaataaaataaaataagagagtgacttgagcagcttcaaataaattttattgtttcctcactttatctaatattaattgaaatccttagtcttatgttggggttatcccaataggacgtgggaaagaaagttcaagctttcgccttgatagttctccatgatgctgcttaacataaacaatcgagttttcaaaaaccaaaactcttgatttcattaagtaaggagggtgtaatgtgtagtgcttgggccgttagaggggatgtggtcacaagtggtatatctgaggcttttgaaggagtgcattcaaggaagagccctgcttggtgtcagctactgaaccagagatccgaagaagtggacctcgccagcctcctgctccaccccgctaccagtcttagctggagctcccttttctttgtcatactcagccagttgctcattgctgttttagagtctggcccatgttttgctctttggctgtgcgattggcgtgaatcttctaagcaaatgaatagcttagaggtgaatactgaatcttttgcttcaagtagctcagcatttttgtctttcatttttactaagtgactagattcagtattcgaagatgttttggccaaatgattcattatttatttggctttagaaagagacttcaaaaggataatagaaataaacaacccagaggttttttttttaaattgaagattaataaaagagagacctctgctggctacagtggggtaacaacctagagttggccactgactccacaggaagctataatggctgtgacccaccccatacgcttttacagttgtcagcaaattgatcactatttgttcacttcttcagcaatcaactcaagttcttttggagttcattgaagtgaggtataattcccagtccaatcaccactgtttctgtttcaatctttaggaaaagtattagtcttttatatttctcgaacataatagctttacatatgagcccctgccaaactgagacctgaaataattcctgcatcttaccttctctgtttcctttccccttttttgcctccacctctcctcctccccttctccagtaaaacaaaataaaacaaatctacactcaagagagagtactgatagaaagtgagaaggagggagctgggcgcttatctttggcatatcctcagctgaggatccaagctggggggcccagggttggtgttaactacctgagtagagctgtagttcctactgatgtcttccgtgggatttgttcaaccgtgggaatgtggctgcacgatagtggagcaagattcagtgaatgcttcagaatatggagggtcgttatctagggggaggaaggggactgaatgttctcttgagaccttttgttggcaacaacaataatgagtgcctactatgtgccaggccctggactaagtaccttaaataccttaattctgtttcctgcttttcttctctcttcacagtcttaagaatgtctttctatgagaaaaacattgaatatatgtaaagaacttacaacaaggcctgcataaagtagtagctatgcatgtgttcactattttattattatgtttttactctggaatatgctgccactcctacacatgaggagaggctctccccatactcaccagagcaagcaagtccttttttttttttttttttttaagacacatggagtcttgctctattgcccaggctgcagtgcagtggcatgatcatggctcactgcagcctcgacctcttgggctcaggcagtcctcctgcctcagcctcctgagtagctgggactgcaggtgtatgccaccacacctggctaattttaaattttttagagatggggtctcactatgttgccctggctggtcttgaactcctttgctcaagcagtcctcccaacttagcctcccaaatcattgggatgagaagcatgaaccactgtgcctggttaattacatagatatttacatatctactatcttaaaacggtgtccttttaagaatttcaaatgatgctttatagtttctaatatggtgcactgggtatactgttgatatttaaagttttgtgaatgataaatttccctacttcagtagtgccatagaattaattgattcttgtatctgaaatttaatgagtgcttatgaagtatgctggactgtgctaggttctgacagcatttgaaaagaagtttgacatctgcctgtctgtccccttttggctgcctatgaggtgtgtaagatggctgcaatttgaggaggcatcctttgttcctgaggatagaaggtgcattgtggagtagaaagatacaggaactataggcgatgccacaccaactctgtgccacttatctccagaattcctgtacagaaaagaaaagtacacttttatcttgtttaagccactatgatttctgggctctgttactagctgccaaatgcaaatcttaacagatacagaagtccttgaggatttttgagcaaggaactgactgtaaaactggtggctctgcaagggacagatttggggaggggggtgttctggagaatcctaagagataaagttggcttggtaggtggggacagatagtaggggagactgaatgcggagaatacacatcttgcacaggtcactgaattttgtttctttttcccaggacacctctgctaaactcctatttttaccgtggttatttaaatatgtggttattgaggaatttgtattctgctatcgtcaagtggcctgaaagccagggagatcgagaagatgagtgttctttgtgctttaaaaagaagcaggcaaaagctggaacgggaaagagtatcagtgttacagtgaagtgaagttactatgttttctgaactcctgcaagcattttcaaggaaaggaatgtttgttacaggtgattgtctaatcaagatacatttgaaatgtatcctttactggatagcaactgtaaacaatatttaaaaaatatatctcagagtgacttgcagagtaaagataatttcatatgctaaaatttctaaaaggagaaaaaccttttttattaactttaatgttcatataatcacattgagtaatggctatttttttcctagtgaacttttcattttaggttgggcaggtaattttatacctttaattacatgggtcttaaaaatatgatcctatagccataactgaatattataagcttgggtactttatgtttcatctttcattaaggagtatatttctcagatcctaccagatcctacttttttttttttttttttgagacagagtctcactctgtcacctaggctggagtgcagtggtgctatcttggcttactgtaacctctgcctcccaggttcaagcagttctccagcctcagcctcctgtgtagctgggactacaggtgtgcactgccacatccggctaattttttttttttttttgggatggagactcactctgttgcccaggccagagtacagtggtgtgatctcaggtcactgcaacctctgcctcccaggttcaagcgattctcctgcatcagcctcctgagtagttgggactacaggtgcgtgccactacgcctggctaattttttgtatgtttagtagagatggggtttcaccgtgttagccaggatggtcttgatctcctgacctcgtgatccgcctgcctcagcctcccaaagtgctgggattacaggtgtgagccaccacacccagcctaatttttgtatttttagcagagacggggtttcaccatattggccaggctggtcttgaactcctgacctcaggtgatctgctggccttggcctcccaaggtgctgggattacaggcatgagccactgtacccggccctcagatcttattttctatggacaccctactttgcttcagccctgaggtcccagctgccccattcaacatttttaccttccttttctgcattgtcctaacctttaggaaatctgaaccccagtagttgactgtcttctgaactaggtgaacctaatatcccaatctctctgtttccctaaaaatgggttggcaattctaaagttcctttcaaacctggttggacagataattataagccttaatgcaatgacaaatttcaaggtccctccaggcagtgactttcagccttccctctacacatggaaaggaatgtgcccagtattacctgaaaattcttactaggttttgcctcaaaacgtaatatttggaatctttttttataattttcccactacagactggagacaatccatatattactattaaaattgagttgcggctgggcacggtggctcacgcctgtaatcccagcactttgggaggctgaggcaggaggctattcagtattacctggaaatcagaatgccaattactcaataaccatgtatttaaatagccatgatgaaacaggaatttagcagaggttacctgggaaaaaaacaaacccattaattatgtctctcaaagtccttgtaccttttgtaacttttttgtacctcttaccaagaaaaaaaaaattgtatctccctacctttccctccccatttggaaaaagtaccctagaatgcaagagactgaacatcaggttgtaacctggactatctgttgcaaactgtcatactttttttacgaacttgaaacattttagagatagggtcttgctctgtcgccctggctggagggcagtggcaccatcataggtcactacagtctcaaactcctgggctcaagtgatcctcccatttcagcctcctgagtagctgaggctacaggcatgtgccaccacacccagctaatttagaacatttttctttttttgtagagacaaggtattgttatgttgtctaggctggtcttgaactcctgacctcaagcagtactcctgcctcagcctcccaaagtgctgaattacaggcatgagccattgtgcccggccccaacccagtttttattgcaacgtggattgtctacagtttatagtgtgaaaaagtataaaaaatgattcccaattttaggttttgagttatagctccctgaagttcctgggttgcattttgctacagtctgcacacaagaaaaacaaaacaaaacaagacacacagtctgatacgcagagagatgttctctctgtacagttatataataacaatagctaacatttgtggagcactcagtgtgtgctaagccactcatctacattgtttcctttaatcctgagattaaataaattctgagaagtagctgtaatgataaggaaactgagccttggagctgtagctcaacatcacacaaggcagctgagtctgggctcaaattcaggccttggggctgtcctgtcattcttataaataatctcaacaggaagaaggccagcaggctcagtgtgacactcgatcctaaattattctctttcactttctgcccgattaaaagaccatatggtaattaaatatttctggccagcaatgtcttgccatttattgaaaaataataccacaatatctctaataattgtttcattaaaaacaagaacagagccccagctatgtccggaatggctctaagaacatctttctacttctctgcaccttagtctctcctgaggcaagatggaaagaacaaaattacgaggttgctttggcaaaaaaaaaggaacaatggatattactttattaggactaggagccactttttatggcaggttgcaactgtcaaaggacattttagggtcgagaagcccccttgcaaaggacaaaagatgtccatggtaagaaaagcacggaaggcccaagggaaaagttttaaaatgagctttgcctctaagcctcctttgatgctcacctccatatcgattcaggcatttctcaaaggccaccttcttccaaggtagataagagggccctggtcggccgggcacggtggctcacgcctgtaatcccagcactttgggaggccgaggtgggtggatcacaaggtcaggagttcaagaccagcctggccaagatggtgaaaccctatctctactaaaaattcaaaaattagctgggtgtggtggcaggtgcctgtgatcccagctactcaggaggctgaggcagagaattgcttgaacctgggaggcggaggttccagtgagctgagatcgcgccactgcactccagcctgggcgacagagcaagactccatctaaaaaaaaaaaaaaaggccctggtcagggtctcactctgtcacccaggctggagtgcagtggcatgatctcggcttactgcagccttgacatccagggctcaaatgatcctctcacgtcagccttctgagtagctggaactacaggcatgtgacaccaccctggctaattttttgtagagataaggttttggcatgctgccctggtctcaaactcttgggctcaagtgatcctcccgccttggcctcccaaagtgttgggattacaggcgtgagccaccgcgccccgccatggtcaaaagctttatcttcgttaatcttggttgagctggtttcccacttcctatatcatttgcctgaaaggggagacccagcttactttggaggtaggtgtaggtagataagagccaagtgttgtttgctaatgtattgagtgagggatctcattaaaaggtcattttatttgtgcaatcaaagaactcctttggagcccagtatggtgtcacacacttgtattcctagctactaacgaggctgagatggagaatctcttgagcccagtcaatcactgatgccagcgtgggcaacatagtgagaccccatctttaaaaaaaaaaacaggtgtgattaatgttaagcaccttgagatgaggagagcggtttggattatccaggtgagcccaatctaacaaaataaatccttaaaagcaaaagcagagggcctttccatctgtggtcagaggaataggtgactatggaagagtggttgctccctttcccttgtccctgctttgttttctccacagcacttctcactctgtgggaggcacaagaatgcccccctccaaagagatacacatcctaatccccagagcctattaatatggtatgttatatggcaaaggggggattaaggttgcaaatggaattgtttgctgatttgctgactataaaattgggagagtatcttggattatccaggtggacccaatgtaatcacaagggtcctgaatcttggaagaggaaagcagaagagggattcagagtggtgtgacgtgagggcttagcttgctgttgctggcttcgaggatggaggaaaggggctaggagcccaggaatgcagcagcctccagaagctggaagaggcaaggtaaaggattctcccccagagcctccagaaacaaatgcagccttgctggcaccttgcttttagcccagtgagacccatgttagacttctagcacacagtactgcaagatattaaattgatgatggctgggcgtggtggctcatgcctgtaatcccaacactttgggaggctgaggctggtggatcacttgaggtcaggagtttgagaccagcctggggaacatagcaagactgcgtttctactaataaaaaattagcaaggaacggtgtgcacctgtagtcccagctactcgggaggctgaggcaggaggatcacttgagcctaggagatcaaggctgcagtgagctatgatggcaccactgtactccagcctgggcaatagagccagaccctgcttaaaaaaaaaaaaaaaaaatggctggctgtggtggctcaggtctgtaatcccagcactgtgggcggctgaggtgggcagatcacctgaggtcaggagttcgagaccagcctggctaacatggtgaaaccccatctctactaaaattacaaaaattaactgggcctggtggtgcacacctgtaatcccagctactcaggaggctgaggcaggagaatcgcttgaacctgggaggcggaggttgcagtgaacagagatcgcaccactgcactccatatcaaaaaacaaagaactgcttggtttctgatttctcagctctcaactctaggcaggtgatttatttgtccacttaagagatgggaattggacactgccgctgggatcagttctgatcctgactataaatttccggggtgctctgccttagaacttggtttattgcctattaagctgctttcctgttgcctgtgctcagtgtctgtctggctcctggcctcctcttgccaggtgatttggcctcattctgaacctgttttatgtagagtgtctgtctgcccgacttcatggggcagatcacagaacaagatccctgtgccacgatctgctttcccttcaccaaatatcactatgaacttgtgcctacctggatcccatacttgcttcaccctgacaaagctttttcttctctctacttctggcctgctttgaatttattgttttatgcctgtgtgttagagggaaaaatgtattaaaataatgtactggcaatacctcccttcctgtctaaaaaaagtgaatgctttgtgtactcatctccctagagggcctttgttgaattaagcagggtgattggctgtgaggagaattaaaaggcagagagaagaccaaattgctctacccaacacaaaatgaggagatatttgaaagagaattttacaaggagaagactgaagaaggccgggcgaggtggcacacgcctgtaatcccagtactttgggaagttgaggcgggtggatcacctgaggtcaggagttcgtgaccagcctggccactaaactctactaaaaatacaaaaactagctgggcctggtggcaggtgcttgtaatcctagctactctggaggctgaggctggagaatcggttgaatcagggaggtggaagttgcggtgggccaatatcgtgccactgcgctccagcctatgcaatagagcgagactgtctcagaaaagaaaagactgaagagaagaggaaggagacataagtgagctgtacaatttttgagcaaagaaagaaacccaaagaatattttaatggaaagcttcctatattgcgtgtagtgtaacattctctttgcctctctaagcatccagtacacgttgaatttgtggtagattaggtgtattaagtgctgagattggcctcaaggcaagggcaggatgactcagaatagcacaaatagtttcaggtgggaagggggaggaaaaagggaagcaaaaggcaaggaaaatgccaagtggtcttgcctacagcagatctttcagcccgcatgcttgctctgtacttggaattctctagaaaggttgcaagaagaagctgcactccagagtagtctgagaaagggatcaggaagagggcatttatctgccagctccctcctgtctccattttttgtggctgaggttcacactacttagcagagctaaatcccctgaatgccatgtggtgtcatctggcagctccgtgatcactcaggaaattaattttacgccttgcagtgtggctatttcatccgagtctggaagtgaggagtgaccaagagagaacaaaaggaagggtggtgggaatccaagaaggcttaaaacgtatgtctctgtagttgagaaaaggttttacttaaatcctgttccaggccgggtgcagtggctcacgcctgtaatcccagcacttcgggaagccgaggcgggtgggtcacctgaggtcaggagttcgagaccaacctggccaacatggtgaaaccctgtctctacataaaatacaaacattagctgcgtgtggtggcagatgcctgtaatcccagctactcaggaggctgaggcaggagaatcgcttgaacctgggagacggaggttgcagtgagccgagatcgcaccactgcactccagcctgggcaacaagagtgaaactccatctcaaataaataaataaataaatacataaatacatacatacatattgctccaaatggtgaacatgtgcatgactacgtgtatgaactctgatgtcttcataaagaattttaaaaaactattggaaaacatgggaaaacatgctctaattttttttaaatttcatattcagggaggtacatgcacaggttgtacatgggtatattgcatgatgctgaggcttgggtttctggatgatcctattgcccaagtagtgaacgtagtacctgataggtagcttttcagcccttctctcttcttcttcccccttccctccttctggagtgcccagtgtctattcttatttttatgtctgtgtgtacccaatgtttagcactcgcttataagtgagaatatgtggcatttggttttctgttcctgcgttaatttgcttaggttaatggtccccagctacaccaatgttgctgcaaatgacatgatttcattcttttttatggctgcatattctctaatgttaattgataatgccagataaatcttcagacttctagattataatcatggaaccaggtagcgacttccgccttactttttaagttatttaattacccatgtaataatacatatatatttttttctagagacagtctcgctttgtcacccaggctggagtgcagtggtgccattatagctcactgtagcttcgaattcttggactcaagcaatcctcccacatcggcctcctaaagcactgggattactgtgtgaactaccgtgtctagcccacgtctcttactagttaaaaaaacaaaaaacaaaacctgtcattccaggtgaagggagttgctttagtgtaacacctggcttttctctgccttttcctaactctgctcctgagctgtgatttaattggcaaatttggggaaaataaagtgagcatgctcagcttatcctgtccactttcccctttggaatccagccagcatgaggcctgctgtaggggcaggctgacactctggtcgccagggaggcaagtctactttggaccagaactgctagatctcattccgcagcttggtattgggaagctcttctgactctcagatttaaactgcatcctgcaacccagtcctatcaggaataaactaataatttgatcctctccctccattcctttatcttatttcttagttggctgtaaaatttaaaaaggaggaggggtgctttttattgggcccttcttgcaacatttggttcattggctaaaaaattgaaatgtaagaaaaaaggaaggagcacaattagggagaagcaagtgaacacacatggagtgattgaggcttctggagtggtgagggattggccttggcgctgggtcttgttcttggtatgtgtgccggacatgttaatcttggcagtttgtataggcttatattgggctaggtaggtttttgtggtggtgcattagtgcttaaaagccatggcctggggaaaactttggaaaagtcattcagaggctgtagcagggccttgacaagggcatggggctgtcagagggcctaagtggggactggcaggctgaagagcgttaataagcagtcacagctgatgcaaggattcaattataggaggaaagaaacaatcttttcatatactatccttttagatattaagagagtgaaaaaaatatctgctgtttttaaaccatggagcagctgggttctctatggaccacggagcattagtgagagattggcttccaatgtgttagcacgaggtaatgtaaacaaacagtccaagttttaattcctcttttatgttgttttgcactatccttaagggcaagagagggcaaggtggaggggctaagtttgacttcatgtggctcaagaatcagtccctctacttgttctcaaggttgctagaaactggttgcttagattttctctttctttcttagcatgataaagtatcaaacaatatttttttgtgaatttttaaaaccgatacataatgcttgtggatatttctgggatgcatgtgatattttgatacatgcatacaatgtgtgatgatcagcaccacctcaaacacttatcatttttttgggaacattccaaatctttcttctagctattttgaaatatataattatgggtttttttttttaggcctaaggaattccacagaaaaagataatgggaaaagccactgtggcacaggaaaaaaatgtttacttggtattgtgggagccctcttactaggcagaagttcacttccattgcagcactgcagtgcaggcacctaaagatcaaaggggacgtggaaatataaaggctttgaatatctgggtaagaaagaacagctcctctcaaataagatgtgatgactgaagatattgccatttcatatttctaaactttacaagaaggcagcatcctctcaaatactctgagacaggagaaagtactcagagggggatcttcccagatgtggtaagtgtgaggtgcacagtgctgaaattaacctgtgaccaggagatttctactaactgggtttaaattcacaggccatggggtctgtactcttggcattgatcaagtggcattttggtgaggctgcagtctctgcaacagtctttgggcacccaaagcactgattctgggtatgcgattctgcttgagctacctgctaggaattggcttattttatgaagatggctgggatagagccagtgctatgatcattttacatgttctgttaaatctatagattctttagaaaaaagtacatcccagactaggctgatattgaggcaggagaatagggtctggaaacagggaacctaaggtcatttcacgctaactttctagaactaaatttaaagaaaaaccctaacattccacgcctaagtaacaaaaggaccagaggctactccctttgcaaacccccaccttttctgcccagcagatgggcaattggctgtcagcaaccaatcagactgattgcaggcagagtcttagtttccatagaagtgcaactttgtaacttcaccttaacctctgattggttgctttttgcagccaattagttgtttgcacaggagtgtgacgttggtaacttcagcctctaattggtggctttccgccaccaatcagagcaactgcggaccaccactttatttacatgaggtgaccaccaagtggcccatgggaaacctgtagggggtatttggacccaacagaattctgtaacccgggtttttgagccgctgctcaggccgctcccacactgtggagtgtactttcgttttcaataaatccctgctttcattctttagttgcttcattctttctttgttttgctgggcattttgtccaattatttgttcaaaacgccaagaacttggacaacttgcagtcaagaccctctactagtaacaatattatcattattttttgacttggaggccctgaaggaaatgcccccattccaatgaaatacagcttaagctgtacttgtcaaaagatccctgactgtacccccacactgaaatcccttccggtagagacaaagcataataagaaattgggaaagatggccgggcgcggtggctcacgcctgtaatcccagcattttgcgaggccgaggcgggcggatcacctgaggttgggagttcgagaccggcctgaccaacatggagaaaccctgtctctactaaaaatacaaaattaactgggtgtggtggcacatggcagtaatcccagctacctgggaggctgaggcaggagaatcgcttgaacccgggagacggaggttgcagtgaaccaagatcgggccattgcatttcagcctggtcaacaagagtgagactctgtctcaaaaaaaaaaaaaaaaaaaaaaggaaattggggaagatacattttggacttctttgaattttaacccacacatgtaagataattttattttgaacttcactttcttttatctttaatgtctcatgattttgacttataaggagatggatttcatttcttggacattaatttctccctagaaacttgataaagggaggagatttatgttaaagtatattttttctcaatattattggtattttcttattgagttttttttgcgcatattattggagtgtagtatacttttgtcatgtaatctcattgttgatcctctgatatgtggacagtatggataaacataataaaaattagtaatagaaaaatggagttaagccttggatacagaatgtcactgaaccttttttttttgtttgttttgagacagggtcttactctgtcacccaggctggagtgcaatggcgtgatcacagttcactgcagccttgacctcctgggctgaagcgatcctcccacctcagcctcgcaagtagctgggactataggcatgggctactgcacctggctaattttttttttttttttggttgtcttttggtagagatgggatttcaccatgttgccccagctgttgttgaactcctgggctcaagcaatccacttgccttagcctcccaaattgtcaggatcacaggtgtgagccaccacgcctggcccctgaaatattaatgtgttatagtgaactattttggaaccttatgtgagcaaaatcgccattgcctaccagggttcctggaaaggtacaaagtagggtggtatgagagggaagggtaacgtcatgaaggtggggcaaggatggtcctcacaggctgtcaagatgctgtctggaggatgtcagccacacctctggctggcataggctgaatggttaaaccaatgtcttaagagaaaaaacatcgagagaatattagtgggaaatgattcttttttgttttgagacagagtcttgctctgttaacccaagctagagtgcagtggtgtaaatgtggctcactacaacttctacctcccgagctcaagggatcctcttgccttagcctcccaaatagctgggactacaggggcgttcaaccatgccccactaatttttaaattttcagaagagacaaggcattgctatgttacccaggctggtctgaaactcctggcctcgaatgatccacccaccttggcctaccaaagtgctaggactataggcgtgagccagcacgcccacccaggagtgactcttaggcaacctcgatattaccttctgtgataggctgaataatgggcccccaagtatgttcacatcctaattctcagaatctgtgagtatgttatatggcaaaaggaactttgcagatgtgattaagttgaggatcttgagataagagaggttaccttgtgtgtccaatataatccattgatctctataagaaggacagaggaagagtcagtaaaataaagtgatgtgacggcagaagcagattggaatgatgagctttggagatggaggaagaagccgtaagtcaaggaatacagtccagtagaaactgaaaaggcaagaaaacattctcccctcagaggcttcagaaggaaccagtccctctgacaccttgactttacccctaatgaaatggattttggatttctgacctcaagagctattgagaataaatttgttttctaagcatctatatttgtggtaattttttacagtggaaagaagagaccttctataagaaggaacttgattttatctcctgtgtttttggacagggtaatttaatctgactggtaaattctagaataataaactgaacatgattggcttagtctccttctctttgttctttgggagccagtcaagcccaagaaagcacaagttctacttcttgcagggtaggatgctacccatatgatgagatgtgccccactcagtgctgctggacctgggtggctaattaagttcatgtaactgtggttcagtattagcatttggctttcatgttaagctatattctcctgtagttttaatcagaatacagtgatattttgacctccacagaccacttcttggacttatctctttgctcatcactcaggcatgacaaaatggtgactttgaggataatggattgaacaaaaatgatacaatctcttgtagctcccaatttctataagtagtggagaaaatttaaaaaaaaaatcacaactgcattggaaacaagaaatttccaggaaccagaaactatgacaaatccctaaatgacataggatcaggtgaaggaggtaagccacagttaaaactagaacagtagactattgctgcaaaatatagcggacactaagaatactccttgccccaaagtggtggatagcagtgacaggaagttcaaaggtaactaatagattgactaattcaggtaccacagtaggactatctagatggttcaattgctgcttgctatcccttctctatctgtttagccaggtaatagtgatgagtggtatctatctccactcaagaaaaatgggtaggagggtgatgataagataaggcagtgcccaacccccagtgtctggcaatacctgggaggaggggggtgcactcacgttggaacactagccaccaaggtatgaccagtgctacatcccatcctccctcacaataggctaaaaaaatagatgtgacatacatctaaaaggacattgcctctgtaaagatgagtgacaaatcaagaatggatgaactttaaagaaggctaacatgaaagagagacaagaaactcaatagacgataaaacttccatctgagaaaatgaattaacacagcaagaagattaggtcttttcaataagtatgacttgtatcattaaagaaatgtgaaagggtaatatacatatgtataagaataaattagatattgtggaaatttgaatgattgttgaaataatttaatagaagggggttgggtgtgatggctcatgcccgtaatcccaaaactttgggaggccaaggaaggatagcttgaggctaggagtttgagaccagcctgggcaacatggcgagactacgtcactacaaaaaaataataaaaaaaatttagccaggcatggtggtgtgtgcctgtaatcccagctactccagaggctgaggtgggaggatcgtttgagcccaggaggtcgaggtggtagcagtgagctgtggatcacaccactgcactccagccagggccacagagtgaaaccctgcctcaaaaaagttccagaaagaaagaaatatgagtagggaagagaggcagtgcatttaaataattcgaagaattatttaatctcaggcttagtttctgagatggaaagaaactacaaagtccctacaaatagcacgaaatttgtgaatagaaaagataaagagaaaagccttaaaatcttccagaggaaaaaaccagaaggaaggagaatcaaattgaaatcagacttcttatcagtgatattgtattaaaaaatatcagtgtgagtcaggtgtggtggctcatgcctgtaatcccagcgctttggaaggctgaggtgggcggatcacctgaggtcaggagtttgagaccagcctggccaacatggtgaaactttgtctgtactaaaaatacaaaaattaactgggcgcctgtaatcccagctacttgggaggctgaggcaggaggctcactcgaacccaagaggtggaggctgcagtgagccgagattgtgccactgcactccagcatgggcgacagagtgagactctgtctcaaaaaaaaaaggaaaaagaaaaaaagaaaaaaacatcagtgcaatgaagcaatgaaatgtttgtagttttgagagacagtaactcagcctcccaaagtggtgggattgtcccagcctcccaaagcactgggattacaaacatgagccaccacacctggccaacaataacttttaatttaggattctgttagacccaatcaaatataataaaaagagaagggcctttcctaccagacatctacctttatttttatttatttatttagagacggagtcttgctctgtcacccaggctggagtgcagtggcacaatctcggctcactgcaacctctgcctcctgggctgaagcgattctcctgccacagcctccaagtagctgtgactacctggctaatttttgtatttttagtagagacggggttttaccatgttgtccaggctggtcttgaactcctgacctccagtgatctgcccacctgagcaccccaaagtgctgggattacaggcgtgagtcaccatgcctggccgaaatctatctttaatatgaagttattggctggacatggtggctcacacctgtaatcccaggactttgagaggctgaggagggaacatcgcttgaggccagcagtttgagaccagcctgggaaacatagtgagacctttgtctctcaaaaaaaaaaaaaaaaaaaaattagccaagcatggtggcacacacctgtggtcctagctactcgggaggctgaggtgggaggatcgtttgagcccaggagttcaaggctgcagtgagccatgatcagccactgcactccagtctgggcgacagagtgaggccctctctcaaaaaaacaaaaaatgaagttattgttattaaaacagtgtgatataagtgcaagaatagataattagacatttggaacagaatagggagctcagaaacagactcactcatatatgaaaactttatttgtataaaatcaacactccatacctgtaggaaaaagatacattagtctatcagtagtgctgggacaattcgttatatataatgagatccctagctcacttcatataacaaaaacaaatttcacagaaggattcaaaatgaacagcaatttttagcaaaaaaaaaggataatatttttatggtcttgcgtagggcaaaaggaagccctatacccaaaccgtaaaggaaaagattgataatttcagttatattaagatgaaaaaatgtctgcttattaaaaggcatcataaaaagtgagaagttacaatctgaaagaagatattggtaacaaatataacccacaataattagtatccagattatatgaagaactccaaactgcaacatcagctgggcgtggtggctcacccttgtaatcccagcactttccaaggccaaggcaggtggattgcttaagctcaggagttcaggaccagcctggacaacatggagaaacttcatctctaccaaaaatacaaaaaattagctggacgtggtggcacatgcctgtgtctcagctactccagaggctgagatgggaggatcacttgaggccaagaggtggaggttgcagtgagccgaaattgcgccactgcgctctaaccagggcaaaagagtgagactctgtctcaaaataaacaaacaaaaaacataaaacctaaaaaactgcaacgtcaatccttccctgagtttctagcctgccagcctgctctagacatttcagacttgctcctggcacaattgtgtcagccaattccttaaactaaacctttctctctctatataagtctatatcctattagttctgtttctctggagaaccctgactaatccaagtcagaagaatgaagtctggtagcaactgggagactctgagtggagagaagtgaaaagatccactgtcagatgaaggcagacccgtgggtgaagaatcatattgaagaatcctctgttagatgaaaaagcccacgtgactgcatggattttggtttatgttgttgtgtttttaaccttctgttaatgccagcaatcgatttttccagatttctctttgagttctttttcgagaatagctgctttactgtagagtacagaattagacccgtttgggttttcatcagcagccttcagatctgctgctccgcatgcctctttatgaacgctggcaccttttaaggataattctaggccatcttaatctcttttaatttggttaatcttttcaagaatttttgcattttctttcagtttggtaaattgtatagtgaattccctttccttcctctatggattttttgtattttaaaaaattgtggtaaacataacataaatttattattttactgttttaaccacttttaagcaatttctcattgttgtgcaaccatcaccactatccatttctagaacttttaaaaaatcccaaacagaagcttgtacccattaaacactaggttcctattctcttctcccctgtcccctggaaacctctattctactttctgtctctataaagttgtctagtctaggtacctaatataagtggaaccatataatatttttcctttctatagctgctttttttctttttttttgagatagagtcttgctctattgcccaggctggagtgcaatggcacgatctcggctcactgcaacctccacctaccgggttcaagtgattctcctgcctctgtctccagagtagctgggattacaggcgcccaccaccagggccagctaatttttgtatttttagtagagacagggttttgccattttggccaggctagtctcaaactcctgaccttaggtgatccacccgcctcagcctcccaaagtgctaggattacaggtgtgagccactgtgcctggcctacagctgctttttaactgaagaaaaacttctccaaaacaagaactataaaaaatatccaataactcttgcccttaccatcatctccaaagagatttgaagagattggactcaggctcatgttttcaggccatgatcttgcaggtgtctccaggagaagcctgaagctcagttctgaggcagtcacaatgcttttggtgagcccaagttcaccacagacctgcctctgggggtatcggcccactgaaccacaacagaccacccatctcattccacaatgttcagctaaccccgcatgacagctgggacagcaggctcagggctcagagaggcacattgaagaaccagtccagcccatgctttaaaaagtaataactcattttacttaactttttaaactgaaacataaaacacagattcataaaactatgagataaattattgtaaagagaacatctttgtgactgccaatcagatcaagaactagaacgttgtcagccacccccgaaagcccctctatgtgtcccatccaatttcaaccctcttccatctcccaaaagtaaccgctttcttgccttttttttctttaaaaaaaaaatcattttattgagaggtaattcacgtaacatacaattcacttatttaaggggtacaattcaatggcttttggcttatttacagagttgtgcaacaccctcctgagttttatagcatttccttgtatccactggtatctgtagtttcaggcacccactgaaggtcttggaacatatgcctcatagataagggggaactgctgtaactggtcacttttgaaggatggaaagcaactaaagcaactaattcaatatctttttttttttttttttttttgagacagagtcttgctctgtcgccaggtgcgatcttggctcactgcaacctctgcctcccgggttcaagtgattctcctgcctcagcctcccaagtagctgggactacaggcacccaccaccgtgatgcctggctttttttctttttttttttaattttagtagagacggggtttcactgtgttagccaggatgttctccatctcctgacctcgtgatctgcccaccttggcctcccaaagtgctgggattacaggtgtgaaccaccacgcctgaactaattcaattatcttaaaaactggtaaagtgccgggtgcagtggctcatgcctgtaatcccagcactttgggagcccgaggcaggtggatcacgaggtcaggagttcgagaccagcctggtcaacatggtgaaaccttgtccgtactaaaaatacaaaaattacctgggcctggtggtgcatgcctgtaatcccggctattaaggagtctgaggcaagagaatcgcttgaacctgggaggcggaggttgcagtgagccaagattgcaccactgcactccagcctcagcaacagagcaagactgtctcagaagcaaaacaaaacaaatcaaaacaaaaactcggtaaacaaagggacagagccagcatttttcctgcctttcctattgaatgaacagaaacattcaatttatccatccgtaaatgtgatgccttttccacttcaactaagcacttacgtattgtggccttaacttttgcagtttgagatgcaacagcaaaactagcatgatttctttttccttcttcacagtgtcaccgatagagtcattcttaaccacagatcttagcaatctcggcatatgatttcttttctttccttattgagaaccttcaccttttcatttaaagggaacactttacagcttctctttggcatatatgaattgccagagtcactattcttgtactttggggccattaggaagtaaaatagggtgacttgaatacaagcactgtgatatcgtcacagccaatctgataaccaagaaggttactaagtgactaatgggcagggagcgcctacagtgtggttcagctggacaaaaggaggactcacatcctgtgcgggagggagcaggatggcacgagatttcatcacgctactcaaatggcatgcaatttaaaacttatgaattgtttatttctggaattgtccatttaatattttcagactgtggttgaccgaatgtaactgaaacaacgaaaagggaaaccatagagaaaggggagctgctatagttgttttttttaaaccattatgaacacatggatttaaatatctttgaagggtttcattctatcgtaattattatccttaatgaagctcaagttgtcccatcttggccaaaattgcctcttgtgtccccttggcagaactgtagttgtctttgttagcttccttgctatcttgtatgacaagatgctataaagtatatcactgacttttggtaggatgtgatattgacttaggaatagacaaatatgttgatggaaataaggaatgggataattcataaggttatgcaatagatatctgtttttgttgttgttgttgttgctgctgccggcatttatcgcacttcctacaaggacagtttcacaaaatttatttgagatattactcttcattcatttagccttattgaagtgtgttgaagggactgaccccgtctgcagctcgggctgccttgacgtcagtatatccagttaccctgttgggagtgactagtttataaatgggcatggccagagccaacgggagatgagaagacattcactgggacttctaggaaagacattaggataattggccttccatttggaggaagatgctaaatttctacttcttaccattggcaaatattaatagaagtgaaattaaaaccctagaagagtctatgattattagaagaggcagaaaggcaaaaagccatattgatagattgataatttgattacatgatgtcggaactatacaacaccatgaaaaaaattaagacaagcaactgaatagaagtagacatgttatatacataacaaaaaacttgtgtccagctcatgcctgtcatcccagcacttttggaagccaaggcaggcggatcacttgagcctaggagttcgagaccagcctgggcaacatgacgaaaccccctctttacaaatgatacaaaaattaaccaccacacccacagtcccagttactcaggaggctgagatgggaggatcacttgagcctgggaggcagaggctgcagtgagccatgatcgtgccactgtactccagcctgggtgacacagtgagacccggtctcacaacaaacaaacaaacaaacaaaaaccttggccgggtgcagtggctcacgcctgtaatcccagcagtttgggaggccgaagtgggcagatcacctgagggcaggagttcgagaccagcctgcccaacatgtcaaaaccccgtctttactaaaaatacaaaaaattagccgggcgtggttctgggcgcctataatcccagctacttgggaggctgaggcaggagaatcacttgaaactgggaggcagaggttgcagtgagccgagatagtgccattgcactccagcctgggtgacaaaagcgaaactctgtctcaaaaaaaaaaaaaaaacaaccaacaaccaaacaaccaaacaaacaaaacccttatgtccataccacagtaaaccttctatatgtggataagaaaaaaggcaaatcaatagaaatatgtgcaaaatatatgaatagatcatttacatataaggatctgaaagggcaacccccttccccaacatatgaaagttactctacctctctaatagtcagtaaagcacattttaaaacttggtacatagtaggatataccaaagtttaaccattcccctactggtggaaagttagatcatttaaaacttattattacatacaatgctcattgaagatgtgtcttgcctctttggaacatattcgtgcttttgagatgttaaaccttataacctaaacctagaatgtgatagcaaacatcttggtgtctgcgtcctgaatagaagttatatattatgtgaacatacactaaaatttagcatcagagtgttctttgaattgtatttttaatcatgtgcttaatctaatacacttgggaactactggaacttttgctggtcagattagttcaaacagttagaaattgttctctttccttgaaataaagctgattgaaggattatgttgtctgaatagctgtaggattcagaaactcctttataaagacttactttatttttaggtttaaaaatatccatgatttcttttggattaatggtctaaacatgcttatttgactaaagccttacttttttatttatcatggctatagcttgtttgttgttcattagttgtaagtgtgttccagggagaggaaattgtttaatctctactcagtagggaaagaaaatatttatcaaattcaaaatatgtatgccttttgttcaagcaatttcaatttgaggagtcttccctacagaaatactcataagcatatacacacacacatactcacacacaaggatgttcactgcaccattgtttctaatatataattcagttgaaaatatgataaatgtctatcaacaaaggaatgaattagcaaatcatgacctgtccctaaaatgagtgacagccacatgtatcaccttggaaaaatgtctgtatatgagagggtgctggaagggaacagaactcacccccaaatggtttgaatgaacatatatatatacatgaacatatacatatatgtatatgtatagagagagagagagagagagagagagagagagtcttgctctgtcacccaggcctaagtgcagtggtgtgatcatagctcactgcaaccttcaactcctgagtttaagcaatcctattgacccagcctcccaagtagctgggactacaggtgtgcaccaccaccatgcctggctaattttttgaatttctttttgtagaggtgggatcttgctatgttgcccaggctgcaaatgaagacatttttaaggaagagtttacttacagaggttaggtgccaagcaaacaaagaagggatggtgaagtgcctagagactagcaatggtggaaagtgatgcccattcctaaggcctcaggtacaaaggagagggcatagcacagtaggagcccagtgaaatttggaaccatggaggcagggccacccagggagttatagctaaggatggagacagccactgcaaaagacagagctgatgcaggtaggaaacaaggaaggaataccctgactttttaaaattaattaatttattttttatttttttccgagatggagtcttgctctgccactcagagctagaatgcaatggcactatctcggctcactgcaacctctgcctcccaggttcaagcaattctcctgcctcagcctctcgaggagctgggattatagacgcgcaccaccacacccagctaatttttgtatttttagtagagatggggtttcaccatgttagctaggctggtcttgaactcctgacctcgtgatccatccacctcagcctcccaaagtactgggattacaggtgtgagccaccacgcccagccttaccctgacttttttccttttattctctgatattttgctgcagagacctctgcagtgacctttgattggctgaacccactcggaaacatttggcatgggagcctgagtaaagtggtccactggccagagagaaaggacaaatatggcccatgaagatagagaatgactagcatgatgttttgagggtatttttggttttgaaatcaattagcctgggcgccgtagctcacacctgtaaccccagcactttgggaggctgaggcaagaggatttcttgatctcaggagttgaagaccagcctgggcaacatagtaagaccctgtctctaaaagaaaaattttaaaagccgggtgtagtagtcccagctactccagaggctgagatgggaggattgcttgagcctgagaagcagaggctgcagtgagtcatgatttcactctagtctgggtgacagagcaagaccctgtctcaagaaaaaaaattatttttaattgacaataaaagttgtatatactcattgtgcacagcatgatgtttagatatatgtgtgcattgtgagatggctaaatcaagctaattaacatattcattacctcacatttttttttgtatgcggcgagaacatttaaaaactaccctcttaacaattcctaagtacaattatccccccatatccaagaaaaattggttccgggacaccctgtgaattccaaaatttggggaatgttcaagtaccttattaaaaaaagtgtagtatttgtgtataacctatgcacatcttccaatatatagttggcttttgttatctgtgggttctgcatctgtggattcaaccaaccagaaattgaaaatattgtgtgtggggggggggaaaacaatacaacaataaaaaataatacaaataaaaagcaatgaagtataataactatgtagcatttgcattctatcaggtattataagtaatctggagatgatttaaaggatagggaggatgtacataggttatatgcaaacgctataccattttatatgggactttagcatcctcgcatttctgtatctacagggggtcctggaaccaatcccccacttatatgagggggatgtctatactttaaatcatctctagattacctataataccttatataatatgtgttatataaatggttgttatactatctttttaagtttgtattatttttaagttttttttcccaaatatttttgatatgagattggtagaatcatggatggaaaacctgaggatccagaggactgactatatatagcacattatttttatttatttatttatttatttattgagatggagtttcactctgtcacccaggctggagtgcagtggtgtgatctcggctcactgcaacctctgcctcccgggttcaaacagttctcatgcctcagcctcccaagtagctgggattgcaggtgcctgccaccatgtccggctaatttttgtatttttagtagtgacagggtttcgccatgttgggcagggtagtcttgaactcctggcctcaggtgatccacccatctcggcctcccaaagtgctgggattacaggcatgagccaccgtgtctggctacagtacattattaactatagttaccatgttgtacaaaagatctgttgaatgtattccccctaaatgaaattttatatgctttgaccaatatctccccaattctccctgatgatgtttatgttatgttttttaagtggaaaaaaagttgcatagcaatatataatatgctatttttgtaaaagaaaaccacaaccacatatgtgaaatgcacatggttgtataaacatcagcattatgtaagaacacatagcaaactataaacctcagtattacctctagagggtgaaaacagatggagaaggatttatttctaactttctatattttaatttttataatatattttctatttctactaggtgtgggctttattggttgatttctcggtgagtgcgtttccaagtgtgaagggacccttcctgtagtgtcttatatacaatacagtaggaatgttccttctttgccactcatacacctttatgtgcatctcacatggtgttcttccccaggtggatgtgattctccatgccagtgaagagtaaggaaggccacagcatggtatggggatagaataaactctgctgggctaacaaataaaccctgaactctcaatggcttaatgcaataaagatttgtttcttattcatgctgatgttcctggcctgagagttcaccagagcagctcttctctaagcagcaaattcagggatcagggcttctcccatcctgtgcatctgccatcttggaaccttcatttccagccatgtagaggaagagagaaggagcctgagagactgggagaggagttttatgcaagggagtgctgggaaatgtagtcttcctggttctgcaggctgtataagaggcaaagaccagcatctgcttctgatgaagggctcaggaagcctccaatcatgatggaaggtgaagaggaaccagagaggaaggaatgaaagtttcattttaaaaattagagatgaggtcttgctatgttgcccaggctggactcgaactcctggggtcaagtgatcctcccaccccagcctcctgagtagctggaactacagtctcatatcaccacacccggctcaatatatttttatattatagaaatttgttataagaattatgcattttttgtgattaaatgaataaagataaactatattttgcataaaaagaaagcactgttacacttaaggcgaagacaaaggtaagaaaacccctaaatggttattaaacatttaattcacttaagggcactgcagagaggaaacacttttagaaatctatgttaattctgttaacattaaagccaaagtgtaggctgggcatggtggctcaggcctgtaatcccagcactttgggaggccaaggtgggaggattgcttgagcccaggaattcaagaccagcctgggcaacatggtgaaaccccatctctacaaaaaatcaaaaattagctgggtgtggtggcacaaacctatagtcccagcttctcaggaggctgaggtattaggatctcttgagcctggtaggttgaggctgcagtgagccacgagtgcaccactgtcgtccagtctgagcaacagagtgaggtgctgtctcaaaaacacccaaaaaacaacaagaacaaaatgtcaaagtcaaagagtagatcttctgtgctctagtgttggttaggatcctctgttgcaaagatcagaaatcaagtcactcaaggaataaaaggggagttgaaaaaataggaatatatgaatggctcataaaatggaatgatggcaggaaataaaagttaagactctctgtttgcctctcaggaccttatctcttaattttctccagtaaacaaaacaaactttctctgctcttgggggaatataatgggaataatatggctgcttcacagatcctgagttccatatttcagttccagtcattgagaagactgcctcaactctctttaggtccatattccaaaatcttgaaagaatttgattggcaaatttggtttggatgtctacctttagtccaattagctatagtcagtgggcaggatcatgtaatatagtaccaagatactggaatattttaaatggagataaagagatgttgtcaggttaaggtgggggccataagttcccaagctgcctactacagttgcacaaaggacaaagaatattatagattgatgagctaaaaatcacttttgcattgccccacagctaaaaaatttaaaaagagatttctgagagagccataaaaaggcaatagtaaaacactgatataaaatcagctggggccagacagggtgactgacacctgtaatctcagcactttgagaggctgaggttatctgcctggatcacctaaggtcaggagtttgagaccagcctggccaacatggcgaaaccctgaccctactaaaaatacaaaaattagctgagtgtggtggcacgtgcctgtaatcccaattactcaggaggctgaggcaggagaatcgcttgaacccgggaggtggaggttgcagtgagccaagagcacactccaacctgggtgacagagtgaaactatgtctcaaaaacaaaaaacaacaaaacaaactaaaacaacaaaacaaaacaaataaacagaaaaaaagaattagctggtaaatcagctggcatatactatcagaataataaataagagttggccccctgggctgggtgcagtggctcatgcctgtaatctcagcagtttgggaggccaaggtgggtggatcaccggaggtcaggagttcgagaccagcctaacaaatatggtgaaacctcatctctattaaaaatacaaaaatcagccgggtgtggtggtgcatgcctatagtcccagctactcaggaggctgaggcaggagaattgcttgaatttgggaggtggaggttgcagtgtgccaagaccacgccagtgcactccagcttgggtgacagagcaagattccgtctccacaaaataaataagagttggccctctgtatttgtgagttctgcatttgtgaattaaaccaaccactgattggagttattcagaaaaattaaaaacaaccgtacaataataaaaataatacacattaaaaaattggccaggtgcggtggctcacacctgtaatcccagcactttgggaggccgaggtgggtgggtcacttgaggtcaagaggttgaaagtagcctggccaatggggcaaaacccatctctactaaaaatagaaaaattagatgggtgtgggggcccgcgcctataatttcagctactcgtgaagctgaagcatgagaattgcttgaacccgggaggcggaggttgcagtgagatcgtgccactgcactccagcctgggctacagagggagactatgtctcaaaacaaaacaaaaacaaaaacaaaactagtataacaactatttacatagcacttacattgtattaggtattatatgtaatttatagatgatttaaagtacatgaaaggaggtgagtaggttatacgcaaatcctatgccttttttttttgacggagtctcactctgtcactcgggctggagtgtagtggtgtgatctcggctcactgaaacctccgcctcctgggttcaagtgattcttctgcctcagcctcccgagtagctgggactacaggcacgtgccaccatgactggctaatttttttatttttagtagagacgggggtttcaccatattggtcaggctggtcttgaactcctgacctcgggatctgcctgcctcggcatcccaaagtgctgggattacaggtgtaagccaccgtgcccggcctactatgcaattttatacaaggatcttgaacttctgtggattttggtatctgtggggagtcctcaaaccaaactcccatggatgctgagggacaactgtacaaatattgaacaattgaaaaggtcacagataactagatgtaaaaaatagttactggcttgaaaaaaggtaagaatacctgataattgcaccacattgtgtaggtctcacagggtttccatattccctttccaatataataaataaaaccttgtaaaagcaattgaggctgagtgcagtggctcatgcctgtaatcccagcactttgggaggctgaggcaggaagatcatttgagtccaggagttcgagaccagactgggaaacctagggagtcccaatctctacagaaaattaaaaacaaaacaaaacaaaacaaaaaaaccaaccaggtgtcatgcacctgtggagtcccagctactcaggaggttgagttggaaagattgcttgagaccaggaattcaaggtggcagtaagcgctaatcacgccactgcactccagcctgggcaacacagcaagacctcatctcttaaattaaaaaaaaaaaaaagcaattgagtctcaataagtcaagtcacttgcttgaagtcacacacaaaccacagacttaggactcaaactcctcgttttcactttatgtgcagaggcctaacttatagaaaatgcctcctacctttttcaaaggtagtttacttttttttttttagcattgaaagtaaaggcagaaatgacttttaaagtgctacattttcagggaaaaaaagtggattaggaacattagtttccattctggcatgtaaggagctcagaagtcactactcctggctgggcaccgtagctcatgcctgcaatcccagcactttgggaggctgaggcaaaaggattacttgagcccaggagttcaagaccagctggagcaacgtggcaaaaccccatctttaccaactatacaaaaattagccagtcgtggtggcacatgcctgtagtcccagttacttgggaggctgaggtggaaggatcacttgagcctaggcaattaaggctgcagtgggccatgattataccactgcactacagcctgggcaacagagcaagacctccagctaaaaaaaaaaaaaaaaaaaaaaaagtcaccactccatcttagcaagtaaaaagctgagtaaactgaaaaatcaacagctcttcttagatccataagagatgggaggtcatagagtaaaccccaaattggaaacacaggtgaatgcagataatcacaacttaattactggagcagaaatcttcatgggaatcagtgctggagtgggaaaacctgaactgtaattgacaaattgctggaggcttggtgtggacaagtctgtgagataaaaactttattgggaggctcccacacttttgtagttttacctccaggggctctactaggttctcacagtgaattttgcaaacgatcctctcatgcttccaacaaggggagaggaaaaggaaccatcttgaaatgccctagagcattctgttcttaagaacaaggtcttccctcaggagaaattacttaactggagcctaacctgctggggttttataacagcctaactgatctgggggaagggaaatacccaactccagcctagtctagctatgttgtcccacctaaggagagggggagactgagaagcacctgtgaagttcacagtccagagacataggctcactaaaagactgagacctaattatcggactgtagaatgcttcctttccctccacaccttgccaccacattactaaagtcctatttacagtagtttctttagcccaaaacatcatgcctggctatcaagaaaaaattacaaagtatactaaaaggcaaaaaaacatagtttgaagagacaaagcaagcatcagaaccagatgctctggataaagtagacagcatgcaagaacaggtaggcaatgtaagcagagaaatggaaactataaaaagaaccaaaagaaatgttagagaggccgggggcggtggctcacgtctgtaatcccagcactttgggaggccgaggcgggcagatcacgaagtcagttcaagaccagcctgacaagcatggtgaaacctcgtctgtactaaaaatacaaaaattagccgggcatggtggcacatgcctgtaaccccagctactcaggaggctgaggcaagagaatcgcttgaacccaggaggcagaggttgcactgagccgaaatcgtgcctttgcactacagcctgggtgacagagcgagacttcatctcaaaaacaacaacaaaatgttagagataaaaaacactgcaatagaaatgaaaaatgtctttgacgtgcttattagtatactaaacatgctgaggaaaaaatcgctgtttgaggatatctcaagagaaacctcccaaactgaaaaacaaagagaaaaaaagactgaaaaaaaaaaaaaagcaacaacagaaaagaatatccaggaactgtaggacaactacaaaaggtataagtgtgtaatgagaataccagaaggagaagaaagagaatacagaataaatatttgaaacaatagtgattgagaatttccccaagccagtgtcagacaccaaatcacagatccagaaagctcagagaacaccaataagaatacatgttaaaaaaaaaaaaaactctacacctaggtatatcatatttacactacagaaaatttaagataaagaaaaaatccatatagaaaccagaggtttaaaaaatcttatagagaagaaaagaattacatccaacttctcctcagacagtatgcaagcaagaagagagtggagtcaaatatttaatgtgttgagagaaaaaaatcccaccaacctagaattctgtacgctgtgaaatcatcctttaaaagtggcacagaaataaaggtcttctcagacaaacaaaaattgggggaatttgttgccttgcaagaaatagtaaaagaatttccttagaaaaaagaaagagtatataggtcagaaactcagatatacattaagaaggaaagaacatccgagtcagtgaagataaaattttaaaaactttatttttcttatttttaattgctctaacagataacatttttttttcagagctttgggggaatttattagagcagattttgtgtatgaaaaaggtgctgggcttttatctaccattagcaggtgtcatgcctggtggcccccttatggccatcagtttgttggccagactgcaatggctacaatagccataagcagcaacaaaatcatcattattatcccacaagaggttgactttctgtccaccatgttcaaatgcctggtttcagtgcaaagtttttcatctgtgttttccagcaaattggcagagatgttaattatctcattttgtccatccaattcattcccaatttcctgccccatttgtttttggcaacttatgatggaggaaatggcatcgaggcctgtgtcctgttctttgataattttctgcttgctattgtcagagttcattgaaacccaagcctcttgtctcctctggctcctcaaagagccaagggttgggcacttcctaacagataacagtttgttcaaaataataatagcaataatgttctagattatatattgcatatatatagctatgtatatttatgtataagtgaaacaaatgaccacaatgatacaaaagatgtgagagagaaattaggattatttctttattataaggtactcacactaactgtgaagtggtatggcatattcaaaagtgactcagattcattgtaaatgtatattgcaaactctggggcaatcatttaaaaaggttagaaaaaaaagaagcataactgatatgctaaaaaatgagaaaaaaataatttatatgaaacgctcaattgtaacaacaaaaggcaaaagagaaaaagagtgaaagataaaaataagaacaaagaacaagaacaacaaatagaaaacaataaaaaatatagtagatgttaaccaaaccgtattaacaatcactttgaatgtcagtggtctaaattcaccagttaaaagaaagagattgtcagactggatcaaaaaacaagacccaactatatgttgtatataagaaacccactttaaatataaagacacatataaacgggtagagaaagatacaccctgacaacactaatcaaaagaaagcagaattagctatgcttatgtcagacagaacagacttcagagcaaggaaagtgggaagaaagagggacattacatagtgataaaggggtcaattctccaagaagacataacaatcctttacccagtgtatgcacctaacaacggagtgtcaaaatttgtgaagcaaaaactgacagaactggaaggataaataaatgaatccactattataactggagacttcaacatccctctctcaggaacggacagatccagtaggcagaaaatcagtagggcatagttgaactcaacaccaccatcaatcaactggatgtaattgacatctatagatgactttattaaacagtagcaggttacatgttcttctcaaagtcatataaaacatttacccacatagaccacattctgggctataaaatacaacttaacaacatttaaaagaatgaaaataatgtaatgtctactctcagaccacaatgaaattaaactagatattaataacagaaaggtagttggaaaatcccaatatacttggagattgaacaatacaattttatttgtttattcttctcaagagaaaattaaaatattttaaactaaatgaaaatgaaagccaggcatggtggtgcactcctgtagtgctactcgagaggctgaggtgggaggatcacttgagcccaggagttcgaggttatagtaagttatgatcgcaccactgcactccagcctgagcatcagagtgatatcctgtctctaaaaaagaaaaaaaaattatatgaaaaacacaacttaccaaatttgtgggatgcagtaaaagcagtgcttacagggaaatttttgtagcattgaatgcgtatatttgaaaagaagaaagatctaaaaatcaataatctaagcttccaccttaggaatctagaaaaagaagaacaaattaagtctaaactaagtagaagtggccagttatggtgtctcacacctgtaatcccagcactttgggagggtgaagtgggaagattgcttgaggccaggagttcaagaaccagggtgggcaacatagtgagacttagtctctacaaataaattaaaaaattaaccaggcatgatggtgtatgcctgtagtccagctacctaggaggctgaagtgggagaatcacttgaacccaagagtttgaggttacagtgagctatgattgcatcactgtactccagcctaggtgacagaccgtgtctgttaaataaataaatgaaaagtaggagaaaagattataaaaatcagaggagaaatcaatgaaattaaaaataggaaatcaaaatctggttctttgaaatgattaataaaatcaatgaacctcttcccgacttaatacttcctataaagctacaataatcaagacagtgtggtattggtgaaagactagaaaaacagaccgatagaatagaatggagagccccaaagtgaacccacataaatatagacaattgacctttgacaaaggagcaaaagcaagacaatggcgcaaagatagtctttcaacaaatggtgctggaaacctgacatccacatgcagaaaaaaatgagtctagacacagatcttacactcttcacaaaaatcaacctaaaatgggtcacagacctaagagtaaaacataaaactataaaattcctagaagataacaggaaaaaaatctagatgaccctggacttggtgattacttttcagatacaacatcaaaggcacaatccatgaaagaaagaattggtaaactggactttattaaaattaaaaaatgttactctgcaaaagacactgtgaattgaatgaaaaggcaagccacagactggaagaaaatatttgcaaaagacatatttgataaaggactgttatccaaaatatacaaagaactcttaaaactcaacaataagaagaaaaagaacctggacgggtgtggtggctcatacctgtaatcctagcactttgggaggccgaagagggtgaatcactttgggtcaggagtttgagaccagcctggccaacatggtgaaaccccgtctctaccaaaaactacaaaaattatctgggtatggtggtgtgtgcttgtaatcccagctactcgggaggctgaggcaggagaatggcttgaacccagaaggcagaggttgcagtgagctaagatcacactgctgcactctggcctgggtgacacagcgagactctaactccaaaaaaaaaaaaaaaaaaaaaaaaaaaagaaagaaaagaaaagtaaagaaaagaaaagaaagaaaacaaggaacctgaacaaaaaatgggccaatgaccttaacaggcacctcaccaaagaagatattggtggtaaataaatatatgaaaagacgtcccaaatcatatgtcatcagggaatgcaaatcacaacagcaatgaggtaccattacatattgattagaatggccaaaatctagaactgacgatactaaattccctgatgaggatgtggagcagcagaaactctccttcatttctggtgggaatttgaaatggtatgatgagtttggaagacagtttggcagtttcttacaaaactaaacatactctcgtcataagatccagcagtcatgtgccttggtatttacccaaaggaattgaaaacttatgtccacacaaaaagctacacacagatgcttaccacagctttatttgtgattgccaaacatcagaagcaaccaagatgttcttcagtagctgagtgaataaatggtggcatatccagacaatgggacattattcagtgccaaagagagatgagctatcaagtcacgaaaagatgtggaggaaatttaagtgcatgtctgtaaatgaaagaagccaatctgaaaaggctacatgctgtgattccaactaatgacattctggaaaagataaaactatgaagacagtgatcaaagatcagtggttgccaggggttaggagggagggagggatgaacaggcgaggtgcagaggatttccagggcaggtaaactactctgtatgagacagtaatggtggatacatgtcattaaacatttttcaaacccacagagcgtacaataccaataaggaaccctaatgtaaactgcagactttgggccaatgtaggttcatgaattgtaacataggtactgctctgtgggcactggcaataatgggagaagttatgcatgtgtgagggcagggagcacggggtgtctctgtatgttccactcaattttgttgcaaatctaaaactgctctaaaaaatagtctaacaaagcaagtttggagaggaaaatagattacataaaatcattttcttacctaattcaagagcaaatagagttgaaaactcaccatagaaactacattttttaaaaaacgattgggtacaatggcttatgcctgtaatcccagcacttttggagaccaaggcgagaggattgcttgagaccaggagttcatgaccagcttaggcaacatagtgagacttcattactacaaaattttctttctttaattagctgggtgtgggggtgtgcacctgcagtcccagctacccaggaggctgaggtgagaggattgcttgagcctaggagttcaaagttacagtgagctatgatcatgccactgcactccagcttgggtgacagggtgagacccagtctcaaaaaaaaaaaaaaaaaaaaaaacacaacaaacaaacaaaactaaattaataaaagcaaataaggagaataataatgaccaactttcagggtgttagaagatacaccccttgcttcatcatattgcttaatgtgaaccgactgaattctactaaaaatagactttaaacaaagttagaaaagaaaacaagtatccaacattctctcacctataacaggcatattacaaattaaaccattcaaatagtctaaaagctaagggaaagcttaagatttatgatgcctctgtagatacaaaacaagcaggtgttataatccaggctgcaatactgttgtagatgtctgagaactcggaagataatgactaagcctgagaaagggccagacaaaggtaattgtttcccagtatcctggaagataagagaatctttatggctactggagggatgtggactcagctgcagtctttctggcaccagaagaaaaggcatgtggtaaactagatatttcgtaatagggcccatggggcaaacgattctatattaatgatatagtgtaggtttcacccacaggatcccaggtgttctgtgcaggtgcgcacacctgtggaggaggaagcggagcaaactttaaactgcacacattaggaagcctgggacagttaaagagttcccagcatcagatatgtccaaaagaaaagcaagtaagattagcaaagatacatgcctttttccctcagcaaaaagcaatgaaggttgagtctccctttaaaaataaaaaatcggattatgaagcagtaacattcaaaatcatattatattgaattaaaaacaggtaaactgtttagtggaatagatttcctagaagtagatattaacaatggtaacaaatcaatataagactagccagcaataacacatctatagaaaagtgtattttttaaataaaaaatgatcaaaattatattcatctgaagaagaattagcacccgctatgcactgtatataataaactccaggtgggtcaaattaggctaaaatgtttattgtggatattttctttttagttttatctaaccatcagtttccctttccctgacatagcaatcccattgtaatttcctagtgtgaaacttctccctgagtatatatgtaatgtgggtgggaaggtcaagttcttttaccatctcccacttgaaagctgaaggccattcacccctcttctccctgcccagtgcagacagtagatgggcacttgacctaagctcagccaacccagtggtcactcctggaactttgattcttaaactgatacaaggacaaaaggaaagagtggttggtcagtttcatcacacaggctgttccaattacaaaacgactgatgtcctttcagtttcttggttctttagaactccatggtcctttcccatgttcaagtatgtgttccctcagtctcatagcaataattcgcttatattagccagagcgagatttttactacaagttgagtattccttaaccaaaaggtttgggactagaagtgatttggatttcaattttggcaggattttagaatatttgcattatatgtttaccaattgagcatccctaattaaaaaatctgaaatccgaaatgttccagtgagcatttcctttgagcatcactctaaaatccaaaacttactgagcaccagtgtgacgctcaaaggaaatgctcactgcagcatttcagatttcagatttttgcattagggaaattcaacgtctcaacctgtgtatccagatggagacggcaattccaaagaacaaactgaagaggaagagggtataggaggtggatgatggtgtcacagttcacctggaaatatcttctctacaaggaaaggtgttttttttttttttttttttttttttttttttttttgttgttgttgttttttgagacagggtctcactctatcacccaggctggaatgcagtggtgcagtctcggctcactgcaacctctgcctcctggggctgaagcgatcctcccacctcaggctcctgaatagctgggaccacaggggtgcacaaccacacctggctattttttttattttttatttttttgtggagacaaggttttgccatgttccccaggctggtcttaaactgagctcaagcagtccgccagccttggactcccaaagtgctgggattacaggtgtgagccactgtacttggccaggaaagcatcctgacaatgatctgatggtttacatttcttctgcttgcttctccctgtgggaggcatatacctctctatctttttgcttattttattttacatttttgagacagggtctcagtctgttgcccaggctggagtgcaatggtgtgaccatggctcactgcagcctcgccctcctaggctcaagcactcctcccacctcagcctcccaagtagctgaaactacaggtgcacacctcctcgtgtggctaatttttaatttctttttttttttatagagatgggttctcactgtgttgcccaggctgatctcaaactcctgggctcaagcaatcctcctgcctcggccccccaaagtgctgggattacaggagccagccagtgtgcctagctcctacccctttaatgttgggttggccacaacttgattggccaatagaatgccagtggatgtgatggctaccctgtctgagcagccttaggaatgattagtcaattttgcttccaaaacatattctgtactttatccactccattgcatcctaccaacattagccaaatctgagataatctctgtcaactacttcaataaccttctaactgtctcctggctttagttgtgtacctctgagaaccatccttcacacaactgtcacacaacaatgtcaaattaaccttgtaaggccacagatgaaagccttcaatggctccctctttcccacatggcactggaaagctgtcatgacttgtcttctacctaccccttaagcctcatcctttggccttccctgcttcccactttatgttcagcaacactaaacaccctggacactcctccattcctttgtccattctgttcctttgtccagactgccctcctctctctcctaatttttgtccaaataacttctgtttgactctcaagattcagctcaatatcagtgctcccagaaagtcttccctagtacttcctgggcatgtatttgccctgtgctttcttggtaccagcacacaccccggcacttccccaccttaaatttaaatgatatattctgtctttttctcttccaatagatttgccgtctcctggagggcagggactatatcttatttagcttttggtccccagactctagcctgatgtctggcacacagtaggtgttcaatacacattagtggagctgaaatcgaacaaattaaacattaatataagcaaattctgaaagccttctgcctctattcttacaaaagctggtggcattataaatgggttcttctggaaagcaatatagcactatataacaaaaacgatgaagatggtcattctccttgacttggtattttcccgtttgtgaatactcctcaaagaaataatccaaaggaaaaaaaatgtacacagatgtcctggcaactctagttataacagtgaaaaacctggaagcaatccaagtgtctaacagggaaatgactaagcaaacaatgggattattacatagctattaaaaaatgacagaggtgaggactatgtcaacatagacaagtgtgtatctatctgcaggaacgttaagtagaaaaaagaacacaggctagtgtttaaacactagtgattaaggatgtgtgtgtacattaacaaagattggaggctaatttggaggaatgaaaatggctggagtgcagtacttgttgagtctttattttcctgtgcagttccatgaatttttgacaataatacttgagattccatgcaatatagatatcctagaggtcttctgcagaataagtattctaagttataccaagctgtatagtccaagagaaaattttatgttaaattcttataaaattgttataaaataatgatatttctttaagtgaacaaagcatttttctttagttaaattcaacaagcaactatgagagcttgactatgttctagagcacttacattctggggaaattcaaagaaatcatgggcaaaaatcctcaggtgaatatgtgttattattttaatttgctttttttttttttgagacaatgtctggctctattgcccaggctggagtgcagtggtgtgatctcggctcactgcagcctcacctcccaggctcaaaccatcctcccagcttagcctcccaagtaccaagtagctgggactacaggcacacaccaccgaggcgcctgcctcagcctcccgaagtgctgggattacaggcataagccactgtgcctggccgaatttatttttattttggtgaatgtacatattagaacagatgacaaaggaaagtctgcaagacctttggactaaacctcacatttacaagttgtctcaattttattttttatttcaattttatttatttatttattttgatacagagtctggctctgccacccaggctggagtgcagtggagcaatcttggctcactgcaacctctgcctccggggctcaagcgatcctcccacctccaccttcccagtagctgggactgcaggcacaggccaccacacacagctaatttttgtagtttttgtagagatggggttttgccatgttgcccaggctggtattgtattcctgggctcaagtgattcttccacctcagcctcccaaagtgctgggattgcagggtcaccatgcccggcctgaattttatatttttgatgtctccaaaagaggtcctatatttagtcactgagatatacagttaagtattaaaaggaaaaagtcatcatcacataactttaaacttgtgccacttttccacttggtgcactatgaattaatattttataaatcctgtgactatattgtgaatagcaaaatactgacataagatatattacattgcaattaaaagaaataagccacaattttttatattccattatagaatttcttcatttttaaaaatcaactgagaggctaggcactgtggctcacacctataattccagcactttgggaggccgaggcgtgtggatcacctgaggtcaggagttcaagaccagcctggccaacatgatgaaaccccgtctctactaaaaatacaaaaaattagccaggggtggtggcaggcacttgtaatcccagctacttgggaggctgagacaggagaattgcttgaacctgggaggcggaggttgcagtaggctgagatcgcgtcattgcctaggcaacaagagcgaaactccgtctcaaaaaaataaaaaataaaataactgagagtctcaaaaaatggaggtggcccagtcctctgaaaggccttgagcgtaattatcactttatctttttttttttttttttttgagacggagtctcgctctgtcgcccaggctggagtgcagtggcatgatctctgctcactgcaagctccacctcccgagttcacgccattctcctgcctcagcctcccgaatagctgggactacaggcgcctgccaccatgcccggctaattttttgtatttttggtagagacggggtttcaccatgttagccagaatggtctcgacctcctgacctcatgatctgcctgcctcggcctcccaaagtgctgggattacaggcgtgagccaccgcgcccggcatactttatctttaaaatgtaatagttttaagtaggggcctaaagcaaatgggttgttgataactgtataaacacctcctaacatagtcctttccgctagacttactgtttctgctgccatgtaactggtggtcagaaaactaccagttctggctggccatggtggctcacgcctgtaatcctagcactttgggaggccgaggtgggcagatcacctgaggtcaggagtttgagaccagtttggccaacaatgtgaaaccccatctatactaaagatacaaaaattagctgggcatggtggtgcgtgcctgtaatcccagctacttgggaggctgaggcaggagaatcgtttgaacctggaaggcggaggctgcagtgagccgagatcgcaccactgcactccagcctgggcaacagagcaagactccgtctcaaacaaacaaacaaacaaacaaacaaacaaacaaacactaccagttcctagagcagtggttcacaaacctggctgcaggtaggaatcacctgtattctcccagatcccactccagacctcttgaattagactctccagggctggggcctgaagattcctatgcttaaaaagctctttctcgtccttcctacactgaatttcctcatggttcgaggactcagaattcaaactagtacagctaatgccgcggttcagctgcatcaagagtttaacacagtgacaacttgtctctacaaaaagtcaaaaaataaggcaggaggattgcttgatctcaggaggtcaaggctgcggtgaggcgtgatggtgccattgcactcccacttgagtgacagagtgagaccctgcctcaacaaaacaaaacaaaacaaaaaaagagttgaacagatctgaaggctagtttgaaggccaactaccattttcagtgtagtctctctagggtgatgtgttggaagtgcccaacaaacaatttaaaagagaagtctgaggatgtggtccacagatttttttttgtggaaactgaccacacagaacttttgaacaaaatgccttcatttgttcctaaaatttgttattgtgtctttactatatgaaattaaacaaatgctggctgggcatggtggctcatgcctgtaatcccagcactttgggaggctggggcaggtggatcacccggggtcaggagttcgagaccagcctgtccaacatggcgaaaccccgtctctactaaaaatacaaaaattagccaggtgtagtggtgcacgcctgtaatcccagcttctcgggaggctgaggcaggagaattgcttgaatctgggaggcggagattgcagtgagctgagatcatgccactgtactctagcctgggcgacagactgagacgccgtctcaaaaataaataaataaataaaagtaaacaaatgctgaattgaatcgctaagttcaagtgtcagttcttataaacaaggtgaagtaccagttgggttttttgtttgtttgtttgtttgtttttggagacagagttttactccgttacccaggctggagtgcagcggtgtgatctcggctcactgcaactgctgcctcccaggttcaagtgatcctcctgcctcagtctcctgagtagctgggactacaggagcacgccaccacacacagctgttttttttgtatttttagtagagacggggtcttaccatgttggtcaggctggtctcgaactcctgacctcaggtgatccaccagccttagcctcccaaagtgctgggattacaggggtgagccactgcacccggccccagttggtttttttttgttttttttttttttgctttttttttgagacaaggtctctatcatccaggctgtgttgcagtggtaccattatagctcactgcagccttgacctcctgggtgcaagtgatcctcctgcctcagcgtcctgaatagctaggactacaggtgtgagtcactatgcccggccaatttttaaattttttgtaaagatggggtctcattatgtcaaccaggctggtctcgaactcctgacttcaagcgaccctccctcctctgcctcccaaagtgctgggattataggcatgggccaccatgactggccaaagtaccaggtttttatgggcagtaaaactttagcccaaactgtcaattaactcaattttttttgcctccataaagaggcaaatacaaagaaaatgggctttcaacacagagaaaaacaaattccaagatatgggctgaggtcagtatacacgctgtctattttcctctaccttctggttcttcatcccacctctgtactatgatattgatgctctgaggaagaccctgtatcccagcaatattcctcatctataaaataaagatttaattgtgttcctctaaacccaaaacacacaggatgatgtccagggaagttagaggaacatgtgtcagctgaagaatcagtggtatgttccctcttgtctacctccccaattcgcgctggcccacatcccatttggagtgaccatgtctatggagatagaggaggatattcttccacttctaacctcaaaaggacacactggaggcatctagattgaggttacagctatcctttgaggagctgtaacaagaatatttggaagtggaccaaatctagaataatcaagtttgaaaggactatggttgtcctttctgttgctactgttgttatactgtgttgataaatacaaagtatagtcataaaggtgggggatttaatcatgttccagaatgatacggctgttaaggctttccaggtaagccagagagttgagataatccttattcaagtgagaaacgaatttggccctccttatctggaggagagggttagaaggacgatggatggatttggggacatgtagtaggactgaattcctaggctgagctccaaccacctctgaatgccccagagatatctatgttccatctggtctggtctgcagcaagtccacagaagctacattcacttttctgtgctgaattatcaaaataattgcccttcagcccatgcctcatgaccctgtagacagaatccactcatttccctatcacatgggctacaattgctacttcaaatgaaaacctgggaagccaatgccctattgtggttgaaagtgtacaattagctcctcatgcagcctgaccccactgatttttctgatgcatgtgacctggagtgtgccctttctgagaccgccaatgtcttctccacagctggagatgcccaaaactgcacgcagcacttcctgtgggtgtggccttgcattcttaggactgcagggtacccgctgcatgccaaatgatcccaggctccagccactcacagattcacaacgcttttaaaaatacagcagtggagtatgagcggctatgtcagatatgagggttttccaccccctcccttttcttttaaaatatgattttgtaatggtggcctcaagaaacactataattggtcagcctggggtgcgtttgaaggccttctctatcgcgtcattagctattctcaggaaaggcagggtatcccactgggagaatgacaacacacttgtttcaagttagggaagagcctgtggttctcttcctgcgttcaggggaaagcgaacacacaatgttcgtttcctaaatacgggatgtgctgtgctggcaggtcattttccaccatgtcacgtccttctagatgaaggcagcaggggtcatgacaggaaatggcaaattctcagaatgagacaaggctttcccagggcagccattggttctctggaactataaagcacactcatccagaaacagcctcagattttactttcctggaggcagacagaagtgaatggtaagtggggaaccctgaggcatatattcgggatgactttttctcattttctcttttcacctggaaaattatccctggtgggttggattatggaagcatggaagtaaaattaagtcctgtgaataaggagatgaggattctagactgggctctgtgaagaatcagctgcttctagaatctgatgtctgatgcaggcaattcttccagatgagaatgatttctgccctgatagctcagttttgaaatgctctatttctatggctcatttgccacttttaagaagttcctaataatgaagagtacagtggacatgaaggtgggaatctgcaactaggatgaatatacttttcccccaagatgtacaacttgttcgtatctttgtcagtcatcttcagttggcttcaacgtggtagaagttgttgaacaaaaattttggccactttattttattcaaccattactcatttttaaaagaaaactttcataacaaagagacataatggtattaatttaatgtgacttagtttaaatcaagcacccagcaaagactgatgtttctgaagatccaaggagccctagttagaataaacagtgcaaatctcattttaggcttgattctaagaaaagagcctggaagaatcacaagcagaagagttgcttcaggcaagcatctaacttagatgtttcttctgcttggtagaaaatacgatttttgaggttttggtgaagtctttttcattcattagagagagagaaaagtgtgttgcaaaactcctaggatccaattttcacatgatgaaagggctttgtaaactgtacaacccaccacttacaaagtgttatcttaagtagagcaaaggcctcagtactggagaagccttctaataccacgcccctcccagtttaaatcttatttaacacatagctgatgaagcccatcgttaacgttccctgggagagaagcagaagatagcattattcctatttccatatgcagagataaggtcctgagaacttgtgtggctccccccggattccagaacaggtctttgagaactcgtctcatgatccactggaaacagacccgttcccctagcgtggcagtggctgctccgctgaactcgtgccaagttcccgctggcgtccgggcagcagggcgggagcggcggctggcacggagactccaggctgaccgcgtgtctatgtccccgcagggaatggagaggccggcggcccgggagccgcatgggcccgacgcgctgcggcgcttccagggactgctgctggaccgccgaggccggctgcacggccaggtgctgcgcctgcgcgaggtggcccggcgcctggagcgcctgcgcaggcgctccctcgtagccaacgtggccggcagctcgctgagcgcaacgggcgccctcgccgccatcgtggggctctcgctcagcccggtcaccctggggacctcgctgctggtgtcggccgtggggctgggggtggccacagccggaggggccgtcaccatcacgtccgatctctcgctgatcttctgcaactcccgggagctgcggagggtgcaggagatcgcggccacctgccaggaccagatgcgagagatcctgagctgcctcgagtttttctgccgctggcagggctgcggggaccgccagctgctgcagtgcgggaggaacgcctccatcgccctgtacaattctgtctacttcatcgtcttctttggctcacgtggcttcctcatccccaggcgggcggagggggacaccaaggttagccaggccgtgctgaaggccaagattcagaaactggccgagagcctggagtcctgcaccggggctctggacgaactcagcgagcagctggagtctcgggttcagctctgcaccaagtccagtcgtggccacgacctcaagatctctgctgaccagcgtgcagggctgtttttctgagaacatcctttccccctaatgaccgaggccagcaaatcatcctcatgggatgctccagaatttgtagctcccttaggaaaacaccaagctgggttaggagccgaaggcaaaggatgagaaaaactgtttttgaagtgggcaggtccccaaagcccttcttttcccatcactgtgacatctgcctgggcttgagtgctacggacttttcagtcttcctagtggaaaaatgtgacccaaaaactctttttcctttatcaaaaactttctgtctaaacacagctgggcaggcactcctgttttaaagttatttcggggtccctgaccctgccctggtggcttggcctgagactggagagagtgccatcctctgggtcctctccaagtcctactagtctttgaagtcctcaaaatgtgcgtgaggaaggcgtttgcctctattccagaatttctgatacaaagaactccagaatccagagcaaatcagcccttctctgaacgttgtaggatggttcagaacccagagaggaccctggtgctgatatctcctcctcttccctttcccctcagcttacttactcccagatgcggcctgggtatgaagtaggcctttcctgagtggctcccaatccagtcctccaagtactcagaggggaagcccgtgaagccgtcatctaagtcctgctccctcacatgaagctgagggccagatagatggagcgactgccaacttcatttcccgacatcattgtgttcagaagagagtgatgggttttgagttagacagtcctgggcttgagacaggctttgtcactactgtgtgagtgtagccacctaatctctctgagactgtgtaaaacaaagatgataaaatctcaccctgttgtgagatattaaatgagccaaagtgcctagcatgatggtgctggctcatatagtgtagtccctggaatggcaaattaacatcacccaggaacttgttagaaaggcaaattcttggacacaaccctcctgatttatggaatcagaaactctggctgtggggcccagcaacctgagtttaaacaatttctctgggtggttctgcggcacactaaggtttgaaaatcactgcaacaaatgctaacttctaatccccttgatgagctttcacgaagtctcacggcttctctagggactccatggtcttcagagtcgttcacagatgaccaaggacagactgtgtcccagaagccaaaatgagagagagagagagagagcacgcgtacgtgcaccctggggcagtgtctcaccgtatgaacaagggatgtaacactaaaagcccattagggggcagtgtttcccgcctgttgtagaaactggtacagaaaggaatatgaagttcctgaaactgacctttgtctattattaccttctctgaaaagtgccagtccatgtattttttatttattttaagtttgtaatttaatttttaattattgtttagtgtttgcatttaattttatttaatcaccacatttagaaaataataagagcaagtttctaaatgggagactgctgaggctctttgcaagagatgagattaagtttgagtttctaaggcagggcatgagctggaaatagcattgctttccttgattgtctctctccttcagggagattctttttctctagtgttttaagtgatcctttgaagtaagtgtggagagtcttgaatggcaagaccaggagctgagtttaagcttgtaatggaagcttgcattgtgggatatataactgaggaagcatatttatcctgaaggtattttgccagaaggtatcacttgacctggaaaaggaatctatttagttcaggaaagataaaaagtttagaggtatgtgaaggaagcacttagaacttgcaagcctgatgtcctatcaagttatgtcttctgggtgacagacaaaatcgcttgtcttatggtggtgatgtgttgcattttcactttggggtctgtaagaaactgtcagtgaaaatatgtacaattccttcaatttccattcttaacaactgtaatgttgaaaaataagttgaaaagtctttgggaccatacatgcaaaaacggtgcctctgttacttaattatttaatattctataaatgtacccaatctgtccgcacccttcccagtgatggggcagtatgtctgaggaagtataatttcagtactggggtcggggagaggaggtgatgtttctacatttttattttttctataaattgcaattggtctgtatgctggtttattttgaaatttatattggtttcttttcaagctggtgtcatctcctagactgtttcacccagatgctagcattttttttttttttttgagacagagtctcactctgtcacctaggctggagttgcagtggtttgatctcggctcactgcaacctccgactcctgggttcaagcaattcttctgcctcagcctcctgagtagctgggattacagatgtgcaccagcacacccggctaattttttgtatttttagtagagacagggtttcgccatgttggccaggctggtcttgaactcctggccttatgtgatccgcccaccttggcttcccaaagtgctgggattacaggcatgagccacctcgcctggccagatgctagcattttagatcaaacaattcattttagatgaattgttttgtttcacaatcattttaaatcattttagaatgtacttcacattattagttgtgttatggcataaaggtacaaccattccctaactccatcttttattaatgcttaagtttaaattatattcttccaatgcctaagctattccctagaattaaactgggcacttttggaagcagcaacagtaacagcagcagcaaacttttcctctcatattttgggtgtatcaaaagttctagacttttgaagttatgatttcagtggcccactttatttctaaggaagagtgtctactttggaacgatactttgcacatagtaggaactcaagaaatacatttgaataattataattaactgtttagctatcttaatgagaatttgttgacaacaaaagatcatccatcgccttatgtgtgagtaagattggagcctctatcaagatttagtcaagttcagttagattgattctagaaacaaatatttatttctttcttttacggggatgtgaataaggcttttccttaaggccttcattctttaaacaaacaggttgaaatggtatgttgtaaaagagaagacgggagagaggtatttagatgataagtgtacttcacaaaaatgccaaagtttgaaaaataggtatgtttgttctaaatgtttaagtgcttctctgttaggttctggggcttgcaatcatttgaattgttctgtttcacaataaaggagattcactgggttctgcattttcaggattcaatagaactgctccattaaaaaaataatccttagcaagcattcgaatcctaactgctttgatgcacttgccctcgggcacctgtcatttccaatatggtaggtgtcaaagtcaaaagtatttactgggagaaaaaagagaggagtggttgtagaagtctccctaaatcagacatgtcaagcaatcagccaacgtggtgtatttctcattcaatattttagtgtgaattgagacactgagataaagacatcgtgcagagataaatggggatacagttaaatgtagcaactcttgagttcattttttcccactgtagcaaaattaatgctttctctttattgaaataaattgctcattcctcaaa

SEQ ID NO: 258 - DNA, 10558 bp, Homo sapiens
gcaatctacaaggattctaatttctccacatcctgcatttaagacttgcaaagctgaattaatcacaggatgaggaagtggcttctctgaaacattttcctctttcacattttaaactttctctttcatacatgacatgaaacacagcctacgcacgaaagtgactaggaggaaggatattataaagtgatgcaaacagaaattccaccagcctccatgtatcatcatgtgtcataactcagtcaagctcagtgagcattctcagcacattgcctcaacagcttcaaggtgagccagctcaagactttgctctccaccaggcagaagatgacagactgtgaatttggatatatttacaggctggctcaggactatctgcagtgcgtcctacagataccacaacctggatcaggtccaagcaaaacgtccagagtgctacaaaatgttgcgttctcagtccaaaaagaagtggaaaagaatctgaagtcatgcttggacaatgttaatgttgtgtccgtagacactgccagaacactattcaaccaagtgatggaaaaggagtttgaagacggcatcattaactggggaagaattgtaaccatatttgcatttgaaggtattctcatcaagaaacttctacgacagcaaattgccccggatgtggatacctataaggagatttcatattttgttgcggagttcataatgaataacacaggagaatggataaggcaaaacggaggctgggtatgtgtgatggaaaaattcttcattgttctttcctgtgaaatagaaattgagaatttccttgctagttaaaacaacaacaaaacactttacctaagaatactattttccttgggtggtttgttttaatttttaaaataaaaatatactttctggcttatttccaatgaatccttgaacttgaactttatagttggaaagcacttatgttttcagtttttattcttaacagtataaattacagtagtgagctttggggattaataaagcacctctctcatgcagcttcacaatcagctgtgcacacactctaatctagtacttagcttttgctagggttgtcatgacagtacagacagtacagaaatttctacaatcagcacagaaagttgctatcagatgctgttatttttaggtatttatgggttgcaaaagacaggtgtaaatttttgtaagttcatcgcttacaaattggtgtttttcagtttactaatacataataaatagtaacatatattaatatatagcaaattacattacatataatatataacacattattactaataataaattccgggctgttaaagtttgttgattaaaacataatatactgtatgaccagcaagaacctttattcaagaattttcaaataaaaatttactttattatcagtgcctaaaaaagccaagactatgtagaggcctgtgttgaaactcatgttggtaaaaagcctgacacagctggatgtatatggtttcctttatattccaatatacttaataattatttttttaaagcacttaagtgttcattgatcctctctccaacggccttcacctctcccaagaggtaaccactgttatcaattattttgcatgcaaaacatgcctactgaatctatccatagaaaataaacaatacttctttgtaaaacattttttgtaaaaaaagttttatataaaatgtatatgtatgcttatgtatatgttttacataacatatatgttataccatataacacataccttttttacatatacacatagattttttatgtatacatataaattttgcatacatatttttacatgtgtatatgtaaaaatagtacatggtactaatgctgccacttatttttttacccagaattatttaaaatagtattattaagagtgctgtgtatattctgttatatgtaagtgctgtagagtacctggccatttctagctgatagctgtttaggttatttcgagtttgctgtcacacacaatgcttcattgaatatcattttacgtaaatcttcccttgtgcgtgtgtgtagttttctagggtggatgttgggttgtagatgctgggtcatggtgtacatacattttttaatttgttaggtccttgccctccaaagtggctctaccaagttacactcccatcagcagctcgttaggatatgccccgggattctcctaccccagctgactaacagtaggttgctgcaattcatcataattttcttaatttgttgggctaaaaatatagagtttatcttgtttcaattcttgttttcttgatttctagtaaggttaattttttttttacattttgagcatcttttcatatattaactgatcatttgtaaatgcagggaattgtctgtttacaccctttgcccattttccttttattttgtctttttcttattgatttgtaggaattctttgaatattctggatacaaattattatttttattattgtttaaattttttgagacagagttttcattcttgttgcccaggctggagtgcagtggtgtgatctcagctcactgcaacctctgcctcctggtttcgagcaattctcctgcctcatcctcccaagtagctgggattacaggcatgtgccaccacacccagctaattttgtatttttagtagagacagggtttcaccatgttagtcaggctggtctcgaactcctgacctcgggtgatcctccccctttggcctcccaaagtgatgggatcacaggcgtgagccatgcacccaaattatttttatgtatgtggcagatatcttttagtttgctgattaacgctaatgatgtctttggtcattataaatgtttaaaagtttgttgcaatcaaatttattgatcttttacttgatgcctttttcattttgtttaaggccttcctgcatgatagagcttactgcagctactcccctttctcaatcaccttcttcctggaacttagttctttctaactgagcctgactgaggctgggcgaatcatgtgaaatgttttgtcatgttttcttccggttggctgtgggaggctatacttgaggactggtggaaattcagctgcactgtgtagatttcaggtgaaggcaaatgttctctggcacagaggaccacagatgagcctgcagagaaatactctactagtttgcaggctctatttgggtttggattgtatttccaacgcttagcataatacttggagcacacagacagtgaataaatgttagttaaaaatttaacttctccacaataaattttgtgagctcctggaactcactgttagcaagaggtgtggaattgtctctgagaatttctagtagtaccctcatctttcaagggtggtacagatgtaaacatgagtgtggccggatgaacctctcccgagtgtagatacaaatacacacattgcctgcacgtgcacacactcagcctttctaaagtttccaagctcttttttttttttaaaaaaaacacctgaatagttcaagttgtagacatgaaataaatactcttggaaatgtcatttcaaagcaatctccatgccgctttcccagctcagatgagacattgattctgtcaacgataggcagtgcttttttgagtcagtgcaaactggcatggaaaactgttatcatcttttcatagtgatgttgacaaatctgcttaaatgaatgaatttactcttgaatgattcatttcaggggaaatggcacaatcacacacctatgctggtagagtcagtggcccacaagaagaggtaagagtagagaaggcacttacagctttatcaagatgtgagcacatacaatctataatttaattaaatgttaaaattgcccagagactttatgaaaactttgaatcaacaatgcggtatgtgccgggtgcagtggctcatgcctgtaatcccagcgctttgggaggctgaggtgggtggattacctgaggtcaggagttcaagagcagcctagctaagatggtaaagccctgtctctactgaaaatacaaaattagcagggcctggtggcggatgcctataatcccagctacttaggaggctaaggcaggagaatcacttgaacctgggaggcggaggttgcagtgagccgggattgtgccactccagcctgggcaacagagtgactccatctcaaaaaaaaaaaaaaaaaaaagcggtatgtgagcacagcatagatgttcagagcaccaactcagaatcagacagacctggcttcatttctgggctcgagtgcttactacctgtgtgaattgtacaagttgcttaacttccctacgtcttgtttcctcatctgtaaaaacaggaaaatattgcaacctatgtcctgggactggtataaggatcaaattagttaatatatgcaaagcacttgaaacaattcctgaaaatgagtactcaatacaagtttaggatttttgtttaccatgtaaaacagatcccctaatgggaagaaacgagactggtctatcagtaataggactcataatctctttcgttattctctttctcctttttgtcagttgtctttccttccttcctgccttcctgccttcctgctttcctgccttcctgccttcttttgtttgtggcttctcatctctctttttgtcctcttccatatttaccatggtttcctcctgtccgctctcctaattggaagtgctgagaggatgtgctctcacaagatctgacaggagagctagtgccatttggctgcctccagcattcataaggaaaggatggttcttaaaaaccattagaatgttcatgagatgaaactcatgtctcttctcttgggatcacccttccttttgaaccagatgggtcttcttacttcctcccccttcaatgaagcattctcctctgcatatgctgggggagtagaaagaatgcttggcactcagctccacatgggagaaattgtgtctacttaatgcatcactgtgtacctcatgcctagcatagaaggtaacaatatttgctgatgggatgattcaacgaaccaacactgaaactgaatatttgaactctggttttctcactcactagaggtataaccttgggtaaattactgaggtactctgagactcagattccttatataatgtatataataatatgacatgacatatgataatttattatatatgtaatatttaatgaaaacaatcttacctacctttaaaggaaagctaaaggattataaaacactttttgtaaaacagtgctttccaagctgtcaaatactgtgcaactacgagagtcgtgggaaattccaggaagtttagataggtaattctttgcccttctgaagtaggatgtacagtcagagttggtgctttcccagtaaccaccattttaaaggttgggtcatacagttaggtcaagaggttttttttcttttttttttttttctttgtcatcctcttactctaaataatagtccggtcaatttgaggccaaataaatgggcacacagagacatgtatagatgattaactaagtgttcactttggcaaaggcatttccaaaaggtataaagatctagcagcaaggtgatactatctcaagtgttcatatatatcctttgattaaataagttttggggcaaaattttctatgtcttttgaatttttacttgagactctaaaatcatttagtgaaaaataaaagaccctcaagtcaggcagaaatgtatgacacttaagtgctagttctctaaccttgggagtcagcctggactcctgtctctcatagcccacatccatccatcagcaaatccccctggctgcccctttgaaatgctgtaataccctgtgcatctaggccgccttcctctctcacttgactctgtcagtagcctcctgccagactccatggttccatcctttatctgctagaatttgttttccacatagcccccacagcgatatttttaaaacttgaggggccgggcgcattggctcaagtctgtattcccagcactttgggaggccgaggcgggcggatcacgaggtcaggagatcgagaccatcctggctaacacagtgaaaccccgtctctactaaaaatacaaaaaattagctgggcgtggtggcgcatgcctgtaatcccagctacttggtaggctgaggcaggagaattgcttgaacccaggaggcggaggttgcagtgaggtgagatcgtgccactgcactccagcctgggtaacagagtgagactctgtctcaaaaaaataaaataaaataaaaacttgaattagatcatgtcttggcctaatcataaccctccaagctgcccttttaccctgggaacaaaagcacaaaatcctgactgtggtcctcaaagccctacatgacctagcctctaaccgcctctcaaatctcatctgtgaatccctccgtgctctcatagctccagcctccttggataagctaagcacattccaccctcaaggcctttgcacttgctgctccctctgcctggaataattttccgccagaagtttgcctggcttacttcttccctttgctcaggcctctgttccaaggttgcctcctcagagaagtcttccttgatcaccccaactgagaaagtactactgccactctctgtctccctacccaactttattgccttcataatagttttcatgactggacatcccattgcatatttacttgcttatctgtttattgtctgtgtctgccgtgaaaatgtaagcttagtgagggcagggatcctgtatgctttcttcaccactgtgtttccagtgctttaaatggtacctggcatgtggccaatgctcaatgaatatttcctgaatgaataaatgaataataatgtttagagaagtgggagtaacataatggtgtttgcgtgtattttgtttgtttgtttgtttttttgaaacagggtcttgctgtcacccaggctggagtgcagtggcgcaatcttggctaactgcagcctcgacctccagggctcaagcaatcctcccatctcagcctcccaaagtgctaggattacaggcttgagtcactgcgcccggctgcctgtatctttaaaaattctgagattttgattttctttggactattgatactgtatattattttatgctttaggttttcttgtaaccaaggtagctgaatttaacaaactatcaccattcccagaaataataaggcctgaactattcttatttactactacattactgataggatattgaatccttgtttgtatatttatttttatataatggttttaagatacaaatagcatcattaaagaaaatatatttgaaaataacatttttgaaaggaagaaaagtcactcccatcaccctaacatatccacatgcagacattgtatgcaattataattagggtgcacaagagttttttcctgtgacatattgtagatattttcaacactgtctcacatatttcatgttaacattaggcattaatttctaatgtctacagaatatttcattaatttgttatatcataatttacttaaccaattcccaattgttagacaatttggttttttcgagttttccccttttagatataatgcttcaatactgaagcatgggtatgcttttctggtgccccctaccctccaatattttagaagactgcctcatgataaatttctaacactggaatgactggttcataagatgtgtgtataattacaatactctagcatattggaaaacatattttctttccaaaagtattatatcaatggaacaatgtcacaacaaacttaatgatgtgggtggtactattaataattttgaggtttgctaggcataaaataacaaagccaatttaataggtctaaaaaacaataagactgtgttaaaagtacatttttaactgctattagtgtttttcccatatacttgttaataatttatatttctctctttaatggtctttcccttttaaactattaagggcctgaggattttctgttacatttgaatgaactctttcatgctatatgtaaatattttcctagtctattgttcttttaattttaatttttcatagtttaaaaaaattttaggctaggcacggtggctcatgcctgtaaccccagcactttgggaggccgaggcgggtggatcatgaggtcaagagatcgagactatcctggccaacatggtgaaacccggtttctactaaaaatacaaaaattagctgggtgtggtggcgtgtgcctgtatagtcctagctacttgggaggctgaggcagaggcagaagaatcgcttgaacacaggaggcagaggttgcggccagctgagatcgcgccattgcactccagcctgggtggcagagcaagactttgactcaaaaaataataataataaattttaatctctttctggctgaattcatcatttttttctttgttcactgtcctttcgacattgatgtatataaggtgatacattatgactgctcaatgataatagacaatgatcgttgtcataataataaaaatcatgctgggtgcggtggctcacacctgtaatcccagcactttgtgaggccgaggtgagtggatcatgaggtcaggagttcaagaccagcctggccaacatagtgaaaccccgtctctactaaaaatacaaaaattagccgggcatggtggtgcgcgtctgtagtcccagctactcaggaggctgaggcaggagaattgcttgaacccgggaggcagaggctgcagtgagctgagatcgcgccactgcactccagcctgggcaatagagcaagactccatctcaaataataataataataatttcagagggcctcattatacttgcgaaacatggggtttatgaaaattctaggaaggggagtaatgaagtggatacctcttgagagtgtataggaaactatgagtatgtactggcaggagggaaagaggaagaagagagagggccagtttccttcctctgtcaaggcatgacagcatgtctcagagcacgatgtacacttaacacgtaggcagaaaatggctttcttaggcagtctttcaaatgaaatccccctggctggtggtattcatctgctttgccagtgatgctcataaaatgattccaaggcaccgcagagctctcgagtcactcccaactatcaaagagttatgctcggtttacatttcaatattagttacactgggctctgagctacttgcaggcatttgtaaccccaaggttctgaaacctgtaaggtgaagacgtaaatgtttgccagatgaccatttgaaaaaattattttaacaattttctaattcttttggcacttgtttggaaatgtatggagtggaaagaagtagggtgttcacattctcatccaagtccaggcaccaacgggttggctaatcttagataacttatttttctgggcctcgatttcctcatttgttaaaataatggagggcttcaggctagatgatctcagagatagtttttggtgaggattatttgactacagattgtaaattaactaaataaaatgtccagttaattgggttatcctatatttttaaaactatgtctgatcacaaagagagtagattataaaataaactatcaaccttttcatagcttcaaaggtattagtttaatttggatttactgtgagttctcatgattttcaatacaatgcagtttacagtataatataattcatattacaaatataagtgcattgaaatcaatgttggacaattgaacaagaacgagaaaaaaaaaggctttctatcctctagagctgtgcttgctgtccactatggaagtgaaatgtggctagtctgaattaagatgtactgttaagtactaaatactcattggatttcgaaggtttgttatgaaaaaagaatatctcattaatgattttatactgattacatattaaaataaaaataactctaaaactatcctaaaagttagttttatctatttttttactttgtaaaatatggctacaaaaaaatttaaattacagacgtaggtcacactgtatttctgttagatgctgctgcttaacaggggtagaaggggtagaagattaactatttgcactatttaaatgaaaatatttttgctttttattccagcatacttaatctccaatgatgtttaaagtgttaaatttattcttttataggaaaatggctttgtaaagaagtttgaacctaaatctggctggatgacttttctagaagttacaggaaagatctgtgaaatgctatctctcctgaagcaatactgttgaccagaaaggacactccatattgtgaaaccggcctaatttttctgactgatatggaaacgattgccaacacatacttctacttttaaataaacaactttgatgatgtaacttgaccttccagagttatggaaattttgtccccatgtaatgaataaattgtatgtatttttctctatat

SEQ ID NO: 259 - DNA, 16706 bp, Homo sapiens
tttcctaatcaagaagttggcgtgcagctgggagagctagactaagttggtcatgatgcagaagctactcaaatgcagtcggcttgtcctggctcttgccctcatcctggttctggaatcctcagttcaaggtaagactcaggagtcttgttccccagccatcttctctgtaagccctgtggtccatgcaagtcattatattcattttaaggcatagaatgtataatattgtgagaaaggaggcaaagaagaaggatttggggtcgctgaaccctttaatatgagttctgttaagtttggtaccaagaaaaattaaactctgtggcgtgtgcagtcttgtaaactcttacaatgattgaaatgtgctattttgggatgaaaatgtgaggtttataaattttaaaagctcaaaaaaggaatctagaaaatgactcctgtgcctgttgcatggaggagatggcacctttgactgttggggggtgtctgcctacccctaagtgtctacatcagccccaagttttagtgcgctgtgacggtgtcattgttattttaacactgggagacgttatattccaattggggtgaatctgactgtgtgtattttcttttcttttttttttttttaaagataaacttggttcttactgaaaactcaattatggttagacatagttcatgtaaaacctctcagattttaaagagaaggccaaataatttggtatttgtgctcttgctcagagaagcatcatattcggaaatatcttcctaggtttatctaccatttagtgttgtttagtcagactgaaacaacttaaaacctgtaatgactaagacaatgaaaatgataggcttgtaagaaaaatacaatttgttattctttggcaaataaggaatcatgtctaaataagacggaggtcatggcttgatagagagatggctgaacctatagtagaaaaacactaggttccgccaaatggtaagggaaatgttgagtcacaatgacacacatgtcctagatttgtttcgtcaaagcgacttttggttgtcatgatcttacttccggtggagatgaaatcttacagatgatcgcagagacattcattttatgttggaaatttataaaatcattttcttctagttatgctaatgctgaaaaaagagcaagtaatgtttctggaacgttattaatttatgtatttttaaaatataaaacattgtcaattgtagggaacaggcttcactgggatcttttagggaatatcttcagcttgatgaaataattcccgaatagccaagtggtctgacaagatcgagagtaatgaggcccatactttagtacagtcttgaatggccagatggtgctgggcataccccaaccagagatatgtaagtctttatgttgtcaaaatttcccagaaacatgaatttcccactaagattcattaaggaaaactagaatgaaaacaaaaacgttccttgtataatattcattagaaagaaatgaagaaggccgggcatggtggctcacgcctgtaatcccagcactttgagaggccaaggtaggcagatcatgaggtcaggagtttgagaccagcctggccaacatagtgaaatcccgtctctaccaaaaatacaaaaaaattagccgggcatggtggcacacacctgtcatcccagctactcaggaggctgaggcaggagaattgcttgaacctgggaggtggaggttgcagtgagctgagattgcaccactgtactacagcctaggtgacagtgcaagactctgtcagaaagaaagaaagagagagagagagaaagaaaggaaagaaagaaagagaaggaaagaaaataattcatcatgaaattgtatagaatactagcatttatgtcatgacctcgtaggtttagctctttgttagaaaaggaaaccatagaaagagacaagggagaaactgacaaactagggtgtttccgaaaaaaggctctcagtatcgggctcaagggcttgtgcccacatctgagcatgcagggaaatagatgtcccccactggctgcacatgtgagtgactgcggcacaaggctgtgatgtgaagagtcgtgacaccatttcctcacacctccacgcaatgccagatatgattcgacaacattcttcctgtcttataaaaagtgtttatctagcccgttggtttggcagatgaaatcaactaggcttttggcttgcttttactgagcatattcaaaaccatttcaggtcactatagtggtttgctcgggttgccataacaaagtaccacggactgagtggcttaaataacagaaatgtatttcctcacagttctggagatgggagtccaagatcaaggtgctggcagggtcgatcgcattctgaggcctctctccttggcttatagatggcgccttctcccttgtctgcacatggcctttcctccatgcatccgtgtcttaataccatcttcttagagggtcaccaggcattggatcagggccaccctaatggcctcatcttaactacctatatctgcaatgaccctatttctgaacaatttcacattgtgagattctgtgggttagaactggaacatatgaatttggtggtggtatatttttattataagtcaaacccaagtaaagatgtggggtaagattgtgtttaccaagcacaaagaaatggaaatttggggatgtgtaactctggagagcacagatgactaatctatttaatgtagggctccaggggatttgatgaggcctgtgaatcttccacttttattgcctctcttttccaatgacacccataaagaaaaaaaatggaatatccatgaacaggtgcagccaaggaggccaggcccgccatgtgtccactgtatactgtctcctagctcacaggaatgatactgatccactccttgtgctgctctttgtaaagtgatttcacatccattctctggtaatcatcatcacattccctgtgatgaggaattagcaccaattatagaggagaaaactggatctgacatttctcatctcatttgctctatacattaacctcttgcaaaaaatttgtgagtcttgcccaagacccattacaactaattaacggctgaactggtcgtctgatttcaaggccagaattaactttctactgcagctcatggatcagaggttttctttatttaaacaaacaaacaaaaaatcctttgaccgtagcccttgctataacgtttcccactgagttgagggagaaattgaaagtaaacttaggagctttttatagcttgtcaaaccatgcaagagtgggggaagcttatccatcttgtggaattgatagaccaggaggaagtaactccggcttagataatgctaccattttgaataaatcaaatggtcttcttttccccttcatggtagttgctgcttaagtttctctaacatgcctgcagtaagtttccattaagaataggaaattaggctcggtacagtggctcacgtctgtagtcttagcactttgggagaccgaggagtgtggatcacttgaggtcaggagttcaagaccagcctggccaacatggtgaaacccccatctctactaaaaatacaaaaattagccaggcatagtggcatgcacctgtaatcccagctactcgagaggctgaggcaggagaatcacttgaaccagggagatggaggttgcagtgagccaagatcatgccactgcactccagcctgggcgatagactgagactctgtctcaaaaaaaaaaaaaaaaaaaaaaaaaaaaagaaaaagaaaagaaaagaaaaaaaaaagaaattagtatattgtgattatgttgagggaaaagttagtaccataatataaaaaggtatggactattggagaaagttgtttgctttggtaacatttactcatagaaagtattttggtaaagcaggactcagggtggtgggggaggtgggcagtgagggataggattcaaataaaaaccattctttcccttggaatccactacacaattaaccaacaaatcccataagtggaccttttaggaagataacatttctatccatgagcatagccactataatcacaagacatttatctcaagcaagatagagtcaagatactctcacaacctcaggggctggaactgtaaattttcacatcctgccaacacccttgaatagctatgtcaagaatttagtgtctgtaacttgttctttattttaaagtacatttaacatcatcggccccaaattagataggcttttggagtgggatcccttctacttttgatttctttataaaattttaaaatagctttgttgagatagtgttcacataccatacagttcacccattaaaagtgttcaattcagtgattaggccaggtgtggtggctcatgcctgtaatcccagcattttgggaggccaaggcaagtggatcacttgaggtcaagagtttgagactagcctggccaacatggtgagaacttgtctctactaaaaatacaaaaattaactgggcatggtggtgtgcacctgtaattccagctacttgggaggctgaggcaggagaatcacttgaacctgggaggtggaggttgcagtgagctgagattgcaccactgcactccagcctggatgacggagcaagactctgtctccaaaaaaaaaaaaaaaaaagtgttcaatgttttttagtatattcacagagtcatgcaaccatcactataattgcttctagaacattttcatcatcccccaaaagaaagccttcgttacgaattttaattagctgagattctgaactctgggggaattttgtattctagaaatattttttactaatatgctacagttgtatttgtcatgctggtgaaaagatgtggtctttcacctggatgctttctcattaagcattatttttctgtttagcttcctgtgtgagcaaacattttctcagcttgatactcagtgcatcagcggcttgcagaagagactgcctaggcctgctctgtccagtacggtagccacaagtcacttgtggctactgaacacttgaaatgtggcaaggccaaattgggacaggctgtgaatgcaaaatatacaagatttggaacccttagtatgaagaaaagaatgcaaaatatcccagtaataacttttacattgatgatatgttaaaggacaatatttgaatatgttaggttaaataaaattaatttcacctgtttctttttacttttaaaaatatggccgctggaacatttaaaactccctatgtggtttgctttgtgtttctattggacaaagttggtctagacagtacaaggtgtgaagacaccgccctctgctggagaagatgctggatttttatttcacctacaggaagagacgtctaagtagcaattagatgctaaactaatgctgcctcaggaaagaatcaaaagagaaagagtgaaaccaggccgggcgcggtggctcacgcctataatctcagcactttgggaggccaaggcgaggggatcacgaggtcaggagatcgagaccttcctggctaaccccgtctctattaaaactacaaaaaattagccgggcatggtggcacgtgcctgtaattccagctagtcgggaggctgaggcaggagaatagcttaaacccaggtggcggagggtgcagtgagctgagatgtgccacagcactccagcctgggcaacagagccagactctatctcaaaataaggaaaaataaaaaagaaaagaaagaaagtccataaattgagactcctagagatactaaatggtagaatgggaatttgaatttaaatttataagatgttcactctcggagatcataggtcattgttgtcctcctccttttcatgacaggaactagcaatgaagagctctgactatgtgctaggtactactctgagaacctaacatttgtatctccttattaactctattactgccccatcctacagatgagaaaattgaggcacaggaagtttaagttggccaagatcacacagccagtaaggggcagacattgaaaggtcattttgcctgccttatccccagcctccaggcagtggcagagttagctcattttggacaaacagctctcccagaccagacattgtaagctatactcaggaatcataggaaagattatgatagaataatatatagttacaaagaaaagaaagaaaatccaatgggagaatatttactgttttctatattaaagtgtttaatgtttatgtttttagaggaatattgtttattatagcaatttagaaaacaaaatgagaaaaaaaatcaccaaagattctacctccagttatttttgtgtatttccttccatttttccccccatgtctgtttatataattgaaactattattcatgcaaagaggtattctgattttctcagttatttttatttatttttaattttgtaaataaacttttttcttctgagacagtctcgctgtgtcacccaggctgaagtgcagccgtgcaatcttggctcactgtgacctcccagtctcaagcaatcttcctgcctcagcctcctaagtagctgggactgcagatgtgtgctaccacatccagctaatttttaaaatcttttttctcttttttggtagaaatgggagtctctctatgttgcccagcctgtattgaactcctgggctcaagtgatcctcccacctcagtctcccaaagtgctgggatttcaggcatgagctaccacacccaacctaatttttatttttattttattaaaaaaaaaagtttttgcctacccgcctctcaccctctcactcatttttaagtataggtttttctacaatgccacattgtcttttccataaaaagtactttcggccgggtgtggtggctcacacctgtaatcccagcactttgggagactgaggcgggtggatcacctgaggtcaggagttcgagaccagcctggccaacatggtgaaaccccatccctactaaaaatacaaaaattagctggatatgattgtgggcacctgtcatcccagctactcgggaggctgaggcaggagaatcgcttgaacctgggaggcagaggttgcagtgagccgagattgtgccactgcatcccagccagggcaacagagcgagacttcatctcaaaaaaaaaaaaaaaaaagtacttttcttcatttggttagtattctcttatgagttgatgccttgtaatttatctgaatgttttccattattttgtggtgagctttaaaactacccttcctgactttcaagaatcctagacatgctccttcttgctaggtaattattagttgcactcattagaataaagtatatgcttggagtggggaggagatgaactttttgaagggcggtgaagtatttctcaccaccaggcctttgtctttgctaaactgaggaaggaagattttatttcattagctaacaaagaacctcctatataggccgggcatggtggctcacgcctgtaatcctcacattttcagaggccaaggtgggtggattgcctgagctcaggagtttgagaccagcttgggcaacatggcaaaaccccatctctactaaaaatactaaaaattagctgggcgtggtggtgagtgcctgtaatcccagttactccagagggtgaggcagaaaaattgcttgaacccgggaggtggaggttgccatgagccgagatcgtgacagtgcactccagcctgggcgacacagcaagactctctctcaataaaataaaataaaataaatacataaataaatctcctatataacctcataatatcagatttggagccttttccatagaaatgaaattcagaagaagctgagactcagatattccaagctgcctggtgctctgtgaatagaggagacttgttcttgtgaaatctgagtgcaaagacacaggacaaattgttatctacttttcattcctaaggatactgtatggccctaaaacacaagaactagaattctgtgataccacgggtactccacagtgtgttccttcccctttctgaacctgatttgactcatctctatgaaaagatgtgggctttggggtcagatgtgggttggaatcctagcgcctgtgtggctgcaattttcttttgtgtaaaattgagataatagtacaaaagtaacaacagttaatattatcaagtgcttactgtgtgcctggcactgtgttaaattctctaagtgtattttctcatttaatttttgtgataggcttatgacactattagtatcttcatattacagtgagggttcagagaagttaaggttccataactagtcagcagacctgggacttcactccaggcagctgattccaaagcctattctaactttaaactgctactttttggagtgttgtaagaaggacaatttatataaaatgttggcacatagtgggtgctgctgttatatgaatgggcacaaaatctgtctacattttgccttttaccaaatttagaatctatttagttaaaaccttcttagggcgggtggggtgcagttgctcattcctgtaatctcagcacactgggaggccaaggcaggaggactgcttgagcccaggtgtttgagaccagcctgggcacatagtgagacccccatctctccaaaaaacaaacaaacaaacaaaaacaaaacaaaactagctgggcgttgtggtgcccctgtattcccagctactcaagaggctggggtgggagaatggcttgagcccaggagttcaaggttgcagtgagctatgatcacagtactgcactccagcttgggcagccgactgagaccctgtctcgaaaaaaaaataaaaataaaaacttcttaggacagagtgattagaagctgtgtagtagatacttagtaacaatgtgggttcctcgggcaggttatcctacgcggagagccaggtaccaatgggtgcgctgcaatccagacagtaattctgcaaactgccttgaagaaaaaggaccaatgttcgaactacttccaggtgaatccaacaagatcccccgtctgaggactgacctttttccgtaagtggacttttctctaattaattaattaattacttatttatttgagacggagtttcacttttcttgcccaggctggagtgcaatggcgcaatcttagctcactgcaacctccgcctcctgggttcaagcgattctcctgcttcagcctctggagcagctgggatttcaggcgcctgccaccatgcccagctaatttttttttttttttttgagacggagtctcagtctgtcgctcaggctggagtgcagtggcgcaatctcggctcactgcaagctccacctcctgggttcacgccattctcccgcctcagcctcccgagtagctgggactacaggcacccgccaccacgcccggctaatttttttgtatttttagtagagacggggtttcaccttattagccaggatggtctcgatctcctgacctagtgatccgcccgccttgacctcccaaaatgctgggattacaggcgtgagccactgcgcctggcctaattttttgtattattagtagagacgggctttcatcatcttggccaggctggtctcaaactcctgacctcaggtgatccacccaccttggcctcccaaagtgttgggattacaagcatgagccactgtacccggccttttctctaattttaaagtgtctgtaatttcacaacctcttggcacagatgtgggagtgtttttcttcaagctgtccagagtgttttgcttcgagctcttgctttggtagtttggctcttactctgcagtacatggtaaaagtgtactgtatatactggcatatgacatgtgcgagtatacatgattcacctatgtttttgaaattttttttgtggatggtagagaggagcattgaggacttttcatcaacaggtattgaaaatgattgaacattgttttatttgtgtaaacagaacacactatatataaaaatccaataattaactgaatggataagcaaaatgtggtataagcatacaaaggaatattattgggtcataaaaagaatgaagtactgatacatgctacaacatagataaaccttggaaacattatgcagagtgaaggaaggccagacaccaaaagccacatattgtatgattccatttagatgaaatgtccagaataggcaaatccctagaggcagaaagtagattagtgggttacaggggctggggaaagggaggaataaggagtgactgctaatgggtatgagggttttttttggaggaggtgattaaaatgttcttctgccaggtgtggtggctcatgcctgtaatcccagcactttgggaggccgaggcgggaggattgtttgagcccaggagtttgaggccagcctgggcaacatagtgagaccctatctctatttcaaatacattttttatattaaaaaaatgttcttcaagtagttggtaattatttttaaaaatggccaggtgcagaggctcatgcctgtaatcccagcaccttgggaggctgaggtgggaggatcccttgagcccaggaggtttgggaccagcctgggccatacagcaagaccctgtctctacaaaaaatacaaaaattagctaggcatagtgatgtgcacctgtggtcccagctactcgggaggctgaggtaggagaatctcttgagcctatgttgagcctgcagtgaaccctatttatgccattgcactccagcctaggcaacagagtaagactctgtctcaaaaaaagaaaaaaaaaattagggaaaggaagaataattagccaagacttgtaaaacaaaaatcaaatctcttcttttgatcacataaaacttgctttaaacttgcaaaaaagacctgatataaattcataagtaacaaaaaattgaattatattagaaaccattaattcaatgaatactaaagctatgtaggatgtagcaaaatatacatattaagaaaaggattatcataaaagttttaatctccaggctcaaacctagaaaatcactctcctcaaagccagggttaatcatcatgctccaaaccaggtacatttcacatcactttgggatcctggcaactttctcttttgtttttttttttttttgagacagggtctcctctgtcacccaggatggagtgcagtggtgtgatcatagctcactgcagcctcgaactcctcaagtgatcttcctgcctcagcctcccaagtagcgggaccacaggcacacagcaccatgcccatctaattaaaaaaatttttttttgtagagacaggggtctctgtacatttcccaggctggtcatgtactcctaaactcaagcagtcctcccacctcagcctcccaaagtgccggaattacagtcatgagccaccattcccagcgctggtgactttctccatcactggtgactttctccatcactggtattcactgcattagtgatgacatcattacaatcttcaatatgcaactttgtagtcctactcttgcattcttactttaaagcctcagcattaagtttgaatgtaatattacagcatccttcattactttaaatcattggtttcaatagtaattcatttaaatctaaaatgttaggctgcagtggctcatgcctgtaatccccccagtttgggagactgaggtgggagaatcacttgaggccaagaatttgagaccagcctgggcaacacggcaagaccccatctctaaaaattagtggcccggcgctgtgcctcacgcctgtaatcccaacactttgggaggccgaggcggatagcttgaggtcaggagttcaagatcagcctggccaacatggcggaaacccatttctactaaaaatacaaaaattagctgggcatggtggcacgcctgtaatcccagctattgagaggccgaggcaggcagactgggaggccaaggcaggcagattgctttgagacctgcctgggtaacatggagaaatcctgtctctacagaaaaatacaaaaattagccaagcatggagaaacctcgtctctatagaaagacacaaaaactagccatgcatgcctgtggtccagctactcgaaaggctgaggtgggaggattgcttgatcctgagaggtcaaggctgaagtgagccatggtgtggcactgcactccagccagggtgacagactaaaaccttgtctcaaaataaataaacacatttaaaataaataaatacaattaaaactaaaattaaaaaataaaataaaatgttaagagaatagctcaaattctccaaaagaactcttgcacaccattcctcctcttctcaaatctctattttccttccccaaagccagtaactgcttctcaccctgaccctgtgctttctttcccgtcattgcgaaagaatggtccttgcttctgtgctgatcccaaacccttttgccctcagatcctcctgtccttccctggccctgctctgtattggctgtggggtgggggtggcggtggaactgacccctggcgtctgcatttctcaggctcccagggctgtggctgactttggccaatgggaggcaaggacgggagactgagagcttgggaggaagggagagaggtatgtttcttctccttactccctgcctgggatggcaccttgggcaggactctgttttgcccatggcctcagctcccaccagatgcctctagtccctgggctcaggaaatagacaacctccttccactatcgctgtagcccaaggagggaagtatttttttctttctttctttctttttttttttttttttacagagtctcactcttgttgcccaggctggagtgcagtggtgcgatctcagctcactgccacctctgcctcccgggttcaagtgattctcctgcctcagcctccagggtgtgccactatgcccagctaatttttgtatttttggtagagacggggttttgccatgttgaccaggctggtcttgaacttctgaccccaaatgatctgcctgcctcgtcctcccaaagtgctgggattacaggcatgagccactgtgcctggccgaaggaaatattttcttgctattgctaatctctgggttacctcgctatcccccatttagcttcacttctcctccatcacctgtatgaggaattccctctgtgttaaatatctggagaagtttcctgattggaccctggctgttgcagcttccaaggccacctctctttgtggctggtatccttttcccatgcatcttctccaggacttccattctgcagttatctctctgaactcagtgtcttcttcccatcagtataggggtggactttagtatctcctatgtttaggcaacatctctcctttgactctgcgtcttctccagtggttgcccttctctgctcctcttcacaataacacctcctgaaagggccacccatgcctgccccctcctttcctcaccccctctgtggctggacttctgttcctacactccaccctggttgacaaagtcactgattacttctctattttcagcttacttgatccttaattgccttcaaaaacagctaactgggccatgcatgtaatcccagcacttcgggaggccaaggcaggaggatcacttgagcccaggagttcaggaccagcctgcctgggcaacatagtgagaccctatctacaaaaaatagaaaaattagccgggcgttgtgactcatgcttgtggtcccagctacaaaggaagctgaggtgggaggatggcttgagtccgggagggtgaggctgcagtgagccatgatcacgccactgcactccagcctgcacaacagaaggaggccctttctgtaaaaaaaaaaatggttgaccactccttccttgaaatgcttttttcttgaggcttccatgccctgccttatcctgtttcttcctacttctctggttgtgctttttcctctgctcagtatttaacatgttggtgtgaccctggctctggcctgggcccccttctctatctacatgctttctctcgacgacctccatcggttgcatgggtttaactaccaaatctgtgattctagctccgacaccccaggctaaagtagccacctggtcactccctattacattggtcaatttcatttctctgtgccacctatgattttcctgatttatttattcacttttcattgtctgtcttccccactaaaataaaaacttcttgagaaggggcttcatcgatctgcctctgttctatcccaggccctcaaaacaaggaccagatattcaacaaatatttattgaatgcgtacatgaattaaaactctaattggttgtatgctggtggtttattattttcatggaggaaatgacttgtaggctgtgacactcagcttttgtctctgatgctttgttgccctgttctgtcaccgagggctgtcgtcattgctctggccattttgtgctctttgaatttctaatcatcacactcaacccagaaggcagccttacctttcagcactcttcagctgaatgagtgcaagttggaggcagggtcattttttgataggaaattgaatgtttatatgctggtaaatataaagcttagctttttacaaagaatttctcaaaagtgagctttgttgaagccctgtaaattgttagaacttttatggaaattttaatttaggaaaaaatgtcatctgtttgggctgacttagttgttagttgtttgtcctttcttttttttggtggagggtatggagttttgctcttgtaacccaggctggagtgcagtggcgcgatctcggctcactgcaacctccgcctcctgggttcaagcgattctctcacctcagccttccgagtagctgggattacaggcatgcaccaccacacttggctaatttttgtattttaagtagagaccgggtttcactatgttggtcaggctggtttcgaactcctgacctcaagtgatcacccaccttggcctcccaaagtgcttggattacagacatgagccaccacacccggccaagaggacttcttttaaaaatgatttcttgggccgggtgcagtggctcacacctgtaatcccagcactttgggaggtgggtggttcacaaggtcaggagtttgagatcagcctggccaatatggtgaaactccatctctactaaaaatacaaaaattagccaggcatggtggcgcacccctgttgtcccagctactcgggaggctgaggcaggagaatcacttgaacctgggaggtggaggttgcagtgagccgagatggcaccactgcactccagcctgggcaacagagcaagactctgcctccaaaaataaaaattaaaatgatttcttaagtaaatttcaaatatagaatgtatatgctagtgataacaaaattaacactgtttatgcaagtctgcaataggtagatgtgaagttgataggtgcaataagtataggcaaacacataggaacatttgacctgtttttttgttgattttaaaacattgaataattgggaagcttttaaatctcttaatttgagcaactagatggctgtatttatctccttatattaaaaaaactattataattatctttcccacatatcaaactccactggtttttttcccatttttctttcatacttcagaaagacgagaatccaggacttgaatcgtatcttcccactttctgaggactactctggatcaggcttcggctccggctccggctctggatcaggatctgggagtggcttcctaacggaaatggaacaggattaccaactagtagacgaaagtgatgctttccatgacaaccttaggtctcttgacaggaatctgccctcagacagccaggacttgggtcaacatggattagaagaggattttatgttataaaagaggattttcccaccttgacaccaggcaatgtagttagcatattttatgtaccatggttatatgattaatcttgggacaaagaattttatagaaatttttaaacatctgaaaaagaagcttaagttttatcatccttttttttctcatgaattcttaaaggattatgctttaatgctgttatctattttattgttcttgaaaatacctgcattttttggtatcatgttcaaccaacatcattatgaaattaattagattcccatggccataaaatggctttaaagaatatatatatatttttaaagtagcttgagaagcaaattggcaggtaatatttcatacctaaattaagactctgacttggattgtgaattataatgatatgccccttttcttataaaaacaaaaaaaaaaataatgaaacacagtgaatttgtagagtgggggtatttgacatattttacagggtggagtgtactatatactattacctttgaatgtgtttgcagagctagtggatgtgtttgtctacaagtatgattgctgttacataacaccccaaattaactcccaaattaaaacacagttgtgctgtcaatacctcatactgctttacctttttttcctggatatctgtgtattttcaaatgttactatatattaaagcagaaatataaccaaaggttaa

SEQ ID NO: 260 - DNA, 11017 bp, Homo sapiens
cccatggcagtcttattcctcctcctgttcctatgtggaactccccaggctgcaggtaaggggcaagaggtacgggattccttagctatttgcaaggttggggagggactactgctctttctcctaggagcctggcgaaggcatctgactcaagaagatagaattaccccaaccaacctcctcctgcctctgacactagggaagacccagaggcaacgagggtccaggttatgcagtttcctttataaaataagaagaatgagtaaatgcttccagaaaagtagaaatgagtagaagagatgtgggcatttgccaactttcagccttttccctcttgccctcagaccccctcactggctgggggagagaggaggaaagcccttaccctcttctctccacctgtcttatttttgtagctgtcacttgagaaatgtggtcaccagccaggcctgtgctgggggaccccagaagggaaggaagccagggttgaagatcaaatggggggttattgatctgatggaggtctctggcctcatacaaccctcttcccacagacaacatgcaggccatctatgtggccttgggggaggcagtagagctgccatgtccctcaccacctactctacatggggacgaacacctgtcatggttctgcagccctgcagcaggctccttcaccaccctggtagcccaagtccaagtgggcaggccagccccagaccctggaaaaccaggaagggaatccaggctcagactgctggggaactattctttgtggttggagggatccaaagaggaagatgccgggcggtactggtgcgctgtgctaggtcagcaccacaactaccagaactggagggtgtacgacgtcttggtgctcaaaggtgagtgggggcatgcagaccaggggctactgtggcccaggaagtccaggtgaagaactgaggaatccctctctcccctacaggatcccagttatctgcaagggctgcagatggatccccctgcaatgtcctcctgtgctctgtggtccccagcagacgcatggactctgtgacctggcaggaagggaagggtcccgtgaggggccgtgttcagtccttctggggcagtgaggctgccctgctcttggtgtgtcctggggaggggctttctgagcccaggagccgaagaccaagaatcatccgctgcctcatgactcacaacaaaggggtcagctttagcctggcaggtaaactgaggaaggagacggaaagggatgttctttcacttcagcctcccaagtagctggaattacaggcgcccgccaccatgcctggataattttttgtacttttagtagagacgagatttcaccattttggccaggctggtatcaacctcctgacttctagtgatctgcctgcctcagtctcccaaagtgctgggattataggcatgagccaccgcacctttaaattttttgtagagacaggatcttgctatgttgcccagtctggtctcaaactactggcctcaaatgatcctcctatcttggtctcccaaagtgctggggttacaggcatgagccatcacatctggctattttttcttgaaagaaagggtgaattactataaagggtgtgaggggaaagtgtggttatggctggtggtctgctctgtagttggttgcccatgcgtgagcagggggcattgccattctctactttttattttattttattttattttattattattaggccaggcatggtagctcaatcctgtaatcccagcactttgggaggccgaagcaggcggatcacttgaggttgggagttcaagaccagcctgactaacatggagaaattctgtctctactaaaaatacaaaattagccgggtatggtggcacatgcctctaaccccagctactcgggaggctgaggcaggagaatcacttgaacctgggaggtggagggtgcagtgagccaagatcacgccattgcactccagcctgggcaacaagagcgaagctctatctcaaaaaaaaaattgtatttttagtagagacggggtttcaccatgttggccaggatggccttgatctcttgacctcatgatctgcctgcctcagtctcccaaagtgttaggattataggtgtgagccaccacgcctggccttttttttttttttttttttttttttgggatggagacttgttctgttggccaggctggaatgcagtggcacgatcttggctcactgcaacctctgcctcttgggttcaagctattctcccatctcagcctcctgagtagctggactacaggtgcctgccaccacgcctggctaacttttgtgtgtgtgtgtgtgtttttttttgttttttttttgagacagagtctctctctgtcgccaggctggagtgcagtggcgcaatcccggctcactgcaacctctgactccctggttcaagtgattctcctgcctcagcctctcgagtagctaggattacaggcatatgccaccacgtccagctaatttttgtatttttagtggagccggggtttcaccatgttggccaggatagtctcaatctcctgacctcgtgatctgcccgccttggtctcccaaagtgctgggattacaggtgtgagccacagcgcccggcctcttttttgtgtttttagtagagatggggtttcaccatgttggtcaggctggtctcgacctcctgacctcaggtgatccacccacctcggcctcccaaagtgctgggattacaggtgtgaaccactgcgcctggcctcaatttttatactttcagtagagatgaggtttcatcatgttgaccaggctggtcttgaactcctgacctcaagtggtctgctcgccttggcctcctaatgtgctggaattacaggcatgagccactgtgcctggccgccattctctatgggtcagggtgagaggcctggaaaggggcagagtagggtggaggatattgtgggcagggaagcttacaaagtcttctgttggaagagcccaccagactgtggaggggaagcctctctttggggcacagggacagggcccctcactacctccctcccatccctctggtctggcccttactacagcctccatcgatgcttctcctgccctctgtgccccttccacgggctgggacatgccttggattctgatgctgctgctcacaatgggccagggagttgtcatcctggccctcagcatcgtgctctggaggcagagggtccgtggggctccaggcagaggtgagtccctccctccccggggaaagaagagggcacatgggtgggaggcaaagggctaggctcacaccccgcctctgtaccccacctcctctaggggagggggcgaggaacacggctctaagttgtctgctgacttctcttctgtatccctgatggctccttctccccagatgcctcgattcctcagttcaaacccgaaatccaggtctatgagaacatccatttggcccgtcttgggtgaggaacagctagggaacagaggcttaaatcctggaggggactggggatggagaggaaacacgggttgggttggggatgggccctcgttcctgaggatgtgaaaagtagaggtatccttaatctgtctctctggaaaaccccacagcccacctgcccacaagcccaggtgattttggtgacatctgctgggaagtgtgacctgctgtctcgctggccatctggcacctggaagattcctcgacaaccttagcaaggggggcgggactgagagttcgacttcaccatccagctggcctccagcagccaccaagctgtgtatggggaggggtgggggactgaaggaaaggaggagcattattctgtgatgtaacctacaaaaaggtttggtctcctgtcttgtagcagcagtggagggatggccctgagcccatagtactgtggggttgaggggagcctgaggttgctggtgggggcaaggaggatgggtgtgcacagggaggagacaggaatctggagacttgagcaatggtgaggaatccattgcagtggagctgaaggacaaatggggaaaacgggggaagagagagaagggaagagactcaagtcagagaaagtggaaagagatggacagagggagaaaaatagaagcacaaagtgggaggatggagggacagagaaaatggaaagcctcaacccatctctaaattaagccagacccccactaccccatgtctcatcctcacaaagaagagagggaacaggcatatttaatcaaccccagacttcctcacatgcaaggggagggaactgagtcaggatagagatgcctgtgctcagctcccacccggggccccctccttatccttccttatcctaggcacacactcttccctgtggcgccttaccggggcattcagagcatgtgagcagctatcgccactctggcacttccttcctgctgccctgaggtcacaccctatttctcgggggcagagggagtgtctactcaggctggcaggcccagtgggggtatgttatttattgggccggggccatgctgggatgtctgtgaaccatgggcgagtctgggctggtgaagcgagggaggatattgatgctcccaacttggccattccctagtctcaggcagaaatgagctgagctccagccacaccctcacaagcagctccactgggtgcccttttgtgtctctgctcaagcttgggccttactggaaaaaagctttctcagaagtctcacctaaaggcttcaggctgcaggggcttaaactaagccattggcaagaaaaaggacgaaaatgacacagatggagaatgaggggagtgccgtggtccaggttccagctccagcccaacccaccaagcagctacagtttgctcttagagcacacacacacagacacacacacacacacacacacacacacacacacacacacactgcagtatctgcagtattactggactcctagatagaccttttattaaaggtactcttcatagtcccccaagccctccatcctgagttcccgacctaccacattagtctttcctagcaagactctcctccttaccatacctgatgctcctttgatccccttgcctgagatccacagtgtcatcaaaatgcctgccttgccagtgacctgggctgacacggggcatcagcaatgggcatctagaaaagacaaaagacgcagaataggtgttctttatgaggttggactctgggcaggtgcctccccaggccttgtgaggggtctgtgaggggtctgctgagagatctggggtctctgtacaaaattaggttctcgggcatgtctcaaagtgtctgtgcaggtgtttccagggccgcagtgatggcggggggtatcctgggttgggggctgcagatccacggaagctagtggaggaggtgtcctctcccagcgaagctggccacaaagaggggcagggaggcgaggaggctggtgagctgctgtggggaagcggctatgttgcacaggtcctgctcgcagcagtggtgccacagagtgtaggagtgcagccagtaggtggcatagcctggcagagggcactgggcccttgagaggcagctttttcactcagtgatctcactctggtctgtgggatgaaagaggcatgctgaggcgggggccacaggaaaggccggatggatggaggtagggagcctcctggagaagggccattggaccagagtcctacctgaagtgccaatactgatgccacaagcttcatcgtcccgacactcggtgggaacagggtggcagggtttggtgaagccacagatgtagcagcggagccttccccgggcaggggacatggtgagacctgttgaggcagcagagattaggagagcaggagaggcaaaccctccctgtggggcaggcagaggccagatccggagagggatcacagagagaggtgacacatgaagcagagagaggaaagctgtggaataagggaggaaagctgacagaagtagaaaaaatagctgggcgcagtggctcacgcctgtaatcccagcacgttgggaggccgaggcgggctgatcatgaggtcagaagattgagaccatcctggctaacacagtgaaaccccgtctctactaaaaatacaaaaaattagccgggcatggtggcacatgcctctagtcccagctacttgggaggctgaggcaggagaatctcttgaatctgggtggctgaggttgcagtgagccgagatcatgccactgcactccagcctgggtgacagaacgagactctgtctcaaaaaaaaagagggagacgatgcaggaaaagaaacagagatggaggcaagaggggtacagggattgagagatgcgcagacatgaacagaagccacaagaatcagagaccaacataaaaagagtgagacaaaaagccagacccagcagcagggaagttgagggggtcagtgaaaaagttaagtaaatggcaccagagacagataggaaaatagaaattgacattgaccaaagggcccagcacagaagcaacacgtgaaataagggataggggagacaggggcggatcaaagatgcagcaagggggagacagttattctcaaatgccttgaaaggaaactcttcctttcccacctcatcaggctggccttcccagtggctggtctccctgaagtcccccactcccccagctctcttcttggcctcttccagcacccacacccctctcctccccagccctcaggttcctccacatgcccttgtccccacccccagccccctgaccactgaaggttccccagcccacccttacccagtgccccacagaggaacagcacgcagaggaagatgctggaggtgcccatggccagacacaggctcaggaatctgggagaggtgatctgcaccccgagatcccgggatttgtagagttggagcatttgagcaagacagtgaggaaccagtaaacaaacacacctagggagtgaatctggggggcggaaccatgaccagattcaccagcctgacccagcaggcagcgggggcccccagcctgcccctgcaaggagtctgcccttgcctggagggtctcctctgctctctcagcatgttgtctctgtaacttagcttcctctcctgctcctgagttgtgtctgtcgccttccctcctactcctccccctccctccccatgtctcaagctgctccctggctctctcagcttctctctgtctttgttttctctgtctttccccctcagtgctttcatgtctctcaaagtcaccctcctaaacagccccggcgtagatctgtttgagtgtagaatcaacaatacccccacccacacacccacatgcacacacaaagcccagctgtgtaagggcggaccccacccagcttcagatccctttgatccccccaagcttcaacattcctaccctgtaattatccctgccagctttactaccttggaggaaagaaataaccacgggtggggctggagggcctgctgatgtgcttgcactggggagaaatcactagaaaggaaggcatggatgggatttggggtaggggggtggtgatacagcctggaaggctggggttgaagagactgggaaggaggaaggcccatctggggaatcagagccagcatgtaccaggaggagtaagactaggaacagggagtgaagataggggagacacaggtgcccaggagagcagctcttttcaaaaatattgatctcaggacctctttacacttttcaaagttacttaagactctgaagagcttttctttatgaggttatatcaatatttactacattaaaaattaaaacagaaaatttaaagtaggtatttattgatttatttaaacaataaaaataataaagtattacatgctaacaaaatacagttttgtgaaaaataactattatttctccacagcacagtgagaagctgagcattgctttacatttttgtgaatctagtgtcaggcttcgtgggagatgcctgggttttcctatctgcttctgcattcagtctgttgggatatgttgttttcgttgaagtccagtatatgaagaaaatctgaccttacacagatagttgcaaaaggaggaccctcaaggaccctgtgaaagggtatcagggatcctcaggggttcttgttggtccacagactgctgctgaggataaaggagtttgaggactccagaggatgctgagagcatgctgtggggcccctccctgtccccactggggcccttggtgcctgctgggggagactctttcttccttttttatagccctataaagctcaaggcacgggggatataaggcaggcagagccgggctggggaggggggtgggcaggaggtagaggcggtcctgacacgggcagactgcgatgaaaccccagtttgttgggatcttgctcagctccctgctaggggctgccttgggtaaggaggcggccagctagcttctcacacaggccttctgccagccggctccaccgagggcccaggtccagcgcctcttttctcctgccaggaaaccgaatgcggtgctacaactgtggtggaagccccagcagttcttgcaaagaggccgtgaccacctgtggcgagggcagaccccagccaggcctggaacagatcaagctacctggaaaccgtgagtcctcagtttctccctcttccagcagcctttccctgcctccagccccatgtcaatccttctggcttccagaaccctccaggctcagtctggctctgggcagatggtgcagctgttagaggagagcagtctgtaccccttctggctcctggcacggagcccctgagaggcccacagtccttgtgcccccacttccccacctccttattctcctaaaagaatctcataggcccattagctcacaaatgaagagctctggccctgaaaggccaaagttaaaaccaaacttcaaattttcggcattagttaaggaccagggaggggtgtgtgtgtgtgtgtgtgtgtgtgtgtgtgtgtgtgtacatgtttttaatattttattttaacataattttggattgacagaaaagttgcagaaatactcaacttctcctaatgctaacatcttacataaccatagcacaattatcaaaatcacaaaataactgatacaatactactaactaatctacagactttatttgatttagcaagatcctacattgcatttagctctcatgtcttcttagtctcctctgatctgtgccagttctgtttttctttgtctttcatgaccctgacacatttgaagagccctgataaattattttatacctggagtttaaaaaattacttttagggccagtgcagtcactcgcacctgtaatcccagcactttaggaggccaaggtgggaggaccacttgagcccaagagttgagaccagcctgggcaacatagggagaccctgtctctacaaaaaacaaacaaacaaacaaacaaacagattaaaaaattagttgggtgtggtggcacatgcttgtagtcctagctactcagggggctgaagagggaggatcgcttgagcctgggagattgaagctacaatgagccatgatcacgccactacactccagcctggggaacaaaatgagaccctgtctcaaaaataataataataataatttttaggctaggcttggtggcacacacttgtaatcccagcactttgggaggccaaggctgaagagtcacctgaggtcaggagtttgacaccagcctgggcagcaaagtgagacccccatctctacaaaaaatgtttttaaaaaattagccaggcatagtggcacacacctgtaatctcagtttcctgagaggctgaggcaggaggattacttgagcccaggagtttgaggctatagggaggtatgattgcaccaccacactccagcctgagtgagagagcaagatcttttctctaaaattaaataaaatcatttttagattaaacaaaaattacgtgccggatgcagtggctcacgcctgtaatcccagcactttgggaggccaaggcgggtggataacctgaggtcgggagttcaagaccagcctgatcaatgtggagaaatctcgtctctactaaaaatacaaaattagccgggtgtagtggtgcccgcctgtaataccagctactcgggaacctgaggcaggagaattgcttgaacccaagaggtggaggtcgcggtgagccgagatcacaccattgcactccagctgggcaataagagtgaaactccgtctcaaaaaaaaaaaaaaaattacagatacttgaaatactaaaaattattttatagaatgtccctcgatatttatttatctgatatttgccatgatgagattgaggtcatgcattttaagcaagaatactgcagaagtgatgttgcatccttcttgctgcatcacatcaggagtttacaaggtcaatgcattaactttgatcacttggtttcagggaggtgttttttgagggggctgaaaatccctttgggctccttgaaatcacatctgctctgccccagaaggcaagtcctgaagccaggagtccaacaccccagtttcattctctctctcagccccagtgaccttgattcaccaacatccagcctgcgtcgcagcccatcattgcaatcaagtggagacagagtcggtgggagacgtgacttatccagcccacagggactgctacctgggagacctgtgcaacagcgccgtggcaagccatgtggcccctgcaggcattttggctgcagcagctaccgccctgacctgtctcttgccaggactgtggagcggatagggggagtaggagtagagaagggaacaagggagcaagggaacaagggacatctgaacatctaatgtgagaagacaaacatccttctgtgagtcattaaaatctatgaaccactct

SEQ ID NO: 261 - DNA, 23609 bp, Homo sapiens
tcacttgcctgatatttccagtgtcagagggacacagccaacgtggggtcccttctaggctgacagccgctctccagccactgccgcgagcccgtctgctcccgccctgcccgtgcactctccgcagccgccctccgccaagccccagcgcccgctcccatcgccgatgaccgcggggaggaggatggagatgctctgtgccggcagggtccctgcgctgctgctctgcctgggtaagttctccccctctggcttccggccgccccaaagaggagacaaataaggaaggctcctgtgcatttgtcattcgacaagtacggagttgtctccaggttcaagtgtgctctatttaaaattacgtcttgttttgtgagtctgtcttcccctatggtgggactggggtgggggggactggggatcgatgttaaaatgctttttattggtgaattaattattggcatatatgttatgcatggattgaaatatctccttattaaacaaaataaaaagttgttgaaaaagctttttttttttttttgaaaagttgccagtcctagaaatctaaaggcctggaacgcactgttaacatttcatgtcttgttcctttttgttggagagtggggaatagaaactagcgtaagaaattttttggaggggggaaaaagcttttctcctctgtcttgcgctcagttttctaaaacctagcctggtttagctttcccggaggagctggtatgcgccagtgccagttggctgagctccagacacaagagaaataaaacactggtcgagggtatctggagcagaagggccctgggcaggtcctggcgctccccaccgcccttcgcccctacacctgctgcttgcgtttttccctgcagcctcccaagcagcctctggagcaagcgttctgcacttgctgctaattgcactccatagcctgtgatcgctgagggtatttaaatgccagtcttcctatttgagatgatttagttcaaggggaaaaattttctaaatagcctttctgttaaaaaaaaattacttctttccaattccttaaacttcagtttaaggaatttgaaagagtttgaagtcgtatatgaatatcttaataaaaaaataaaagttaccaccagtctcatattctccctggagttggaatgaggctgattccccagacactctaactctacctgtgaaggatgtgactgttaaattattattttggcacaccttatctcaggggttgagagacctaatgaaatgcatactatgcataattgaaacttacaagtctaagtccaggaacacaagtggaaactagatatgtggtttctgccaaaactgagctaagaaagacttgctagaagattctcagtaaacaatgtggctttgctgtctttgttttgaaaagaattaaattagaaaggtgacagtcttcctagagttagaaattaacctcgaggtcagaataacttagcacttattattttccccacatgtaaggttgcatctgaacaatgcacatgtctgttctgggtgtttcattgaatattctaatttgagacagccagagcctgtgaataacctggttactacccactagtgtgtgtgttgtgtgtgtgtttgttgtcatgaaagtgcttacctccttcattgcattacttaattatagttcatctatttcgtcagctgccaagcccatttccaaatgagttaggtcagtttctgttttcccagtttgtttggatatttctctgccactaggaaagttcctgtttcaagttctgtattatatctctaaactctattcagttatgcagagcccatagccttattttggcaagaccacctgttatttctgaaattgccttctttcccccaaacaaaatatttcctaaaaatacttttcccaaatcttgtccttcccccagcaaaaaagagcgagacatttattttaaattttagcatacatgttataactgctttatgtagttatgactagggaataaagttccagcctccacccttaacacatacagatttaaattgctatgcacaatcatttggttacttttaaattttacacttgtttaatattgaggctcttgttttataaattggggaactgtgacccaagttcacatagaaaaatagtgacaaagtgagagtccacacttgggcttgctagcatttttggcctactgaacattaagtagaagagttgaaataccggataacatttttttaaataatctataattttagagcagaattttgtcttttttatcttgtgatttttctaaagagaggaggataaatttttatgttgaattctgcagttatgttcaggggctttctatttaacatcaaacatttttattcatgcctacatgggtttttgaatatgttcctgaatgacatctccaagataatttagtcgtacttcatcaatgagagagaattaagcagaagaaatattcttttttgaaaatatgaggagcataaatctcaatgagacaataggcttgtctttgatcatttctgttgactctgagagtttatgagttacctgagtcttggcacaacctgagatgacaaatcttgtcagaaaacgtgatgacaggcctttcctgtctggattttgaccaggtaccctcaccaccttctgcacagtcttgccatgtgagcagcttgggtaattggggtgtctgattcagcactaagacccaaatccaggagttgagaagaaaactaacagttactaaatgcctactgtgtggcagccatgttgtgtattaggtgctttaaatacatcatcacctctacttcttaaaataactgtgtgaggtagatttgattagcccagtgaagtcaagtaccttacaaagactcagagatagtaaatggccaggtcactctgtgataatgaggaaagagccaatgagattcagggttagcaggagcataataaacatagcagattctaatagagaagttccagagtagctggggctgctccagggttcagaccctctcataggcacagcacatgtacaaatggactttctgactctgtgcaaaatcaggcaaataaaaggtgactattctcttaagctgtgctaaaatatgttgaatttttacttaatgttcataatttctaatcaacacagttcccctaagatatgatttttattatgaagcagtcattgaagtcagttgactggggcccttatttttatattttccaaggtttacattaagtaaagcaataaagagggtaacttatgtctgttttattccttgtattctttgtatattattgtgaattggatatagcattgataagggatcaacttgggatctatagcccattcctgttaactgtgagaacgtaaatgtatttccttggtttaaaaaaaataacaatactcatataatcacttcggagaaactgaatttgaatgttttctgtctatttttgcaaaagaatctcccatttcctggttaatgttcacgtgaaagatgcaaatgtcaagtaagaaatcctcttcaaagagaatgtaaattaaggtggggtttcctcatctgtcaatctttactttgagtgtaggcctgtacaaatcgtctaattaatatggctgtaactgctgctgggaacattccatcgggagacaatgagaacacttcccagtggtgtaatagaagagatcctcagggaggagtagtctgacagccattgccttgacatggcaattctggaacctttgaaaaaatgaagtaatgccacatactcagcgtcttctggagatgcagtttacctaagactgggtgtttagttatagggcacataaaggttgagtggccttctaggttaaagtaatgatttaacttactaggatactatttataatactcaggatgatttgataattgtccagaaaaaaatggattttttaatatatctcataagactcttaatatataggtttatcctccatctccttttttaaaaatttcagtagcatttggggtacaattggttttttgttacgtgggtgaattctatagtggtgaattgtgagattttagtgcgcctatcacctgagtagtgtacattgtacctaatgtgtagttttttttcaatccctagcccaccttccacccttccccttctgagtctctaaagtccattatatcactctgtatgcctttgtgtactcatagtacatagtacatagtacatagtactcatagtacacatagtacatgtataagtgagaacatatggttttttggttttccactcctgtgttacttcacttggaataatggcctccagctccatccaatttgctgcgaaagacattatttcattccttttaatggctgagtagtattccatggatatatggatgtattccatggagatatatgtaatattcagaaagaaaagtattaaacattaatcttttaggttaaaaattctcaattttaaatttgaggcatgaaagtgattgatacgtgcacacacacacacatctttatatatgtaagttttatagtcttgaactaagaggcatagtgtatagtgtataaaatacagatttcatgcaccagttttttctttcatactttcagaaagagtgatttatctctgagcctcagttttctcatccgaaaaaaaaaaggttgtccacaataaccttgtcaggtaattgtatgtagatttaatggataagatgatacatgaattcatagaaagcacttttaaaattagagctgtcatcataaaaatggtttcttacaaaaaaaaaagcctcatttagttcttaggatgcctttttagcccagaaagttgttattgttcccgttttacaaatgaggaaacaggagtacacagcatgtaaggctttgggtttgaatacgcttgtatcctttactgtcaatgccctcaagtcactctttacttttggtgaaagtactcatcctttaagactgaaaaaggagccacttccttaggcacttctctgataagccctgaccctcctccattgcacctttcccattccttttgtcctatggccctgtcacaccacacatcacactgtaagtgtgtgtataactctatccctccttgctggtgctatagtcatcttttatcatttctattgtgataggcttatattaaacacaattaatatttgctagatggatgatcacattgatactttatttggagttatcaccactatgttatagactcaattagctgcactttaaaaatgtatttaaaaatattaaaaaagatattttgagaagcaaaatacctagaggttaagtaacagttttggaaaattcaattctgttgttgtttctgatgaagtctaataagttttcttctctctctttcacatttttatctcttattatattattatattattcagtattaactgaagatatttgtgtgtgtgtgtgtgtgagagagagagatagagagagagagacagaaagagaggaagagaggaagagagaggggttactgagctatgatatgactgaataaagtggcagtgatatgactgccagtggcagaaagagaagcattgttttagaaattaaagaaaccttagagaaatctaatccaaacttcatttcaccctctaccccacctcattccttgttctctgttttcagagataaggcagctcagttgcagggaaacaaaataagtatgtgagctagaactggattccatttctcatgagtctaatgcagggtttttcaaccttgtctcagttgacattagggactaaataattctttgttgcagggaggctgtcctatgcattgcagggtgtttagcagcaaccctggtctctacccactagatgtcagtagcatccccagtcgtgacaaccatcatagtctccagacattaccatatggtagcaatggtccccaggagcaattttgccaatgagggatacaattttgccaaccttggttggcaattttgctcctggtttagaaccaataacataaaatatacttttttttaattgctgttacacattgccacccatacttcacagtttggaaaattagtgcttgagttaccaagacaaaattaattttaatgataatctggatacaaatataaagcccattctcatgtttaaaaaatcagcttggcaatatttattgctgattttagcaccgttcacatctaataatgatgagtcttatttacgatggaatcatgaatactgtctctgattattcctttgataaccaccctttacttccttttacaactctactctcttagctctcagcaaacttaattttcttttttctctaatttctttttctcttttctttgccacttctgtctgctctctaccacctgtttctcaaagttctgttattttccagttcatactgttttccttggaacatataaatgtcttccattcctttaaaggcagtatctcctcatatgactttcaaatagacttctcctaatctccaaataaattcttattcctttactgtattcccaacagcctcaaaaatataaataggtaatacctatagataaacattaaactcaaatatgttcactcccttcatgccttcatgcccaaatgccaccacaagcctgctgtcctgcctatgtctcctccttttttaatggcagcattctctgttttttttttttctgactagaaacttggcatcatctataaattctctcctttccttaccacccttaggtgtccaacttctttaagtctatttagggcaggaacaatgtcttttgtaccagttttctttccagtgttttgttcaatatcttgcatgtagacaacgctcaatagatatttattgagtaaacattatttgacaaatgtagttactaaaagcaaggatggggtaagctgccctcctttttgatgattggattgtaactaagcccatcccaccagctatcatgctatggaggcatatgtggctctcactgaagtcaaggtcgccaatgtcaactcaaactatattttcataaactatattatctgaaagtagaattccttagcagcctgcagtgtgtgagttgtattatgtgggttctctgaataaaaagtaattaatttcgagtcttttgaaatcatctttaatggattccctttctcttgttttgtgtgctctcactgattaaaactttatccttgcagattcatgtttggccataggcatctacagagaatacaatatagtcaatatgcttctcaagatgccattaaatatccaggcttcctgccacaatgtggccataatgaaaagaaggcaaattgcagacacttatagtccaaactgttgcgccttcaggagatgtttcttttggaataataatgtaagaataatttaagttggatttatagaagtgagaagcccgatggaagggagtcaaggtagaaaaggttataaaaaagctcttcttatgtaagattgtcttgagaaaaaaatatgtttccaacagaaaatttgaaacaatactctataaatgaagctttggcttttaggggaggcaagtcccacctttagagattttagtcacagagttccaaacactcagattaatttaaattgtactttttttttttttttttttttttttgaaacagagtcttgctctgtcaccaggctggagtgcagtggggtgatctcggctcactgcaacctctgcttcccgggttcacgccattctcctgcctcagcctcccgagtagttgggaccacaggcgcccaccaccacatctggctaatttttttttttttttttttttttttggtattttggtttcaccatgttggccaggatggtctcgatctcttgacctcatgatccaccagcctcagcctcccaaagtgctgggttgtactctttacataagagttggtatgtattctcctgcattctggaaatacttccgttatgaacaagatatacatctttaaattcatatttagtgcaaaatagataattcccttatattttgactcactgattctttatttgactagctttaagtatagcattgtatgataatatgtaagcgaaatatattagcatttgaagtatgatttagaaatgactacctaaattggaaagtataacttaatgcttatgactagaaacacatggcatattaatatttttgctacttgtcaaggaagattctatggctatttttcaaaactcaaaattaaaataattacttatttttaacctgttatattaaccttgggtttcatatgttttatctcaaattgctatagaccgtttttaccttaggtcttaatgaagtgcagttacaaagctaacattaaaaatatataggaatagaattattactggcagaaggcaaggttagttttctatagatttatatatatgtgtgtatatatgtgagtgtatatatatatttatatataagtaatatatgtatatatgtgttcatatatatttatatataagtaatatttataagtatatatgtatgtatatatataagtatatacgtgtgcgtatatatatctatacacacacacacacacacacacatatatatactctctgaaaagtaggttgctactagaaggtgctgacagtcttttcagtatctgatgtgataatgagttttagagttattttgaccaaggtgaagcaagagcttatcaaatagtggaattaaatttaaaacaaaaagacatccaaaaacagtgaaggcatattcactccttaaaagcacacaagatccaacaagcctattacgttatagacaaattctaaaatcacagactgccatggaagatggtagaaaatgaacagtctgagtaggttggcatgtgaccacagcaaaagtgtgaacaaagaggattttgctatgtgtttgggctggacaaatgctatgattctgcacaagtttgcttttctggtctaaatagcctaaaaggttaaactgggaaaatgagatgcatttcttttattctgtaatctatctgattttaatttggatcatttttattttcttgattgttttccagaatagtcattttaccctaagatttgcaattattttgctgacttggcttggtcatccagtcaccaaatcctagcctcctctgtactggcctccttctggatgagccctcagtgcaatccttaggaagcaaggtaaatccaggcacaatggctcaagcctgtaatcctagcatttttggaggccaacatgggaggatcattgagcccagggattcgaggctgcagtgagcagtgattgcaccactgcactccagtctgggcaaatgagtaagagcctcgaaaaacaaaataaatataaataaaaatgaagcaaggtcaaaataaaccgtatgcaataggaagtacattttctacatctggcattttgtctgactgttgggcaaccacttcttagtgctccagggcccacgacatttactgctattgccattcctatgatggcactcaacctctcccacgcgcggtccccaatattgtgtaagggtgtaggctcggtcctgactcacagggaagaggcgatttgtatcctctgagtcactggcaccacttcctgctggcacatctgagatttcactgaaacataatctgaaaaatgaaggcagagagatatataggtgaggttcacattcctaaaacccatttggaaatttgatagaaacaatgacctctgaatgcatttccatttttgcagctgtattgtaaaagaagcgccaactgccaattttgagtttacagatcatctgtgttatatcacctggcaagaaattcctctgtatcttagttaccaatgccaccagacaagaaatgccaccagatctgtttttttgacatagatactatctaaaatatttagtatcgtagtgaattatttgcttaggaagaatctactgtcaagaatgaaaaagccaaatatagtatttgaggtccaatcatagagaaattatgttcaaacaacactaaggtcatgaaaagcctgacattaaggaaatatatgcatgctttagcatttattccctccctgtatgactcattaaagtaatgactagcgattcttttttttttttttttttttttttttttttgagagggagtcttcctctgtcgcccaggctggagtgcagtggcgcgatctccgctccctgcaagctccgcctcctgggttcaagccattctcctgcctcagccgcctgagtagctgggactacaggcgcccgccaccatgcctggctaatttttttttttttttttgtatttttaatagagacggggttttaccgtgttagccaggatggtctcgatatcctgacctcgtgatccgcacgcctcggcctcccaaagtgctgggattacaggcgtgagccaccgcgcccggcctgaccagcgattcttaaggttaacaggatagtggatgtaatatttctctggagatagattttttattcattggatcgcattcactcttctaccctagtttgcaagtgtttgggagcagacgcatattgcaggaacatttgagaaccactattttaaagcaatagtgctgtgcagatggacatgacttagaattaattttgctgttttcttggccacatccatccatgatggaattgcagttatacactttaatttgaaaggaacatttaaaattatatacgattccacctgtaaaatatcctgctgtaggattaatgcagcaagtctcacagaaactatcctgagcgatggactgtgtccaagggagcgtcacgagtaaggaaagtccagtctttgtggaggcacaccctgggctgaacattctttaattaacaaagacaaacatttcacctgtggcctgaacaactggaacaaagtttccaacggtggaaaaactaacaactactaaaaacctttaaaaaagaagactaacagcaacactccaaagtaagttggattctataatagttgcaggttgcaattggaggcaattccaagcaggaaaggttaggctttagtttatgcaaaggatagagaaactagcttcaaatgtgcatttttttccccctggctagcattttcctggagggagaattggtaatgtctcctccaaagctttcctcagttgaagaaatatgtaggaataggaatgtcaaggatgtaagcacgtgcaactaaaactccaatttgtaccgaggaaactgtattagttaaaggatttcattcttcagtagtgaaagtatggtgaaattattattgggatataaaacaaaattgacttgaatgagaatctagcttatcctccataaaaagcttagtgaaatagttttcaactctgttcaactgacaatgaaatctaggctttagctatttctttgtcattcaacaaaaatatattttttgtagttccacaagagcaattgaagcagcatttatattgtagaaaaagcatggagtggggaggggataattctgaactttaaagacaacagaattttcaaattgttgaagaacaggagacttgatttcaaaagataaatttgtaactcttctcttctgtggtcacaagtgatcttagacaagacatttaatttaaatacactgagggtatttgagactaataactacttcacagaattaagtgtgaaatttgatatatgaagttatacattatgatgctgatgccgatgtgtaatttacttttcagaacccaaaaatatacaatcggcttaacagatacaagccttctctaactgagaaaaaataaaattcttgtattacacgaattaaatctttctttacagtaccaaattacagagatagacaaacttgttataaaccagaagagggcactgtccacatacactgctaaaaccagaggctagaagttgagagtcaaggaacatttatgggctgtgacagccatttcagaaaaaaaaaaaaaaaaacattagtttatttcactgtattctccccaaaaatctataagataggaaaaattaacacccagaaaagtaaattaattttttttcaagatcacgtagctcaagttttcctcacaagactgcctttccaccataatttgtggcctctatgttgggttaaatactctacttcaattacagctatcataatttgttctctgtgatgtccattatactctagtattattgcctatttccaaattctataaagtggcccatttaacaatatgtatccttgggaaaagttatttaaactctttatgctttagttttctctaatggggataataatagtatcttcctcaaattggccctgagaggactaaataatataatacagataaggtgaataggaccatacctggttgtattagtttgttttcacactattataaaggacttccctgagactgggtaatttataaaggaaagaactttaattgactcacagttctatatggctggggaagtctcaggaaacttatcatggccgaaggcgaaggggaagcaagcccctttttcacaaggtggcaggagagagaggcgggaaggaggaacttccaaacacttataaaaccatcagatctcatgagaactcactcactatcctgagaacagcatgcaggaaactacccgcattgattcaatcacctccctccttggacacatggggattacgggtccctctctcaatacatggggattgcaattccagatgagatgtgggtggggacacagagccaaactatatcactggtacatagtacatgttcaagagatggatcgtcctctgtctgaactgtgaaagaaatggaaagttgaatatattttgttgcctttatggaggcattaatcatcctttcataacagttaccacttacttagctacttcaacgaaacaggttgattcaaactcttcctgtgcttacagaaactggattctcagtgtggttcatctggcatgcctattccttctcatattagataggatatattctgattttacctagattacatttacctagctgcctatcagtcaaggagaattttcaggagtaggaagtcattctagttatcacgcaccctaggccaataagcaccggaatccaaacgaaaatgtccaaccgactaaacaaaatcacataggaggtatttattctcaaaagacaacctttagggtgtagaaaaagcaagcttaacacacatgtcattatcccccacggtaggtattattcatttcttcaaacaaaatatgtctaatttttttcaaatctcagttctgaaattcgttattccccaaagcaattgcaagctgaagccattaattaatttagtggagcttaattgctgctactactactactaccaccaccattagtatttactatataacagttacttaaataaattggaaagagtgtttgaagtgcaaatacctaaagcttaaacagaagcagctaaagctcttaactaaacatctgtgaaattacaagggttcttcttatgatgattcctacacaattcagaaagtacttgagtcattcttgatatctatgttccaaaattttatcttttcactgaatacacatgatgaaacagctgattcagactcttcctatgctgatagaaactggattctagggctcagtatggttcatctgggatgcctgttcctcctcatattagacaagatatattctgattttacctagctttcactgtattaattaaaatctatactcatgtgtaatgcaatgcaaagagtaacttaggtacataaatcaataatgaatgtttcttaggttgagtttcttgttgttactgtaagtggaaaccgattttttatttagagcctttttttgtgatggggtctgattaggagcatttctctgaacacatgatggaataaaacagtggaaattctccaactgatgtgcgtcttaagaaatcaaacttcaaaatcaaatctttgaaaatgttactgtgaaatatttagagcaggtcaaatctgtaaccgtgaatgtaatgccaaggcttttatccttccacagaatagctgggggagtttgtattttctgttacatgcctgtttccatgaattattttgttttatggttttgatggaccaaatctgtgaaacaaaacaactctataagtactgcagttatgtagaaatttgatcaagatttctttccttaacacattagttatatattcgatttttcttcataaataggtttccatcttctacaggcagtcctcagtacaactgtgattccatcatgtatcccaggagagtccagtgataactgcacagctttaggtaagcccaagtttgtcaatgtggcatcaagagactacatatttttaaacagaaatataaactcaaagactataagtatgtgataattttttaaaaaagggtaagaatagctgctatattactttttaaatcaccatataaactaatgttctgaaaaaattatataaaggaataactggtaggagagggaccggataaattatatacacagatttgattgtgaagagatagggaacaacaacaacaaaaaattgcattccctttggccgtctcctggcactttactgcgaaacatcctcagagaccacactgactggattccaggcaaaacagcaaaacaggaaaactttgtacagaataggttctctatctctctctttctacccctctctctctctttgtaagaagaacaaatgatagtcgtttctttctaggcacagtgttcattcagaaaacatttatcgagtatgtagtatgcaccaaacgctgtgctaaggcatacagatacaaagataagtaatacagttttttcccctcgaggactgtggactccagatatggtccaagggggatcagctttatcttcattctgagttattgaatcaagataactgagttattttgaggaagcaggatattttccataacaactttatcttttgtccctcaccatcaggttctctggaggtttggtcagcctcctccgcaggtttggtcagcctcctccgcatcatctttttttttttccttctttggttatttgggcaagagtattacaatcaaattgctattttaaaagtaattttataagcatctttcacattttggtatctaaagctttctaaagtgaattttacacaaaggctcctattttcattgctgttatttgtctaccagaggcctttctcactcagggtttgtctagtttggattcaggcctcattatcagagatattgggagactggttaatttcattaatggtaacctcagcaacttgaaaacatacaccaaagccagccttactgattaaaaatccactgtagaattaagctcctttgaattaattaatggtatgagcttgcaactgctttggggagtaatagatttcagaaatgttttgggacttgagaaaaattagacaaattttgcttgaagaaataacacccacttggaggataatgacacctgtgtgttaaatttgccttctctacccttacaggttgtcttttgagaatgaaatcctttcatgttatcttcttttgtttagtctgttggacattttcctttggattcaagtgtttattgattggtctagggggtgtgacaactagagtgacttcctacttctcaaaattctccttgacagattggcatctgacttgttgtgtagaagtagttcagtggttactgttatgaaagagtgagaaattcttccatgaaggctgcagaatatattcaactttccacttcttttacagttcagacagaagacaatccacgtgtggctcaagtgtcaataacaaagtgtagctctgacatgaatggctattgtttgcatggacagtgcatctatctggtggacatgagtcaaaactactgcaggtaatatgtcagaaataaacaaacacagtttgtaaaattttgttttatagatttaggggtacaagtgcagatttgctagtggatatattcagtagtggtgaagtctgagcttttagagtacctacccctcaaatagtgtgcatggaacccattaggtaatttttcatcccttaacccccccaaaactcttctaccttttgaagtctccagagtctattactccactctctatgaccatgtgtacacattatttagctcccacttgtgagaacatgtgataaacaaatgcagttttactctttgtatttctatttttatattttgaaattaccctatatttccatgggctgttaaatgcagtatatatattattagaaacttttctgagtttttaaaaattaggtagtaaatagtagcttttaaattgcacacatatgtcagaggtgcagagcagggaggacttctgatgcttctcacacttgccaagatggtgtctctctgctttggatcttttccttcaatttctatatcaggtattgttttaagaattgattccaggccggacgcgttggctcatgcctgtaatcccagcactttgggaggccgaggcgggcggatcacggggtcaggagatcaagaccatcctggcgaacacggtgaaaccccgtctctactaaaaatacaaaaaaaaaaaaaaattagccaggggtagtggcggacgcctgaagtcccagctactcgggaggctgaggcaggagaatggcatgaacccggggggtggagcttgcagtgagcggagatcatgccactgtactccagcctgggcaacacagcgagactccgtctcaaaaaaaaaaaaaaaaaaaaaaaaaagaattgattccaggccaggcgcagtggctcaaccctgtaaccccagcactttgggaggctgaggcgggcagaccacttgaggtcaggagttcctgaccagcctggccaacatggtgaaaccccgcctctactaaaaatacaaaaattagcgaggcgtggtggcgcaagactgtagtctactcaggaggctgagataggagaattgcttgaacctgggaggcggaggttgcagtgagccgagagatcacaccactgctatccagcctgggcgacagaacgagactccatctcaaaaaaaccaaacagacaaacaaacaaaaaaagaattgattccactgatttagacaaaaggaatctcaaacctgtacaacttacaaaacaccactgtggactgtcagccaccatgacagctgaacacaaccgtcattttaatactacaatttagtccaagagctacgtggagcccttttatcattactggtctaactcaatctttgaaatcctctttacaatctttagcaaattttgttgatttcttgcattacagtgtgatgttagtccttataaaactaattcataaccatgatttcctttttaagtaactgatctttctttcttccgtattttccttcaggtgtgaagtgggttatactggtgtccgatgtgaacacttctttttaaccgtccaccaacctttaagcaaagaatatgtggctttgaccgtgattcttattattttgtttcttatcacagtcgtcggttccacatattatttctgcagatggtaagtcagtgtggttttatactctgcttttacaaattacttttacataatgcagacctataaactgggtaaaaatatggataaagtattagagagataagatcaaacctgtacaaatgatatttacaagagttgagaaactattaagtattatgcccaacacctgagtgatgggatcagctgtacccctaatctcagcatcatacaatatatcctgttaagaaacctgcatgtgtacccccgaatctgaaataacttgaaattattttttaaaaatatgtttttgctgcagaacatctggattgaactttattatcagctctgatacttattacctatgtgaccttacataagtcaaattgagagtatcaattcccttctttatcaaatatggacagaaattattatcttacattagttatagggtggttgcttttagtatgtaatatgatatttcatgtgaaagtaaatcataggataggtgctactgttatagttaaccacctgaatttaattcctcaagtcacattttttattttataaaaaacaaccttgtaaattaataaccttagaagcttgggttatcttacagtttaaggcagactggtggaactatttctagacaattataaaaaatggttgttaaaaaatagtttgtgtcagtcccccaaaacagtcgtacctcatcctcatgtgcattattgtcacaagctgaaaacagaaaaatagaaagtgaacattgaaagtatagtttggcatttttttaagggttaggagcaaaggatgggaacagtgtgaattaattaataacagttccctttaaaatgtctccatgaaacatattttgaaacagttacaaattactcaaggtgaatttacgtttttatttttctgtgaaagtagtgcacttccaattttgaaggtctgaaagtgtgctactttcataatattaaatttattttgtccacatttgattctaagtatccatcaaataataatgccttcctaataagttgccatgacagaactaaatattattaaaactgaaatatgcctgcaaatctttgaccacaatcctttcctttatagatggggcactgaggtttagagaggttcattcaaatatcccagctcatatagttgacaaatgccagagtgaagaacaaattctttctaattcatattcttacagtaaacatagacatgatgtggtttcctcaaagctacatgtcttatttccaaaatagggacaaaataaactcaaaaatattaggaaaatagcttaatgaataaatgaaagaagattctaaattatgataaatctatgaatcctagctatgagaccttggaccttgggcacattatatacaacccatttgtatttcactttcttcatctgtaagatgaggatggtaacagcaaatgtgagagtaaaataaataatgcatgtatagcacttagaaaattgtaggtcaccaaattagtgcctgataaatattatttttattttgattagtgatagcattatatcaatgtgatggaaagagtgtattaatgtagcatgatttgtaaatattcattccttagaagggaggaaggaaaaagaaagagagacagaaaaagaaaacctaaaattcagacttaaatgtggccacacgcctcttggaatttcacaatattcatgatcacgttaaagactttgagaaactctttaagtgtattttatcatttcattccaaaattgtttgactacagcacatcacctcttcatccctctttttttttttttttttaacattgtccaacctaaatctgttcaactttgtcattttggaaacactatgctaatgtgcctttggagtccatatataacacacttgttcctttgctattaactgcagtgctaacagtttcgtttgtgaatatttccaggtacagaaatcgaaaaagtaaagaaccaaagaaggaatatgagagagttacctcaggggatccagagttgccgcaagtctgaatggcgccatcaaacttatgggcagggataacagtgtgcctggttaatattaatattcccattttattaataatatttatgttgggtcaagtgttaggtcaataacactgtattttaatgtacttgaaaaatgtttttatttttgttttatttttgacagactatttgctaatgtataatgtgcagaaaatatttaatatcaaaagaaaattgatatttttatacaagtaatttcctgagctaaatgcttcattgaaagcttcaaagtttatatgcctggtgcacagtgcttagaagtaagcaattcccaggtcatagctcaagaattgttagcaaatgacagatttctgtaagcctatatatatagtcaaatcgatttagtaagtatgttttttatgttcctcaaatcagtgataattggtttgactgtaccatggtttgatatgtagttggcaccatggtatcatatattaaaacaataatgcaattagaatttgggagaagcaaatataggtcctgtgttaaacactacacatttgaaacaagctaaccctggggagtctatggtctcttcactcaggtctcagctataattctgttatatgaggggcagtggacagttccctatgccaactcacgactcctacaggtactagtcactcatctaccagattctgcctatgtaaaatgaattgaaaaacaattttctgtaatcttttatttaagtagtgggcatttcatagcttcacaatgttccttttttgtatattacaacatttatgtgaggtaattattgctcaacagacaattagaaaaaagtccacacttgaagcctaaatttgtgctttttaagaatatttttagactatttctttttataggggctttgctgaattctaacattaaatcacagcccaaaatttgatggactaattattattttaaaatatatgaagacaataattctacatgttgtcttaagatggaaatacagttatttcatcttttattcaaggaagttttaactttaatacagctcagtaaatggcttcttctagaatgtaaagttatgtatttaaagttgtatcttgacacaggaaatgggaaaaaacttaaaaattaatatggtgtatttttccaaatgaaaaatctcaattgaaagcttttaaaatgtagaaacttaaacacaccttcctgtggaggctgagatgaaaactagggctcattttcctgacatttgtttattttttggaagagacaaagatttcttctgcactctgagcccataggtctcagagagttaataggagtatttttgggctattgcataaggagccactgctgccaccacttttggattttatgggaggctccttcatcgaatgctaaacctttgagtagagtctccctggatcacataccaggtcagggaggatctgttcttcctctacgtttatcctggcatgtgctagggtaaacgaaggcataataagccatggctgacctctggagcaccaggtgccaggacttgtctccatgtgtatccatgcattatataccctggtgcaatcacacgactgtcatctaaagtcctggccctggcccttactattaggaaaataaacagacaaaaacaagtaaatatatatggtcatatacatattgtatatatattcatatacaaacatgtatgtatacatgaccttaatggatcatagaattgcagtcatttggtgctctgctaaccatttatataaaacttaaaaacaagagaaaagaaaaatcaattagatctaaacagttatttctgtttcctatttaatacagctgaagtcaaaatatgtaagaacacattttaaatactctacttacagttggccctctgtggttagttccacatctgtggattcaaccaaccaaggacggaaaatgcttaaaaaataatacaacaacaacaaaaaatacattataacaactatttacttttttttttttctttttgagatggagtctcgctctgttgcccaggttggagtgcagtggcacgatctcggctcactgcaacctcacctcccgggttcaagagatcctcctgcctcagcctcctgagcagctgggactacaggcgcatgccaccatgcccagctaatttttgtatttttagtagaggcggggtttcaccatgttggccaggatggtctcaatctcctaaccttgagatccaccctccacagcctcccaaactgctgggattacaggtgtgagccaccgcacgtagcatttacattaggtattacaagtaatgtaaagatgatttaagtatacaggaggatgtgaataggttatatgcaagcactatgcccttttatataagtgacttgaacatctgtgcccgattttagtatgtgcaggggggcgatctgggaatcagtcccctgtggataccaaggtacaactgtatttattaacgcttactagatgtgaggagagtctgaatattttcagtgatcttggctgtttcaaaaaaatctattgacttttcaataaatcagctgcaatccatttatttcatttacaaaagatttattgtaagcatctcaatcttggtttgtcagtttatcttaagcatgtcaattcataaaaacaagtcatttttgtatttttcatctttaagaatgcttaaaaaagctaatccctaaaatagttagatctttgtaaatgcatattaaataataaagtatgacccacattactttttatgggtgaaaataagacaaaaataatagttttagtgaggatggtgctgagtaaacataaaaactgatttgctctcagctgatgtgtcctgtacacagtgggaagattttagttcacacttagtctaactcccccattttacagatttctcactatatatatttctagaaggggctatgcatattcaatgtattgagaaccaaagcaaccacaaatgcataaatgcataatttatggtcttcaaccaaggccacataataacccagttaacttactctttaaccaggaatattaagttctataactagtactcaaggtttaaccttaaaattaagatttccttaaccttaaccttaaaattgatattatattaaacatacataatacaatgtaactccactgttctcctgaatattttttgctctaatctctctgccgaaagtcaaagtgatgggagaattggtatactggtatgactacgtcttaagtcagatttttatttatgagtctttgagactaaattcaatcaccaccaggtatcaaatcaacttttatgcagcaaatatatgattctagtgtctgacttttgttaaattcagtaatgcagtttttaaaaacctgtatctgacccactttgtaatttttgctccaatatccattctgtagacttttgaaaaaaaagtttttaatttgatgcccaatatattctgaccgttaaaaaattcttgttcatatgggagaagggggagtaatgacttgtacaaacagtatttctggtgtatattttaatgtttttaaaaagagtaatttcatttaaatatctgttattcaaatttgatgatgttaaatgtaatataatgtattttctttttattttgcactctgtaattgcactttttaagtttgaagagccattttggtaaacggtttttattaaagatgctatggaacataaagttgtattgcatgcaatttgaagtaacttatttgactatgaatgttatcggattactgaattgtatcaatttgtttgtgttcaatatcagctttgataattgtgtaccttaagatattgaaggagaaaatagataatttacaagatattattaatttttatttatttttcttgggaattgaaaaaaattgaaataaataaaaatgcattgaacatcttgcattcaaaatc

SEQ ID NO: 262 - DNA, 9884 bp, Homo sapiens
ggccacccagaggctgatgctcaccatggggcgcctgcaactggttgtgttgggcctcacctgctgctgggcagtggcgagtgccgcgaaggtaagagcccagcagaggggcaggtcctgctgctctctcgctcaatcagatctggaaacttcgggccaggctgagaaagagcccagcacagccccgcagcagatcccgggcactcacgctcatttctatggggacaggtgccaggtagaacacaggatgcccaattccatttgaatttcagataaactgccaagaactgctgtgtaagtatgtcccatgcaatatttgaaacaaatttctatgggccgggcgcagtggctcacacctgcaatcccaccagtttgggaggccgaggtgggtggatcacttgaggtcaggagttggagaccagcctggccaacatggtgaaaccccgtctctactaaaaatacaaatattaatcgggcgtggtggtgggtgcctgtaatcccagctactcgggaggctgaggcaggagaaccgcttgaagctgggaggtggagattgcggtgagctgagatcacgctactgcactccagcctgggtgacagggcgagactctgtctcaaaaaatagaaaaagaaaaaaatgaaacatactaaaaaacaattcactgtttacctgaaattcaaatgtaactgggcctcttgaatttacatttgctaatcctggtgattccacctctctgttgttcccattttacagaaggggaaacgggcccaggggcagggagtgtggagagcaggcagacgggtggagagaagcaggcaggcagtttgcccagcatggcacagctgctgcctcctattcctgtgcaggaagctgaaagccgagctactccacacccgggtccgggtccctccagaaagagagccggcaggcaggagctctctcgaggcatccataaattctaccctctctgcctgtgaaggagaagccacagaaaccccaagccccacaggaagccggtgtcggtgcccggcccagtccctgcccccagcaggagtcacacaggggaccccagatcccaaccacgctgttctgccgcctgcggtgtctcaggccctggggactcctgtctccacctctgctgcctgctctccacactccctggccctgggaccgggaggtttgggcagtggtcctgggctcctgactcaaaggagaggtcaccttcttcttgggcgagctcttcttggggtgctgagaggccttcggcaggtcatcacgacccctccccatttccccaccctgaggccctctggccagtctcaattgcacagggatcacgccactggcacaaggagacacagatgcctcgcaggggatgcccacgatgcctgcatgtgttgcttctggttcctttcctccagttccaaccgccgcactctcccacaccagtgtgacagggggcccatcaccctagacttcagagggctgctgggaccctggctgggcctgggggtgtagggccaccctgcccttccccacctggaacctggcacaggtgacagccagcaagcaatgacctggtcccaccatgcaccacgggaagagggagctgctgcccaagatggacaggaggtggcactggggcagacagctgcttctcaacagggtgacttcaagcccaaaagctgcccagcctcagttccgtcagggacagagggtggatgagcaccaacctccaggcccctcgtgggggtggacagcttggtgcacagaggccattttcatggcacagggaagcgtggcgggggtgggaggtgtggtccctagggggttctttaccagcagggggctcaggaactgtggggacttgggcatggggccatcgactttgtgcccagccagctaggccctgtgcagggagatgggaggagggaaaagcaggccccacccctcagaaaggaggaaggttggtgtgaaacatcccgggtacactgagcattgggtacactcctcccgggagctggacaggcctcccatgtgatggcaaacaggccgacaggagacacggctgttgctcgtcttccacatggggaaactgaggatcggagtcaaagctgggcggccatagccagaacccaaacctccatcccacctcttggccggcttccctagtgggaacactggttgaaccagtttcctctaagattctgggagcaggacacccccagggataaggagaggaacaggaatcctaaagccctgagcattgcagggcagggggtgctgcctgggtctcctgtgcagagctgtcctgctttgaagctgtctttgcctctgggcacgcggagtcggcttgccttgccccctccggattcaggccgatggggcttgagcccccctgaccctgcccgtgtctccctcgcagctgggcgccgtgtacacagaaggtgggttcgtggaaggcgtcaataagaagctcggcctcctgggtgactctgtggacatcttcaagggcatccccttcgcagctcccaccaaggccctggaaaatcctcagccacatcctggctggcaaggtgggagtgggtggtgccggactggccctgcggcggggcgggtgagggcggctgccttcctcatgccaactcctgccacctgcagggaccctgaaggccaagaacttcaagaagagatgcctgcaggccaccatcacccaggacagcacctacggggatgaagactgcctgtacctcaacatttgggtgccccagggcaggaagcaaggtctgcctcccctctactccccaagggaccctcccatgcagccactgccccgggtctactcctggcttgagtctgggggctgcaaagctgaacttccatgaaatcccacagaggcggggaggggagcgcccactgccgttgcccagcctggggcagggcagcgccttggagcacctccctgtcttggccccaggcacctgctgcacagggacaggggaccggctggagacagggccaggcggggcgtctggggtcaccagccgctcccccatctcagtctcccgggacctgcccgttatgatctggatctatggaggcgccttcctcatggggtccggccatggggccaacttcctcaacaactacctgtatgacggcgaggagatcgccacacgcggaaacgtcatcgtggtcaccttcaactaccgtgtcggcccccttgggttcctcagcactggggacgccaatctgccaggtgcgtgggtgccttcggccctgaggtggggcgaccagcatgctgagcccagcagggagattttcctcagcacccctcaccccaaacaaccagtggcggttcacagaaagacccggaagctggagtagaatcatgagatgcaggaggcccttggtagctgtagtaaaataaaagatgctgcagaggccgggagagatggctcacgcctgtaatcccagcactttaggaggcccacacaggtgggtcacttgagcgcagaagttcaagaccagcctgaaaatcactgggagacccccatctctacacaaaaattaaaaattagctggggactgggcgcggcggctcacccctgtaatcccagcacgttgggagcccaaggtgggtagatcacctgaggtcaggagtttgagaccagcctgactaaaatggagaaacctcttctctactaaaaatacaaaattagccaggcgtggtggcgcttgcctgtaatcccagctactcgggaggctgaggcaggagaatcgcttgaactcaggaggcggaggttgcggtgagccgagatcatgccactgcactccagcctggagaacaagagtaaaactctgtctcaaaaaaaaaaaaaaaaaaaaaaatagccaggcgtggtatctcatgcctctgtcctcagctacctgggaggcagaggtggaaggatcgcttgagcccaggggttcaaagctgcagtgagccgtggtcgtgccactgcactccagcctgggcgacagagtgaggccccatctcaaaaataagaggctgtgggacagacagacaggcagacaggctgaggctcagagagaaaccaggagagcagagctgagtgagagacagagaacaataccttgaggcagagacagctgtggacacagaagtggcaggacacagacaggagggactggggcaggggcaggagaggtgcatgggcctgaccatcctgcccccgacaaacaccaccccctccagcaccacaccaacccaacctcctggggacccaccccatacagcaccgcacccgactcagcctcctggggacccacccactccagcaaccaacgtgacctagtctcctggggacccaccccctccagcaccctacccgacccagcttcttagggacccaccatttgccaactggggctctgccatggccccaactctgttgagggcatttccaccccacctatgctgatctcccctcctggaggccaggcctgggccactggtctctagcaccccctcccctgccctgcccccaggtaactatggccttcgggatcagcacatggccattgcttgggtgaagaggaatatcgcggccttcgggggggaccccaacaacatcacgctcttcggggagtctgctggaggtgccagcgtctctctgcaggtctcgggatccctgtggggagggcctgccccacaggttgagaggaagctcaaacgggaaggggagggtgggaggaggagcgtggagctggggctgtggtgctggggtgtccttgtcccagcgtggggtgggcagagtggggagcggccttggtgacgggatttctgggtcccgtagaccctctccccctacaacaagggcctcatccggcgagccatcagccagagcggcgtggccctgagtccctgggtcatccagaaaaacccactcttctgggccaaaaaggtaaacggaggagggcagggctgggcggggtgggggctgtccacatttccgttctttatcctggaccccatccttgccttcaaatggttctgagccctgagctccggcctcacctacctgctggccttggttctgcccccaggtggctgagaaggtgggttgccctgtgggtgatgccgccaggatggcccagtgtctgaaggttactgatccccgagccctgacgctggcctataaggtgccgctggcaggcctggagtgtgagtagctgctcgggttggcccatggggtctcgaggtgggggttgaggggggtactgccagggagtactccggaggagagaggaaggtgccagagctgcggtcttgtcctgtcaccaactagctggtgtctcccctcgaaggccccagctgtaagggagagggggtgccgtttcttctttttttttgagatggagtctcactgttgcccaggctggagtgcagtgtcacgatctcagctcactgcaacctccacctcctgggttcaagtgattctctgactcaacctcccatgtagctgggactacaggcacatgccaccatgcccagataatttttctgtgtgtttagtagggatggagtttcatcgtgttagctaggatgatctcggtcttgggacctcatgatctgcccacctcggcctcccaaagtgctggaattacaggcgtgagccactgtgcccggccccttctttattcttatctcccatgagttacagactcccctttgagaagctgatgaacatttggggccccctcccccacctcatgcattcatatgcagtcatttgcatataattttagggagactcatagacctcagaccaagagcctttgtgctagatgaccgttcattcattcgttcattcattcagcaaacatttactgaaccgtagcactggggcccagcctccagctccactattctgtaccccgggaaggcctggggacccattccacaaacacctctgcatgtcagccttaccagcttgctacgctaaggctgtccctcactcattcttctatggcaacatgccatgaagccaagtcatctgcacgtttacctgacatgagctcaactgcacgggctggacaagcccaaacaaagcaacccccacggccccgctagaagcaaaacctgctgtgctgggcccagtgacagccaggccccgcctgcctcagcagccactgggtcctctaggggcccgtccaggggtctggagtacaatgcagacctcccaccatttttggctgatggactggaacccagccctgagagagggagctccttctccatcagttccctcagtggcttctaagtttcctccttcctgcttcaggcccagcaaagagagagaggagagggaggggctgccgctgaagaggacagatctggccctagacagtgactctcagcctggggacgtgtggcagggcctggagacatctgtgattgtcacagctggggagggggtgctcctggcacctcgtgggtcgaggccggggatgctctaaacatcctacagggcacaggatgcccctgatggtgcagaatcaaccctgccccaagtgtccatagatcagagaagggaggacatagccaattccagccctgagaggcaaggggcggctcaggggaaactgggaggtacaagaacctgctaacctgctggctctcccacccagaccccatgctgcactatgtgggcttcgtccctgtcattgatggagacttcatccccgctgacccgatcaacctgtacgccaacgccgccgacatcgactatatagcaggcaccaacaacatggacggccacatcttcgccagcatcgacatgcctgccatcaacaagggcaacaagaaagtcacggagtaagcagggggcacaggactcaggggcgacccgtgcgggagggccgccgggaaagcactggcgagggggccagcctggaggaggaaggcattgagtggaggactgggagtgaggaagttagcaccggtcggggtgagtatgcacacaccttcctgttggcacaggctgagtgtcagtgcctacttgattcccccagggaggacttctacaagctggtcagtgagttcacaatcaccaaggggctcagaggcgccaagacgacctttgatgtctacaccgagtcctgggcccaggacccatcccaggagaataagaagaagactgtggtggactttgagaccgatgtcctcttcctggtgcccaccgagattgccctagcccagcacagagccaatgccaagtgaggatctgggcagcgggtggctcctgggggccttcctggggtgctgcaccttccagccgaggcctcgctgtgggtggctctcaggtgtctgggttgtctgggaaagtggtgcttgagtccccacctgtgcctgcctgatccactttgctgaggcctggcaagacttgagggcctctttttacctcccagcctacagggctttacaaaccctatgatcctctgccctgctcagccctgcaccccatggtccttcccactggagagttcttgagctaccttccatcccccatgctgtgtgcactgagagaacactggacaatagtttctatccactgactcttatgggcctcaactttgcccataatttcagcccaccaccacattaaaaatcttcatgtaataatagccaattataataaaaaataaggccagacacagtagctcatgcctgtaatcccagcacattgggaggtcaaggtgggaggatcacttgaggtcaggagtctgagactagtctggccaacatggcaaaaccccatctctactaaaaatacaaaaattatccaggcatggtggtgcatgcctataatcctagctactcaggaggctgaggtagcagaattgattgacccagggaggtggaggttgcagtgagccgagattacgccactgcactccagcaggggcaacagagtgagactgtgtctcgaataaataagtaaataaataataaaaataaaaaataagttaggaatacgaaaaagataggaagataaaagtatacctagaagtctaggatgaaagctttgcagcaactaagcagtacatttagctgtgagcctcctttcagtcaaggcaaaaagggaaacagttgagggcctataccttgtccaatctaattgaagaatgcacattcacttggagagcaaaatatttcttgatactgaattctagaaggaaggtgcctcacaatgttttgtggaggtgaagtataaattcagctgaaattgtggaacccatgaatccatgaatttggttctcagctttcccttccctgggtgtaagaagccccatctcttcatgtgaattccccagacacttccctgcccactgcccgggacctccctccaagtccggtctctgggctgatcggtccccagtgagcaccctgcctacttgggtggtctctcccctccaggagtgccaagacctacgcctacctgttttcccatccctctcggatgcccgtctaccccaaatgggtgggggccgaccatgcagatgacattcagtacgttttcgggaagcccttcgccacccccacgggctaccggccccaagacaggacagtctctaaggccatgatcgcctactggaccaactttgccaaaacagggtaagacgtgggttgagtgcagggcggagggccacagccgagaagggcctcccaccacgaggccttgttccctcatttgccagtggagggactttgggcaagtcacttaacctccccctgcatcggaatccatgtgtgtttgaggatgagagttactggcagagccccaagcccatgcacgtgcacagccagtgcccagtatgcagtgaggggcatggtgcccagggccagctcagagggcggggatggctcaggcgtgcaggtggagagcagggcttcagccccctgggagtccccagcccctgcacagcctcttctcactctgcagggaccccaacatgggcgactcggctgtgcccacacactgggaaccctacactacggaaaacagcggctacctggagatcaccaagaagatgggcagcagctccatgaagcggagcctgagaaccaacttcctgcgctactggaccctcacctatctggcgctgcccacagtgaccgaccaggaggccacccctgtgccccccacaggggactccgaggccactcccgtgccccccacgggtgactccgagaccgcccccgtgccgcccacgggtgactccggggccccccccgtgccgcccacgggtgactccggggccccccccgtgccgcccacgggtgactccggggccccccccgtgccgcccacgggtgactccggggccccccccgtgccgcccacgggtgactccggggccccccccgtgccgcccacgggtgactccggggccccccccgtgccgcccacgggtgactccggggccccccccgtgccgcccacgggtgactccggcgccccccccgtgccgcccacgggtgacgccgggcccccccccgtgccgcccacgggtgactccggcgccccccccgtgccgcccacgggtgactccggggccccccccgtgacccccacgggtgactccgagaccgcccccgtgccgcccacgggtgactccggggccccccctgtgccccccacgggtgactctgaggctgcccctgtgccccccacagatgactccaaggaagctcagatgcctgcagtcattaggttttagcgtcccatgagccttggtatcaagaggccacaagagtgggaccccaggggctcccctcccatcttgagctcttcctgaataaagcctcatacccctg

SEQ ID NO: 263 - DNA, 14939 bp, Homo sapiens
gtggctcccgcccccagactgcttctttattcattcctaacctttaccttggcagatgaaatataagattcatcaaccacatttgacagcccatggcaggtttcctgttttccatcgtccctctgcaggtcacagacacacagagcccagccgtggcaggctcagccggggtccggggctgctaacaacggctacattcctcccccagggccaagggaaatcctgagcgcaggccagggttgtttggttttgaggtgtgctgggatgaaaggcaccctggaagtggaaggttcggtcattcattaattaattacatctataattgagggtttgttcttaagagcgagtcctttgaaagtactttccttcaaacagtgactgccacaaaggcatcagatattcaccaccttctcggctgcctcagcacagcaagctttattctgggacctgagatcctgttctgagctggctttcccttctccaggctcgctcaccctccctttagaggtggggcttattgggggtggaaaaaggtgtgtgtatctctgttgtttaatgtctggttttttgttgctgttgttgttgttttgttttggttttggtttttggttttttttaaggaaatctatactacatcgaatatgctttcttttgggtggactttaacctaacccattccaggtaaatgaacaatggaaaaacttcacggcaagattagaaagatacctgagcccaatacccgcctgatgtcgtgggccacacctccgggttaccaggggaagggaggaagcaaactgtcatattgatgtggctctaaacaacaacagtgtgcgaaggcccaggggcactttgggattgaccaagaggaaacacaagttgcacaatgatacaatcttgttggtacaattgtcagagaagggaactcccacagcaaaggccataaaaccatccagggcagtctggggcggctcagttctgcggtgccagggagtggagcagagctcagccccgtcccaaacacagatgggaccatgaactccggacacagcttcagccagaccccctcggcctccttccatggcgccggaggtggctggggccggcccaggagcttccccagggctcccaccgtccatggcggtgcggggggagcccgcatctccctgtccttcaccacgcggagctgcccaccccctggagggtcttggggttctggaagaagcagccccctactaggcggaaatgggaaggccaccatgcagaatctcaacgaccgcctggcctcctacctggagaaggttcgcgccctggaggaggccaacatgaagctggaaagccgcatcctgaaatggcaccagcagagagatcctggcagtaagaaagattattcccagtatgaggaaaacatcacacacctgcaggagcaggtaagatgctgggtgaccctggagatccagatggggctgctttgccaggggaccctcgggaggaaaaatgagtccagaagacaatttccaggaaaatggcatcagcgcttgaagtaattgtgcacaaaggttttgggggatgttttcttattatatcttaaatttggagtgggaaacgtctgttttgtttaattagtctactgtccatggataatgtagaaaaagaaggcagcaaaaatgatagaagtgctacagactgtttcaaaaatgagactactgatttctcacagaccaaaaacatctttaaaatgtgaggcaaccagctgctgtttaatgtcacttatgacccaacgatgtcatagaaatgataagggctggtgttcatgctgcatgctcagtgcaccaggcataagagagtgtttactttctcattacctcagttctgctccacctcaaacttttttgaacaatgtggttatccatcgacaaaaggctgttacactattttgaagattatgcctaaaagttgtcaccacaccagcatataggtcatcatgacatccctagatatttccgtttgtgggttgcttgcagtaaagttgctcacagttctgacaatggcatattgctagaaccaataataataaaatgagcataatttttagaatctgagagttgagatggctataaagaccttgttcaaaaaaaaccgaactctttaaccaaacctcaaaaaagctaagcaaataccttctgggatgtctcataacattagctagaagtagaaggaatccaatcatctcataggttatgttttaaagctatctaactcccctcttatataaagcagtcccagaaaattccctgtaagaccatgatttaacctcccctagaaagggtatcacaagtttccaatatttatatatattatttcacaatgctcagtcatccttgcttgaatgtaggaaggaccagtcaagataatataaatctgtccttgtaatgaaccctaattattgaataatcaacctaataactgactgtaattaccttaactatatagtgcatggttgtctttatgaaaaaaaaaaaaaaacaaggtgactcaacagtcctcatcatgtttttttgtttaataaagttgctttggttgtagaaaggaggaattgaagatttttgcaaatggagagcaaagggagaccatgactcccaaaagaaatacaaggttagaaccagtcaaataatttatgagctcgcggaagagatttaaaaaaaagaaagggaggaaagagagggaaatgtttactgagcacttattatgtacctaggcatcctgctggatatttaatacacatgtcaacactatccaagagttttctgcaatgatggaaatgttccatattattttatttgattctgcaagaaccctgtaaggaaatggaagcttggaaaaaagtgaaatagccatccaaagccatcagcaagaagcagaggtgggattctaactcaggtctgtttccagtagcctcataaatttcactacagtgtagtgctgcctagcccacctcatataaaaatgacacttagtatgaataaagataatgcattatacttgcatcattaaccacacatcacatacttcatacacattgtctcatttaatcctcacaactgtgtggagcaggtatttgtattctcaacttacagataaggagactgagacctaatcattgtctaaatcctttggaacagaattgagaaaagtgagtaggtgcaatggggggtgtggggagcaacctgcccacccttcagatgacctggaattctgggttctgagattgaataggaaacttctttggctttgaatttcactcttttctggatttttacctctaacattgtgttttctctacacttgaagaaagaaactctttaaagttgaggttgtctatctaccccaacctccctcatttgaagatgagaaaacagaggtgcaaggaggtcccacaattacctggggcttatccttcctggaccttggtgaaatgctctgagtggatacagttctcccgtaccctcactttaggtatattaaatatcactcaaaaggttgataacaagttgagcttaaaaattaattcaatccttttgaaatccagaattggacacagtcataggagtatcataaataaaacaccttgaatgattctcaatcggactatatttggcatttttgtttacagtcaaacattctgttttcctctccctagtagatcaaacatcctgaagcaacaatgctgcaagaatatgccaacttgcttttaaaagaatgaactgagggccttcaggagaatctgggtgattaattacaacactcagtaaaaaacctatgcctcatatatcgtttctcaacccatcttcatccacttattaccatgaagattgtgtcagaaatgatggttatatcataattctgtactaagtaagcctgaataatgggaaatagttttaaacgtgctctatatcaagcacatttcagaattcacatttgtgtgctatgagaatgatagctgggggaatcagacacttgaggtggactttgcaatggataaattaccaatttaacccagaaaagctaaataagcccatagacagtatttttgattttctgattctctggatgtagattaacacctcatagtgtgtgtcaaatagaaaacctcagtgcacaagtaagtaagggttaccccacaatggcccccaggctctttgggatagagctacttttcattttgcaggagcttacataatgcaaagaataaggggtctggagggagaagtattggtaagaatgcccctaagcagcactgtggagaggagacaaggaaatatctaaaagtgtccttctttatagcaagggaaggggccatagtaccatttggaatcccacaagaggaaaaagaatgaggcaggagcagccagcctggctatgtcccaccatgaacagcaaaagtctgagcaggcatctcagcatatagaacctggggatgttcacagtgtagtcactgaatctataaaagtgctagatttttaaaaagaaaggtgtattatttacttttttctgaacaaattcagtttcgaccaatttttcactgtctataatatgccgataatatgctatttgacattatttgacatactctcttctaattctcataactctttgatgaagtaactattgttattgctattttatggatgaataaactgagactcagccaagctcactcagccaatctcacccagccagtaagcgcggagcaggatcccaggccctgctctttgagttccagacccagcattcatgccatctctaaatcctgctattgtgcattcatgataccaaattccatgggatcagtggagctttaaataggaccagacttttaaaaggtgcctttgtactgaagtatagctttgtcctaagaaaatgctttctaaataaaggaatgagctatgtaaatataatgggaattacccaggattctctgactccaactaaattacagaaacttagagctaagacctctaaggtcctctgtctctagtacagactccttatttgacaatggatgaaactgaggcctggagagtagagtgatgcagcctgatgcatccacatggatggtcaagaacagagccagaaccaaagaaaagctctaagtttctagtccagcacaacacttggcgtaaaagcattattacacttttgacaacgagacatcttctaccctaaagacagtgacatacatcaaatgtgtgctatttctctgactataacatacctacaagtgtttacaaatcataaatgtatacacacttgctcgagtaagtgctttcaatactatttttcttttcaaagtaaaaaaaaaattatacgaacatctagtgaaagtctttaactggaggctttaccactactgaagcttcttaagcattttccttagatggtaaggaattatttcagttaatattttaatagctacaatgagcacattctcatcacagaataagttgcaatgacataaacacaccttcaagttacagtcacttcgggcaaaaaaaaaatgtgttctgtgatgactattacaaaatacattgaatattagtgttagcgttgctcagtaacactgattagaaacatgattgctatcacaagtaagaattatgttcacctgaaataataatttttgtatttttggagggctgaactaattaaaagtaatggcaaaaatcactttttcaccaacctaatacaataagaaaaggatcagaacctaaagtccttttaacatcttcagctgtggatgagcttaattaagcaaaatgctatgacatgtccataacctaaaaagttagagggcattttgaacaattactgtccttccccttcctatatcattctttcagcagttgcatcaatccaagcctgtcaaaactcaacataaaaagaaaaaaggcagtaacactgactgcagatcatattcttattttaaaatcattctgctttgcacctagtatgtgctcactaagcatttactgattcggttattcattgttccactgccagaacaagaagttgtctgtactaacaagtcaaatattcaggaagctagaggacagacatgcagcggtcatgtgtgggtgtgtccaagtgagataaccttttgtgcttttgtgcatgttttacagatagtggatggtaagatgaccaatgctcagattattcttctcattgacaatgccaggatggcagtggatgacttcaacctcaagtaagttccttcttcacagggttgttcgggtttttgtttgtttgctttacaaaaggaaaactcggcggggcgcggtggctcacacctgtaatcccagcactttgggaggccaaggcgggcggatcacgaggtcaagagatcgagaccatcctggccaacatggtgaaaccccatctctactaaaaatacaaaaattagctgggcatggtggcacacgcctgtagtcccagctactcgggaggctgaggcaggagaatcacttgaacccaggaggtggaggttgcagtgagccaagatcacgccactaacactccagcctggcaacagagtgagactccatctcaaaaaaaaaaaaaaaaaggaaaactcatcttgccattacccgcatctaaaatcttataatgaaaaggcatagcaacggcaaatgcactgtgtgttacttgaatgaaccttagtttaaacaaatcagatataaagcacattatagtatggggaagtttgaatatgaatcaagaattagatgatattaaagggttgttattaatgtttaggtgtagtgttatgtttattttatttatttatttatttatttatttatttgtttatttttgagacggagtcttgctctgttgccaggctgtagtgtagtggcgtgatctcggctcactgcaacctctgccttccaggttcaagcgattctcctgcctcagcctcccaagtagctgggactataggtgcacaccaccatgcccagctaatttttgcatttttagtagcaacagggtttcaccatgttggccaggatggtctcaatctcttggcctcgtgatccgcccgcctcagcctcccaaagtactgggattacaggtgtgagccaccgtgcccggcctgtttattttaaaatatatttttcttaaaagatgcatcctgaagtatttagtcttaaaatgtcatcacatctataatctgctttaaaatacttcagcaatgaaatagatgaagcaaatatggcaaaacattcatggttgctaaatatagataatgggtatatgactgtttattatcctattctccctactcaatttaaaagttgacattgagtcaccatcatggagaagtgtagcatgaaactggcataaaaaagacatcctatatgtattcatttgctctctttaaacctaaaaagtaaaagattcacctctaaatgaaaatgaatcctttcaaaaaccatggccttccaacaatgagtgcactcttctcttccttctcaccaaaggtatgaaaatgaacactcctttaagaaagacttggaaattgaagtcgagggcctccgaaggaccttagacaacctgaccattgtcacaacagacctagaacaggaggtggaaggaatgaggaaagagctcattctcatgaagaagcaccatgagcaggtacaactccccaggaacacctgctaataagcacagctcttagcctgcacatctcaggctgattcgacagctacagaagaaaccaccacctggatgccaatccccttgtccttcaccctaaatagtctttagaaaaacatacaaatatctaatgtttctaatttcaaggttagctagtcacatgtcaaatacaacaaccaaaatgcaatcataattaatgatgaattggtcaacagttttgttaatacacaatgtttacctagatgtgcttgttaatgttactataagaatcaatgcgtgagactggacttccatcactggcccaatgttcagcaagttaggggacaatataatgaagagagtctgctaccaaccaagataagtgtgatgtggggcaaaaataaagaatcctaatttccagaagcatttaactgacttttagagttaccatccatcacaagtcctcaagactctgataaaatgatagaaaaacagttcccattttaggaaaacaaaattgcttctcaacatcaaagagctcagtttctgaatagctggttagacaatgattgttaattaaacctttcctgtggctgcttggttttcatgaaatcctatgggcgtcagccctacagtgtcacaaggcattgatgagattttgaaagcctctacaccttctttctgctgtttgcctcttgaactgcttcccaaaagctttggcctatagcctgtaaggttcagctgcttaactatgttgtcacttcaccaatccacatctgctgaacaggactttgcacactatggaagcataattctttctgaaatattttcaaccacggatcaagtcagtaatcatggaggctatttgattacctgccttatgatattctttttttttttttttttttttttggagacagggtctcactctgtcacccaggctggagtgcagtggcgcaatctcggctcactgcagcctccacctcgcaggttcaagcgattctcctgcctcagcctcccaagtagctgggattaaaggtgtgtacaaccacacccagttaattttttgtatttttagtagagacagggtttctccatgctggtcaggttggtctcaaagatattctttattttataaaattattagagaaaaaagtatacaatgttttatcaccaacaagtaagtaatatttgagaaaccaaaccagtgacagtgggagcaaccacataatcggaatgtttaaaagatctatttaccactgccaatcaacatggcaatccagccttctgattgtcaaagccggttcatttcctttctctgttattaaataggaaatggagaagcatcatgtgccaagtgacttcaatgtcaatgtgaaggtggatacaggtcccagggaagatctgattaaggtcctggaggatatgagacaagaatatgagcttataataaagaagaagcatcgagacttggacacttggtataaagaacaggtaaaagaaagatgcacaaacttcccaaaggttgcatttccatgaggtcccaatgctgacgcctttgccttgcttggtcccacagtctgcagccatgtcccaggaggcagccagtccagccactgtgcagagcagacaaggtgacatccacgaactgaagcgcacattccaggccctggagattgacctgcagacacagtacagcacggtgagtcaaggctaggaaaaccgtgaatcccacaccacctccttcacgaagccttctgagacctctctcccaggccctgaccctcaactcccttgggacaactctcactttccactttccatccaaattgtttatgatgagaaccataataaagggctaccatgtattgagtgtcccgatggtgccaggcattgtgctaagtagttcatgatattaaatgtcattaatccttacagtaaccttcccagataggtcttagtgtccccattttagagatgaggaaaccaaaactccaacagtaaaataaattggccaaggtcacacagctagtaagtaactggtgatgaaaccatatgatttatttggaggaagggggattctagacccccataatttctatcagtgccctctccacttacaaccaggctacccccctcaaaccccaatgtagagaaattccagtgccaacatggtaggtggcagatccaggcctggctaactccaaagcactgccctattcatttatgtatatgtcttatcacccagaaaactctaagttcttgtgtccaagtcatttctatcatcttcacagtttagaaaaatgcttagcatggtcataagcattcaaaatttatgaaggtctatcatttgattcccagtataccctattgagtcttctaatcattcatccatataattgccaagtgcgattctaccctcagtcttgagaggcaatgatttgttcatttatgttgcaggtgcacttgggtaaatgactgctgtgttttatgcatccgtgatggtgaacagacactgcaaatgtgcacgtagagatcatgagtacaaaaataattatagtgcaactttcaaaacgttttaacatacagtatttcacaatggccctgtgaaacaggcgaggcatgtatacccattttcatgcattctactatctgacaccaatccttagcactgaggattttttaatgaaggagtttatattctagtaggagtgacagataataaatgtgcaaatcatcaaaatatatgttagatggagaaaattgctacagagatgaagcagaggaggagggcagatgcaccagggtgaagagctgctatcttaaacaaggtggtcaggaaaggttttcctgttagagtggcagtgagcaaagaggtaaggaggtgcttgatgtggtgatgggatgtgttccaagaggagggaacagcaagtgcaaaagcgacaaggcacaagtgtgtctgatgagttggaggagcagcagggaagtccatgtggctacagtgagtgaatgaagggaagaagaaaggagagaagaggaggggaagggaggggaagagggaggaagacagggtgaggccgcggagtcccaacagaaccagacagtgtagggctttgtaggctaccttggaggggtctcaagaggaacagcaggcatagacaactctttgaggagctttgctgtagctgaaggagagcagagaaattggatgatagctgaaggtagatatgggtttaagaaagatatattttaaggtaggaaaaattattctatttgaaagctggtgggaataatccagagagaatattgataacgcaagaaggcgggcaactgccgagatgactggagcacagacagctcacacaaaagaacagagggaagccagcacccagatgcagattcaagtatgtgcctgggagcaatgtagggagcagtgggcggtctctcccgattgctttcatttcatcaacaaaattaggaagcgaggccatggactccgaggaaggatggcaaggacagaggagagggaacaaaataacctcctgggagagtaggagactggctgaccagggaaatgtgctttaaccgccaggcagcatgaacggccccctgaaaattagcagccacgataaagggagagtatccagcacagttaggagattctctttaaggttaaaattatgcgcttcagaaaagcaggtgttacatgcaaacagaactgggacttgaactcaatcctccatattctagcccagaaacttcatttggcagctgttagaatttcctcaaaaaatgacattttttttttttaccatcgtcataatcaaaaagcattgcttgagactagggttgccagatttaccaaattaaaatatagaatactcagtttagttggaatttcaaataaaaagcaattttttttgcatgtcccatgcaatactggagcaatattttggacatagttacactaaaaaattactcattactcatctgaaattcaaatttaactagatgttctctattttatctggcatccctaattgagacccttctccgaagatacaaagagatagcagtcccagttgctgtcgctctttgggagttttcaatcaggtcaaagataaaatgaaaggagttaaacaacagttcagagcaaggcaatggacttcaaaagtcctaacactgctcaactcctgactgcccaagtcccaaacctgtaagtcagcctacttctcatcttggtgtcctcagcagctaccaagacacctagccaactggtcgacatctgctaagtactcaacaatcacctgttattgactcaatcaagccatcagttaattaacagaagatcatttcctctttcagaaatctgctttggaaaacatgttatccgagacccagtctcggtactcctgcaagctccaggacatgcaagagatcatctcccactatgaggaggaactgacgcagctacgccatgaactggagcggcagaacaatgaataccaagtgctgctgggcatcaaaacccacctggagaaggaaatcaccacgtaccgacggctcctggagggagagagtgaagggtaaggcaaaggctggcacgagaggagcatgcgagggacctccagctcctgtgggtatatgtgtgcatctttgggttctgttagcaagagtcactctagcaagagaaaagttgtgttgagctactccagaagatacctatagctggctgtatttcactaagcagcaagtataattaatcaactaatactcacaggacactaagatttgcagtcagaagagttaaagtctctagaaggaaacaattcaaaaggatttggccactgtgtttcccagtaggaatgcacacaattttggctccaaaaaaaagaaggcagggggaatgtgttagtccaccagcaaaagagaaaaaaaaaaaaagatgcatatgagctagagatgtctagactttcaatctgatatttctggccaccccaggaaataacaacagctggccatataaagggcatatatattctatgatccgaaaggaagggatagaagttttataaaaatacataaataaaacatcactagaccaaactttgaacagcctgagaagctcaggggtctcaggcttgagacccagaccctggcagggatcctagagaaaaccaagcttgcagctgaaaggaggggatggttggtggacttcccctgactccagggttagcaggaggcggtacccaatgccttctgtatccagacgggttctcccgtgaacccatgaccttgagactactaagctcagacaattatcctcattaaagagcagaggatttacaagcaagcgaaggaagttagttcatcctgagaagttgttatgattgttgctaatactaaagtgagctttaacctttatcacttttataggacacgggaagaatcaaagtcgagcatgaaaggtaaaaaatttccttcattgtttgaatctctgtttttaaggaattagcatggttatccattttgtagtagtcataatccttaatgtactcccaaatgtcctgggttcaaaatgtcctgggtcaggaatcttcaatgaacaaattagctaatacaaaatgatgtaagctctcattattgtcctcaatataggtaaaagcaagcagtaaagaaaattaaaatgataattaatagtattatgtctctattaagtaatggagtcagtttactaaacccctagaaaactaagaggcaatgatttcatgatttcatttctcagatgattctgttgaacactcgtgttccatgagatttgaatagtgtattacgaacactgtgttctatggccagataaggttagaaatactgtgtgccatgatcctcttcttggacagtcctgttgcagttcagtgtattaaagatggaacaggtactgctttgaaggagaaaaggaacaagaaagaggtagaaacaacaaaagtttaactttgtttagcccagtattcccaaacatctttgacctggaaacatgctttctcagattacctttaatatctcacagaaaagttgcaggagactgtagtctgggacaagtggcactttctgattagtttgtgataaacctattctaaggcattggagattcaaagaatcagttggagtaatcatcacaggacagctggtctcactgctacccatctacaaaataagacaagggtctttgagactctcttcacacatgtcttaggatggggaacccatacttgatgggatggtcccaatggagaggttttaatttaacaaaattctcccttgtaaatttattaatgatttcaattcttccctatggtctagaattgctttattgatgtttcaacaggcacttattcaaataagttatatatttgaaaacagccatggtaagcatccttggcttctcacccattcctcatgtggcatgctttctagactttaaaatgaggtaccctgaatagcactaagtgctctgtaagctcaaggaatctgtgcagtgctacaaagcccacaggcagagaaagaactcctcaagtgcttgtggtcagagactaggttccatatgaggcacacctatgatgaaggtcttcacctccagaaggtgacactgttcagagatcctcatttcctggagagtgggagaaaatccctcctttgggaaatcccttttcccagcagcagagcccacctcattgcttagtgatcatttggaaggcactgagagccttcaggggctgacagcagagaaatgaaaatgagtacagttcagatggtggaagaagcatggcagtgacatcttccatgctctttttctcagtgtctgcaactccaaagatcaaggccataacccaggagaccatcaacggaagattagttctttgtcaagtgaatgaaatccaaaagcacgcatgagaccaatgaaagtttccgcctgttgtaaaatctattttcccccaaggaaagtccttgcacagacaccagtgagtgagttctaaaagatacccttggaattatcagactcagaaacttttattttttttttctgtaacagtctcaccagacttctcataatgctcttaatatattgcacttttctaatcaaagtgcgagtttatgagggtaaagctctactttcctactgcagccttcagattctcatcattttgcatctattttgtagccaataaaactccgcactagctgca
